United States Patent Application Publication US 2011/0183924 A1 - sequence listing, part 145

SEQ ID NO: 378260 - DNA, 4391 bp, Homo sapiens
aactgtaatgatgatgaactgaaactatgttccaacttcctgtcaacaatcttggcagtttaagaaaagcccggaaaactgtgaaaaaaatacttagtgacattgggttggaatactgtaaagaacatatagaagattttaaacaatttgaacctaatgacttttatttgaaaaacactacatgggaggatgtaggactgtgggacccatcacttacgaaaaaccaggactatcggacaaaacctttctgctgcagcgcttgtccattttcctcaaaattcttctctgcctacaaaagtcatttccgcaatgtccatagtgaagactttgaaaataggattctccttaattgcccctactgtaccttcaatgcagacaaaaagactttggaaacacacattaaaatatttcatgctccgaacgccagcgcaccaagtagcagcctcagcactttcaaagataaaaacaaaaatgatggccttaaacctaagcaggctgacagtgtagagcaagctgtttattactgtaagaagtgcacttaccgagatcctctttatgaaatagttaggaagcacatttacagggaacattttcagcatgtggcagcaccttacatagcaaaggcaggagaaaaatcactcaatggggcagtccccttaggctcgaatgcccgagaagagagtagtattcactgcaagcgatgccttttcatgccaaagtcctatgaagctttggtacagcatgtcatcgaagaccatgaacgtataggctatcaggtcactgccatgattgggcacacaaatgtagtggttccccgatccaaacccttgatgctaattgctcccaaacctcaagacaagaagagcatgggactcccaccaaggatcggttcccttgcttctggaaatgtccggtctttaccatcacagcagatggtgaatcgactctcaataccaaagcctaacttaaattctacaggagtcaacatgatgtccagtgttcatctgcagcagaacaactatggagtcaaatctgtaggccagggttacagtgttggtcagtcaatgagactgggtctaggtggcaacgcaccagtttccattcctcaacaatctcagtctgtaaagcagttacttccaagtggaaacggaaggtcttatgggcttgggtcagagcagaggtcccaggcaccagcaagatactccctgcagtctgctaatgcctcttctctctcatcgggccagttaaagtctccttccctctctcagtcacaggcatccagagtgttaggtcagtccagttccaaacctgctgcagctgccacaggccctcccccaggtaacacttcctcaactcaaaagtggaaaatatgtacaatctgtaatgagctttttcctgaaaatgtctatagtgtgcacttcgaaaaagaacataaagctgagaaagtcccagcagtagccaactacattatgaaaatacacaattttactagcaaatgcctctactgtaatcgctatttacccacagatactctgctcaaccatatgttaattcatggtctgtcttgtccatattgccgttcaactttcaatgatgtggaaaagatggccgcacacatgcggatggttcacattgatgaagagatgggacctaaaacagattctactttgagttttgatttgacattgcagcagggtagtcacactaacatccatctcctggtaactacatacaatctgagggatgccccagctgaatctgttgcttaccatgcccaaaataatcctccagttcctccaaagccacagccaaaggttcaggaaaaggcagatatccctgtaaaaagttcacctcaagctgcagtgccctataaaaaagatgttgggaaaaccctttgtcctctttgcttttcaatcctaaaaggacccatatctgatgcacttgcacatcacttacgagagaggcaccaagttattcagacggttcatccagttgagaaaaagctcacctacaaatgtatccattgccttggtgtgtataccagcaacatgaccgcctcaactatcactctgcatctagttcactgcaggggcgttggaaagacccaaaatggccaggataagacaaatgcaccctctcggcttaatcagtctccaagtctggcacctgtgaagcgcacttacgagcaaatggaatttcccttactgaaaaaacgaaagttagatgatgatagtgattcacccagcttctttgaagagaagcctgaagagcctgttgttttagctttagaccccaagggtcatgaagatgattcctatgaagccaggaaaagctttctaacaaagtatttcaacaaacagccctatcccaccaggagagaaattgagaagctagcagccagtttatggttatggaagagtgacatcgcttcccattttagtaacaaaaggaagaagtgtgtccgtgattgtgaaaagtacaagcctggcgtgttgctggggtttaacatgaaagaattaaataaagtcaagcatgagatggattttgatgctgagtggctatttgaaaatcatgatgagaaggattccagagtcaatgctagtaagactgctgacaaaaagctcaaccttgggaaggaagatgacagttcctcagacagttttgaaaatttggaagaagaatccaatgaaagtggtagcccttttgaccctgtttttgaagttgaacctaaaatctctaacgataacccagaggaacatgtactgaaggtaattcctgaggatgcttcagaatctgaggagaagctagaccaaaaagaggatggttcaaaatacgaaactattcatttgactgaggaaccaaccaaactaatgcacaatgcatctgatagtgaggttgaccaagacgatgttgttgagtggaaagacggtgcttctccatctgagagtgggcctggatcccaacaagtgtcagactttgaggacaatacctgcgaaatgaaaccaggaacctggtctgacgagtcttcccaaagcgaagatgcaaggagcagtaagccagctgccaaaaaaaaggctaccatgcaaggtgacagagagcagttgaaatggaagaatagttcctatggaaaagttgaagggttttggtctaaggaccagtcacagtggaagaatgcatctgagaatgatgagcgcttatctaacccccagattgagtggcagaatagcacaattgacagtgaggatggggaacagtttgacaacatgactgatggagtagctgagcccatgcatggcagcttagccggagttaaactgagcagccaacaggcctaagtgccaggttccctggcgttggtgacatgctgcagcctggaactctgatctccagtgtgactgcaaagctgtcttctcactggtactgccttgtgagtactggttggactgtggggcatgtggccgctgcagttccagtggttatttctaagtctatgacaggacaggctgttcttgcttcagaaccttctctgacagacacggtaactaaatgtgaaaaaccaataagctggtgactcatgaatacacacgaggaaaagcagaggtttattttatctgccttttcaacatttctttccctctgtgaaatgattggtcagatgtctttgagaagtgttaaactaattcacatggtagtgtagggccaacatacaagctaccagtctaatgtgtatagtagactttgggaaaagcgattttttttcatgtattcattctgaatagttgaaatgtatatttgtacagtcttttagacctattcaagtgatgctcatgatcctgttactgtgtgcccatcatagatttctttttttagtgttgcccttgctgtgtaataaacgctctatctagtttacctagcaaaagctcaaaactgcgctagtatggactttttggacagacttagtttttgcacataaccttgtacaatcttgcaacagaggccagccacgtaagatatatatctggactctcttgtattataggatttttcttgttctgaatatccttgacattacagctgtcaaaaacaaaaactggtatttcagatctgttttctgaaatcttttaagctaaaatcacatgcaagaattgactttgcagctactaattttgacaccttttagatctgtataaaagtgtgttgtgttgaagcagcaaaccaatgagtgctgcattttggatatttagttttatctttagttcaacaccatcatggtggattcatttataccatctaatatatgacacactgttgtagtatgtataattttgtgatctttattttccctttgtattcattttaagcatctaaataaattgctgtattgtgcttaa

SEQ ID NO: 378261 - DNA, 7315 bp, Homo sapiens
ctgaggtgagaggatcacttgagcccagaaggttgaggctatggtgaatcgtgagtgcactgcagtcaatgaaccatgagtgcactgcactccagcctgcgcgacagagtaagactctgtcttaagaaaaggaaggaaggatggatggatggatatatcaagccatatgcacatgaaagcaggtgtgtgtctgtgtgtgtacacactagctgaggatatctatgcaccttttttgtcagatgggtaggttttatgatcctatcatcagtggaattagtaaatattacaagttgtacgtgttttgactttgacttaaatttttttttccaatagaaactatgttccaacttcctgtcaacaatcttggcagtttaagaaaagcccggaaaactgtgaaaaaaatacttagtgacattgggttggaatactgtaaagaacatatagaagtaagtagcatgtcatttttaaattttaacatgactcagcttctgatccattactttgtgtcagtggccaagatggctaaatcttagatgtgattctgaatttcagccacagcagtagcttcacgaaaacattctcaatagcattaacttgtgcctttctccctaaaatgggctttttcatttttgcatcctgaagcagaaggctaccattgaggacttaagcatgtcaggcgttgaactaggtgccgtaaagttgtctatacatttaatccttagaacaaccatggaggcgggaggcagtgtagcagttcttatctccacttcacagatgaagaacaaataaataggcccagccttgcagctgagaaagtggcagtgtctgtgggactcaaagcctgttctcattctgatacgcctgaatgttctggttgaccttcttctaattgttgaggcgtgcttgtgtgggtgcttgttgtctctttccttaggatttgagcatttgttgccccttttgacccatcatagactattactttcccccttgtataacagtttgggctttatgaactgtttttcaagctgttttattctatgagctttataacagctctgtgggatagccatgcagtggtctccttttcaacatctcactgttccaggtcttatggtttgttggtcagagcccctgattgaaaagaaatgtttgaagctgtttcccccactaacctttaagttctaggtggctagggaacatagctaccttgtttatccatttagccccagcacctagcacagtgttttgcacgtaataggtgatcagtaagtgtttgaatggaattggaagtaaaaaagcaaattcattcatacaacaggttttcttaatttgagttccactaataatacttgaagagtatggcatggaaacagaagctgctcaaaagttgacttctctagtcacgttgttccaagtgtggaagtagcccttctccaaccccagagttcaggtagatctgcccaaatgaaacagtccattcactttgcactctgtggggtcatcttcatagaaataattaataccaacatcacagtacatttctgtcatgcatttgatttgttcctcctatgattatttatgtgtagacttcattttccaccttgaactgtgaactttttaggaacaagtgggattttaccctaagacttttaatcttcctagtctggagggaagtggaccattaaatttttacatgagagtataaatttaacatcatactgcttaactttctttgaatagctttctttctgcctttttgggtttgaaatttgagttttcttcctgatctgatctcctgccccctcccctcgaaaaaaatcttttttttgcacagaaccagaaatcatatttgcagtgctgtaagcaaacattgctattttaaacaccattccagtactgcaactgacgagttagagtacagtactctaatgaaaagtgctttgatattagtgtgtggctgaattttttacttaattagaacttccagcaatttccttggaaacctgactgaccatcaggaaagtggttggttgatataaaatgtagactgcaacttccatatgcctttttatatttaagagccttatcactcctagtttaagtccttgttgacgttggttttcctgtgcctctccccatcttagttaagaggtgagatttacatgtaagattgggttagcgtttataccactatgtttttgtaaacttatttcactgttttctaggattttaaacaatttgaacctaatgacttttatttgaaaaacactacatgggaggatgtaggactgtgggacccatcacttacgaaaaaccaggactatcggacaaaacctttctgctgcagcgcttgtccattttcctcaaaattcttctctgcctacaaaagtcatttccgcaatgtccatagtgaagactttgaaaataggattctccttaattgcccctactgtaccttcaatgcagacaaaaagactttggaaacacacattaaaatatttcatgctccgaacgccagcgcaccaagtagcagcctcagcactttcaaagataaaaacaaaaatgatggccttaaacctaagcaggctgacagtgtagagcaagctgtttattactgtaagaagtgcacttaccgagatcctctttatgaaatagttaggaagcacatttacagggaacattttcagcatgtggcagcaccttacatagcaaaggcaggagaaaaatcactcaatggggcagtccccttaggctcgaatgcccgagaagagagtagtattcactgcaagcgatgccttttcatgccaaagtcctatgaagctttggtacagcatgtcatcgaagaccatgaacgtataggctatcaggtcactgccatgattgggcacacaaatgtagtggttccccgatccaaacccttgatgctaattgctcccaaacctcaagacaagaagagcatgggactcccaccaaggatcggttcccttgcttctggaaatgtccggtctttaccatcacagcagatggtgaatcgactctcaataccaaagcctaacttaaattctacaggagtcaacatgatgtccagtgttcatctgcagcagaacaactatggagtcaaatctgtaggccagggttacagtgttggtcagtcaatgagactgggtctaggtggcaacgcaccagtttccattcctcaacaatctcagtctgtaaagcagttacttccaagtggaaacggaaggtcttatgggcttgggtcagagcagaggtcccaggcaccagcaagatactccctgcagtctgctaatgcctcttctctctcatcgggccagttaaagtctccttccctctctcagtcacaggcatccagagtgttaggtcagtccagttccaaacctgctgcagctgccacaggccctcccccaggtaacacttcctcaactcaaaagtggaaaatatgtacaatctgtaatgagctttttcctgaaaatgtctatagtgtgcacttcgaaaaagaacataaagctgagaaagtcccagcagtagccaactacattatgaaaatacacaattttactagcaaatgcctctactgtaatcgctatttacccacagatactctgctcaaccatatgttaattcatggtctgtcttgtccatattgccgttcaactttcaatgatgtggaaaagatggccgcacacatgcggatggttcacattgatgaagagatgggacctaaaacagattctactttgagttttgatttgacattgcagcagggtagtcacactaacatccatctcctggtaactacatacaatctgagggatgccccagctgaatctgttgcttaccatgcccaaaataatcctccagttcctccaaagccacagccaaaggttcaggaaaaggcagatatccctgtaaaaagttcacctcaagctgcagtgccctataaaaaagatgttgggaaaaccctttgtcctctttgcttttcaatcctaaaaggacccatatctgatgcacttgcacatcacttacgagagaggcaccaagttattcagacggttcatccagttgagaaaaagctcacctacaaatgtatccattgccttggtgtgtataccagcaacatgaccgcctcaactatcactctgcatctagttcactgcaggggcgttggaaagacccaaaatggccaggataagacaaatgcaccctctcggcttaatcagtctccaagtctggcacctgtgaagcgcacttacgagcaaatggaatttcccttactgaaaaaacgaaagttagatgatgatagtgattcacccagcttctttgaagagaagcctgaagagcctgttgttttagctttagaccccaagggtcatgaagatgattcctatgaagccaggaaaagctttctaacaaagtatttcaacaaacagccctatcccaccaggagagaaattgagaagctagcagccagtttatggttatggaagagtgacatcgcttcccattttagtaacaaaaggaagaagtgtgtccgtgattgtgaaaagtacaagcctggcgtgttgctggggtttaacatgaaagaattaaataaagtcaagcatgagatggattttgatgctgagtggctatttgaaaatcatgatgagaaggattccagagtcaatgctagtaagactgctgacaaaaagctcaaccttgggaaggaagatgacagttcctcagacagttttgaaaatttggaagaagaatccaatgaaagtggtagcccttttgaccctgtttttgaagttgaacctaaaatctctaacgataacccagaggaacatgtactgaaggtaattcctgaggatgcttcagaatctgaggagaagctagaccaaaaagaggatggttcaaaatacgaaactattcatttgactgaggaaccaaccaaactaatgcacaatgcatctgatagtgaggttgaccaagacgatgttgttgagtggaaagacggtgcttctccatctgagagtgggcctggatcccaacaagtgtcagactttgaggacaatacctgcgaaatgaaaccaggaacctggtctgacgagtcttcccaaagcgaagatgcaaggagcagtaagccagctgccaaaaaaaaggctaccatgcaaggtgacagagagcagttgaaatggaagaatagttcctatggaaaagttgaagggttttggtctaaggaccagtcacagtggaagaatgcatctgagaatgatgagcgcttatctaacccccagattgagtggcagaatagcacaattgacagtgaggatggggaacagtttgacaacatgactgatggagtagctgagcccatgcatggcagcttagccggagttaaactgagcagccaacaggcctaagtgccaggttccctggcgttggtgacatgctgcagcctggaactctgatctccagtgtgactgcaaagctgtcttctcactggtactgccttgtgagtactggttggactgtggggcatgtggccgctgcagttccagtggttatttctaagtctatgacaggacaggctgttcttgcttcagaaccttctctgacagacacggtaactaaatgtgaaaaaccaataagctggtgactcatgaatacacacgaggaaaagcagaggtttattttatctgccttttcaacatttctttccctctgtgaaatgattggtcagatgtctttgagaagtgttaaactaattcacatggtagtgtagggccaacatacaagctaccagtctaatgtgtatagtagactttgggaaaagcgattttttttcatgtattcattctgaatagttgaaatgtatatttgtacagtcttttagacctattcaagtgatgctcatgatcctgttactgtgtgcccatcatagatttctttttttagtgttgcccttgctgtgtaataaacgctctatctagtttacctagcaaaagctcaaaactgcgctagtatggactttttggacagacttagtttttgcacataaccttgtacaatcttgcaacagaggccagccacgtaagatatatatctggactctcttgtattataggatttttcttgttctgaatatccttgacattacagctgtcaaaaacaaaaactggtatttcagatctgttttctgaaatcttttaagctaaaatcacatgcaagaattgactttgcagctactaattttgacaccttttagatctgtataaaagtgtgttgtgttgaagcagcaaaccaatgagtgctgcattttggatatttagttttatctttagttcaacaccatcatggtggattcatttataccatctaatatatgacacactgttgtagtatgtataattttgtgatctttattttccctttgtattcattttaagcatctaaataaattgctgtattgtgcttaaaaaaaaaaaaaaaaaaaaaaaaaaaaaaaaaaaaaaaaaaaaaaaaaaaaaaaaaaaaaaaaaaaaagaaaaaaaaaaaaaagaaaagagaaaaacaagaacaccaccacccaccaactacgcaaaccgacggacgccccaaccccacgcgcgcgtcgcaccacacagccacgcgacacgcccccaaccaaccccacccccgccacacccacaaccaccggccccgcaaccaccacgacccacacaacccccacctcatgcggggcacaaacacaaccgcgcaccacacaccaacccgacccagccggccaccaccgccgcccaccgcgacgaccccaccccccgtcgccgcaccacggacccgcagcggcacccgcccccgcccacacacgcacccgcgcccgccgcccccacaaagcgcccaccccgccgcggcgcggaccgcacaccacaaccacccccccaccacgaggcggcgcgactacaacaaccaagccgcgcccgccaagcccaccacgaccccacgaacgaccgcaccccgcggcccgtacacgccacctgctccctaccactccgcccagctggagagcaacaacatccacacaacctaaccaggatacaagcaggcagctgacccacacatgctcattcacaccaccagatcacgcgccgcaacaaacacagcaaaccacccacccggacgacagcaggccacaacagcgagcgcacatcaccgcgcaccccacgcaggcgccacgagaccgcaccaccagcaaccccacagccactcgcgctccgccaacaccgaccagagacccaccaccccacaggcc

SEQ ID NO: 378262 - DNA, 786 bp, Homo sapiens
gcagtatgattattctctcaagtttgcatttcatgagtcatttactcatgctgtgttttgtagagtcttcctgaaggtgttgggttctctggtggtgagtatatctttcttaaattgctgctgtggtaggccttggtaaagttcaactgggttggatggggaagttctttgaactctttcaaaaatcaccaaactacagataatcgcaaatctagcagagggaaaatatcagttatttaactttgaaaacaaatccaactttgtattttagaaattacttgcaagacagtaagtccatgattttacaacacaattgcacttgtaggtttaaaattagaagtaaatagcatagtaaatgctcattcaatagttgtttaatgaattaagtaattatattgtttgtataattttgaggaactagaaagatgagtgaggcgatttcaatgtgtacatgagggcaacaatcgtgtataatatctacttggcacttcacagagggcatgactctttccataaaaatatttagtatgttcatgatgtcttttatctaaagaatttcatgctttagatattagtcaattctcaaaacactactctgaggaaggtgagtgacacacccctttatagacgaagaatttgcagttgaggctggttaaatgtgactaactcaagattaacactggtggtaggagacttgtctctggcctcattctgtgcccatgacctgctctttgaccttcaggaagctttatagcctcctcctgtccaacctccctcccttaaaaa

SEQ ID NO: 378263 - DNA, 6553 bp, Homo sapiens
gcggccgcggggcccggcgcggcgcgggccaaggagacggcgttcgtggaggtggtgctgttcgagtcgagcccaagcggcgattacaccacctacaccaccggcctcacgggccgcttctcgcgggccggggccacgctcagcgccgagggcgagatcgtgcagatgcacccactgggcctatgtaataacaatgacgaagaggacttgtatgaatatggctgggtaggagtggtgaagctggaacagccagaattggacccgaaaccatgcctcactgtcctaggcaaggccaagcgagcagtacagcggggagctactgcagtcatctttgatgtgtctgaaaacccagaagctattgatcagctgaaccagggctctgaagacccgctcaagaggccggtggtgtatgtgaagggtgcagatgccattaagctgatgaacatcgtcaacaagcagaaagtggctcgagcaaggatccagcaccgccctcctcgacaacccactgaatactttgacatggggattttcctggctttcttcgtcgtggtctccttggtctgcctcatcctccttgtcaaaatcaagctgaagcagcgacgcagtcagaattccatgaacaggctggctgtgcaggctctagagaagatggaaaccagaaagttcaactccaagagcaaggggcgccgggaggggagctgtggggccctggacacactcagcagcagctccacgtccgactgtgccatctgtctggagaagtacattgatggagaggagctgcgggtcatcccctgtactcaccggtttcacaggaagtgcgtggacccctggctgctgcagcaccacacctgcccccactgtcggcacaacatcatagaacaaaagggaaacccaagcgcggtgtgtgtggagaccagcaacctctcacgtggtcggcagcagagggtgaccctgccggtgcattaccccggccgcgtgcacaggaccaacgccatcccagcctaccctacgaggacaagcatggactcccacggcaaccccgtcaccttgctgaccatggaccggcacggggagcagagcctctattccccgcagacccccgcctacatccgcagctacccacccctccacctggaccacagcctggccgctcaccgctgcggcctggagcaccgggcctactccccagcccaccccttccgcaggcccaagttgagtggccgcagcttctccaaggcagcttgcttctcccagtatgagaccatgtaccagcactactacttccagggcctcagctacccggagcaggaggggcagtccccacctagcctcgcaccccggggcccggcccgtgcctttcctccgagcggcagtggcagcctgctcttccccaccgtggtgcacgtggccccgccctcccacctggagagcggcagcacgtccagcttcagctgctatcacggccaccgctcggtgtgcagtggctacctggccgactgcccaggcagcgacagcagcagcagcagcagctccggccagtgccactgttcctccagtgactctgtggtagactgcactgaggtcagcaaccagggcgtgtacgggagctgctccaccttccgcagctccctcagcagcgactatgaccccttcatctaccgcagccggagcccctgtcgtgccagtgaggcggggggctcgggcagctcgggccggggacctgccctgtgcttcgagggctccccgcctcccgaggagctcccggcggtgcacagtcatggtgctgggcggggcgagccttggccgggccctgcctctccctcgggggatcaggtgtccacctgcagcctggagatgaactacagcagcaactcctccctggagcacagggggcccaatagctctacctcagaagtggggctcgaggcttctcctggggccgcccctgacctcaggaggacctggaaggggggccacgagttgccgtcgtgtgcctgctgctgcgagccccagccctccccagccgggcctagcgccggagcagctggcagcagcaccttgttcctggggccccacctctacgagggctctggcccggcgggtggggagccccagtcaggaagctcccagggcttgtacggccttcaccccgaccatttgcccaggacagatggggtgaaatacgagggtctgccctgctgcttctatgaagagaagcaggtggcccgcgggggcggagggggcagcggctgctacactgaggactactcggtgagtgtgcagtacacgctcaccgaggaacccccgcccggctgctaccccggggcccgggacctgagccagcgcatccccatcattccagaggatgtggactgtgatctgggcctgccctcggactgccaagggacccacagcctcggctcctggggtgggacgcgaggcccggataccccacggccccacaggggcctgggagcaacccgggaagaggagcgggctctgtgctgccaggctagggccctactgcggcctggctgccctccggaggaggcgggtgctgtcagggccaacttccctagtgccctccaggacactcaggagtccagcaccactgccactgaggctgcaggaccgagatctcactcagcagacagcagcagcccgggagcctgagctcaggaggaactcttacctggaaattgggaactgtatggagactccaaactgacttctttcaaaaaacaaaaacaaaaaatttttttagctttgacaaacacacaaaagtggtaataaagagagccctccttgtcaacccaaaatgtgagccccctgtggcaaaaccaccccctaccccattaacaaatcaacagacaaaattctccgagtcctttgcctcttttgataacatgttgttctgttttgtaaagtgtgtgtgcttggggttccgaggtgtgggattgagttctctgctttgtttttttttaagatattgtatgtaaatgtaaaaagttatttaaatatatattttaaagaaccctaactgccaacttttgctgaaaaagaaaaaaaaatcactgctgcattaaatgaaccacatcatgtgtagatactgttgtctccctgaagggagctcaggcctttgaaaagctcagggcttcacctgccttagaaaatgaaccagaaacttgaagtaaagctagttgataggggtacaggctctgaggagcagtgcaaaactgcctctttctttctcgtggcaaatcccaatgtacacgatttcaggtctcagacgccatgcctctccagcccacgcctttaggcaggtgatggcagcagctaggaatagggtgtacatgatccacagccctgcggagccaggtcaagccgctgctatgaaagctccagggtgatggggacgattctgcccagtgtcctcagtctgtcccctcaggtcatggtcccaagtgaaatgacagagttcacagccctggtcttggctgaggtccaggtcatagtaagggcatgttcttggggccctcgacctgaactctgaccctccgggcagggaagaggaggttgtcccctttggttgtcctggctttggagtcctttgcaaaaatattttgggccccctgccactggctgcagaaatggctcgacggggtgtgtggggacagacacccagaaggaatgtacttttgtggccttggtgtccgatggggctgggggagagtgctctccactgacccagcagcacacccatgtgcagtgcgcctgcatctgtgtgggggcagccacaccccttggctgctgcttccttgggctgcctttctgggggcatgtgactggacctacgaggtctgcactgagctccatttgaatgatacctttcctatcccatttcccccacggaagcaccgcttcagggttattcagtcctctgcctcatggctgaaattgctcatctcgtctgcagatgtctactatcctgtctacctaatgcactattatgtattgattctccatgagacagagagagagagagactatcagatagtttacacccaaagggtaggtttttgtatatttttccagccttttttattaaggggaaggggagagtttaaaaacccaaaccgttgtggttttaaggtgtttcatttttaaaagggagagagaatctatttaaagctatttcagatcagggattgtcatccttttttgtccaatgtattccttgttctttaaaaaaattttttttagaggaaactaatattagtctttgtgttcactaactcttctggtcacttgtatttatttattcattcattcatcagatatttgttgccatctgaaagaactggcccagtgggtctgaaagctcgcttgagaataggaaacttgagacctggccccctgtgggtaggagaacaaggaccacctgggttctccagtcttgaacgagaatctcactcttatcagaatgtttttcttaacctcagcgtatgatgaggaaatttacttatctctagctaggatttgacaaattccaacatcaaatgatcaaaacatttgccactgaggcttcactggtgagatccgttctccgtcctcgggtgcagtcccttgggggctgctcctcggactgcgccccgcacacctgttatcgagggtgtgagaagcgcctaagctggtgacatgtgatctgggacgccttcatttctcgggccaggagtagcagctgctaaggacagcagcttgcattgcgtggttttagggaagcagggtctggcttttaatatgaactgcaaaaagcagcttctcactgatatttttttgttgttgtttctggggggtttttttgttttgtttttaatgcctttgagtgcatattttcttcctcgtctgaaaccgaactcccaaagtggctttctttagccctggctggaaaaccacctctcaatagccttaagcaataaatagatgagtagagaatgtggcttcaactgggcttattaaagtaagtgtgtctagttttcacttgaacaagtgatagctgcagatggcgaaagaaacccatttaatttttgtagcttacaggtggtagaaacaaaaatgcaattttaaaaccttaaataccaaataccaaccattgccttttttttttttgagatggaattttgctcttgtcacccaggctggagtgcaatggcgcgatctcacctcactgcaacctctgcctcccgggtccaagtgattctcctgcctcagcctcccaagtagctgggattacaggcatgcgccaccacacccagctaattttgtatttttggtagagacagggtatctccatgttggtcaggctggtcttggattcccgacctcaggtgatccgcccacctcggcctcccaaagtgctgggattacaggcgtgagccaccatgcctgcccagcaataccaaccattgtcttttaaattcgtgttggcttctcagacagggagatcactggaataaaataaccgatggtcttattttgtcacacgtaaatcaaaagaaatgtcctctttgaagttgtaagactccaccaatgacagacacccttttcggtggactctgagtggtgtgtagtggttttatagccatggaaactaggagtatctcactttccactgagaacccctgcccccaatccctctaagttggggtgtggcagttgggcagggtcaagtgacccagccctggctgtaggacagccatatacagtgaagagttctagaaccagctaaaaatggaagtttgggtgtttaccaacaaggtacctctttatggatgcagccccagtaagctggctttaactctcagctccttccctgtctcctcctaatccaagcccttttataaaataaagccccttctgtcccactgctcacatacttatgtgctgctagtctctactcgaagttcgtgcaggactaatgcttttaaaatgaggtctaaaaaataattactagtcgagactattattctttaaacagaactgcctttttctactctttatgtaaactctttctattgtgttggtctaacaaggcactattttaaaattttttaatttttcccatagcacttaaaagagattttgtaaagaccttgctgtaaagattttgtaataaaatggtctaagggctctttttccaacattaccatttttaaaaaatgttttaaaagctagaagacaacttatgtatattctgtatatgtatagcagcacatttcatttatggaaatatgttctcagaatatttatttactaatatatttatcttaagccatgtcttatgttgagagtgtgacattgttggaataatcattgaaaatgactaacacaagaccctgtaaatacatgataattgcacacagattttacatatttgcagaccaaaaatgatttaaaacaagttgtagtcttctatggttttgtaacaaattgtacacatgactgtaaaaaaaaaaatacaattttatcaagtatgtgttaaaaaaaatca

SEQ ID NO: 378264 - DNA, 506 bp, Homo sapiens
gcggccgcggggcccggcgcggcgcgggccaaggagacggcgttcgtggaggtggtgctgttcgagtcgagcccaagcggcgattacaccacctacaccaccggcctcacgggccgcttctcgcgggccggggccacgctcagcgccgagggcgagatcgtgcaggtagctgcccgccgcccgggccccgcgccgcctccgccacaagatggctccgggggctgcgcccgccgaccccgccgcgggctgcctgactggcgggcgggcgggaggggtggccgagaggccggcggcatccctcccctgcgggcgggcaggcgggcgggacgcggcctccggggcgcatccgcggggggcgagcgcacgtgggggctagagctcctgtgaaccccggggcgggaggggcatcctgggcccggcacccatgctggggcagcccccttggccggttgggtatttaggtctgcctcaggtggaagtcccgggaactacctgttgaatgccaa

SEQ ID NO: 378265 - DNA, 5847 bp, Homo sapiens
  misc_feature (40)..(40): n is a, c, g, or t
ataggcaggtgaaggccggggggtaatcggacgagggtgncatctgtctggagaagtacattgatggagaggagctgcgggtcatcccctgtactcaccggtttcacaggaagtgcgtggacccctggctgctgcagcaccacacctgcccccactgtcggcacaacatcatagaacaaaagggaaacccaagcgcggtgtgtgtggagaccagcaacctctcacgtggtcggcagcagagggtgaccctgccggtgcattaccccggccgcgtgcacaggaccaacgccatcccagcctaccctacgaggacaagcatggactcccacggcaaccccgtcaccttgctgaccatggaccggcacggggagcagagcctctattccccgcagacccccgcctacatccgcagctacccacccctccacctggaccacagcctggccgctcaccgctgcggcctggagcaccgggcctactccccagcccaccccttccgcaggcccaagttgagtggccgcagcttctccaaggcagcttgcttctcccagtatgagaccatgtaccagcactactacttccagggcctcagctacccggagcaggaggggcagtccccacctagcctcgcaccccggggcccggcccgtgcctttcctccgagcggcagtggcagcctgctcttccccaccgtggtgcacgtggccccgccctcccacctggagagcggcagcacgtccagcttcagctgctatcacggccaccgctcggtgtgcagtggctacctggccgactgcccaggcagcgacagcagcagcagcagcagctccggccagtgccactgttcctccagtgactctgtggtagactgcactgaggtcagcaaccagggcgtgtacgggagctgctccaccttccgcagctccctcagcagcgactatgaccccttcatctaccgcagccggagcccctgtcgtgccagtgaggcggggggctcgggcagctcgggccggggacctgccctgtgcttcgagggctccccgcctcccgaggagctcccggcggtgcacagtcatggtgctgggcggggcgagccttggccgggccctgcctctccctcgggggatcaggtgtccacctgcagcctggagatgaactacagcagcaactcctccctggagcacagggggcccaatagctctacctcagaagtggggctcgaggcttctcctggggccgcccctgacctcaggaggacctggaaggggggccacgagttgccgtcgtgtgcctgctgctgcgagccccagccctccccagccgggcctagcgccggagcagctggcagcagcaccttgttcctggggccccacctctacgagggctctggcccggcgggtggggagccccagtcaggaagctcccagggcttgtacggccttcaccccgaccatttgcccaggacagatggggtgaaatacgagggtctgccctgctgcttctatgaagagaagcaggtggcccgcgggggcggagggggcagcggctgctacactgaggactactcggtgagtgtgcagtacacgctcaccgaggaacccccgcccggctgctaccccggggcccgggacctgagccagcgcatccccatcattccagaggatgtggactgtgatctgggcctgccctcggactgccaagggacccacagcctcggctcctggggtgggacgcgaggcccggataccccacggccccacaggggcctgggagcaacccgggaagaggagcgggctctgtgctgccaggctagggccctactgcggcctggctgccctccggaggaggcgggtgctgtcagggccaacttccctagtgccctccaggacactcaggagtccagcaccactgccactgaggctgcaggaccgagatctcactcagcagacagcagcagcccgggagcctgagctcaggaggaactcttacctggaaattgggaactgtatggagactccaaactgacttctttcaaaaaacaaaaacaaaaaatttttttagctttgacaaacacacaaaagtggtaataaagagagccctccttgtcaacccaaaatgtgagccccctgtggcaaaaccaccccctaccccattaacaaatcaacagacaaaattctccgagtcctttgcctcttttgataacatgttgttctgttttgtaaagtgtgtgtgcttggggttccgaggtgtgggattgagttctctgctttgtttttttttaagatattgtatgtaaatgtaaaaagttatttaaatatatattttaaagaaccctaactgccaacttttgctgaaaaagaaaaaaaaatcactgctgcattaaatgaaccacatcatgtgtagatactgttgtctccctgaagggagctcaggcctttgaaaagctcagggcttcacctgccttagaaaatgaaccagaaacttgaagtaaagctagttgataggggtacaggctctgaggagcagtgcaaaactgcctctttctttctcgtggcaaatcccaatgtacacgatttcaggtctcagacgccatgcctctccagcccacgcctttaggcaggtgatggcagcagctaggaatagggtgtacatgatccacagccctgcggagccaggtcaagccgctgctatgaaagctccagggtgatggggacgattctgcccagtgtcctcagtctgtcccctcaggtcatggtcccaagtgaaatgacagagttcacagccctggtcttggctgaggtccaggtcatagtaagggcatgttcttggggccctcgacctgaactctgaccctccgggcagggaagaggaggttgtcccctttggttgtcctggctttggagtcctttgcaaaaatattttgggccccctgccactggctgcagaaatggctcgacggggtgtgtggggacagacacccagaaggaatgtacttttgtggccttggtgtccgatggggctgggggagagtgctctccactgacccagcagcacacccatgtgcagtgcgcctgcatctgtgtgggggcagccacaccccttggctgctgcttccttgggctgcctttctgggggcatgtgactggacctacgaggtctgcactgagctccatttgaatgatacctttcctatcccatttcccccacggaagcaccgcttcagggttattcagtcctctgcctcatggctgaaattgctcatctcgtctgcagatgtctactatcctgtctacctaatgcactattatgtattgattctccatgagacagagagagagagagactatcagatagtttacacccaaagggtaggtttttgtatatttttccagccttttttattaaggggaaggggagagtttaaaaacccaaaccgttgtggttttaaggtgtttcatttttaaaagggagagagaatctatttaaagctatttcagatcagggattgtcatccttttttgtccaatgtattccttgttctttaaaaaaattttttttagaggaaactaatattagtctttgtgttcactaactcttctggtcacttgtatttatttattcattcattcatcagatatttgttgccatctgaaagaactggcccagtgggtctgaaagctcgcttgagaataggaaacttgagacctggccccctgtgggtaggagaacaaggaccacctgggttctccagtcttgaacgagaatctcactcttatcagaatgtttttcttaacctcagcgtatgatgaggaaatttacttatctctagctaggatttgacaaattccaacatcaaatgatcaaaacatttgccactgaggcttcactggtgagatccgttctccgtcctcgggtgcagtcccttgggggctgctcctcggactgcgccccgcacacctgttatcgagggtgtgagaagcgcctaagctggtgacatgtgatctgggacgccttcatttctcgggccaggagtagcagctgctaaggacagcagcttgcattgcgtggttttagggaagcagggtctggcttttaatatgaactgcaaaaagcagcttctcactgatatttttttgttgttgtttctggggggtttttttgttttgtttttaatgcctttgagtgcatattttcttcctcgtctgaaaccgaactcccaaagtggctttctttagccctggctggaaaaccacctctcaatagccttaagcaataaatagatgagtagagaatgtggcttcaactgggcttattaaagtaagtgtgtctagttttcacttgaacaagtgatagctgcagatggcgaaagaaacccatttaatttttgtagcttacaggtggtagaaacaaaaatgcaattttaaaaccttaaataccaaataccaaccattgccttttttttttttgagatggaattttgctcttgtcacccaggctggagtgcaatggcgcgatctcacctcactgcaacctctgcctcccgggtccaagtgattctcctgcctcagcctcccaagtagctgggattacaggcatgcgccaccacacccagctaattttgtatttttggtagagacagggtatctccatgttggtcaggctggtcttggattcccgacctcaggtgatccgcccacctcggcctcccaaagtgctgggattacaggcgtgagccaccatgcctgcccagcaataccaaccattgtcttttaaattcgtgttggcttctcagacagggagatcactggaataaaataaccgatggtcttattttgtcacacgtaaatcaaaagaaatgtcctctttgaagttgtaagactccaccaatgacagacacccttttcggtggactctgagtggtgtgtagtggttttatagccatggaaactaggagtatctcactttccactgagaacccctgcccccaatccctctaagttggggtgtggcagttgggcagggtcaagtgacccagccctggctgtaggacagccatatacagtgaagagttctagaaccagctaaaaatggaagtttgggtgtttaccaacaaggtacctctttatggatgcagccccagtaagctggctttaactctcagctccttccctgtctcctcctaatccaagcccttttataaaataaagccccttctgtcccactgctcacatacttatgtgctgctagtctctactcgaagttcgtgcaggactaatgcttttaaaatgaggtctaaaaaataattactagtcgagactattattctttaaacagaactgcctttttctactctttatgtaaactctttctattgtgttggtctaacaaggcactattttaaaattttttaatttttcccatagcacttaaaagagattttgtaaagaccttgctgtaaagattttgtaataaaatggtctaagggctctttttccaacattaccatttttaaaaaatgttttaaaagctagaagacaacttatgtatattctgtatatgtatagcagcacatttcatttatggaaatatgttctcagaatatttatttactaatatatttatcttaagccatgtcttatgttgagagtgtgacattgttggaataatcattgaaaatgactaacacaagaccctgtaaatacatgataattgcacacagattttacatatttgcagaccaaaaatgatttaaaacaagttgtagtcttctatggttttgtaacaaattgtacacatgactgtaaaaaaaaaaatacaattttatcaagtatgtgttaaaaaaaatca

SEQ ID NO: 378266 - DNA, 4072 bp, Homo sapiens
aatggagcccctctgggaacaggaacctgcttcagccctttagcatacacaggcctgccacgtgctggggacagggccacctgagtcccttgcctggtcccatgtgtggtgccagctccctcccctgatgattgttctctctctttcccaggaccgagatctcactcagcagacagcagcagcccgggagcctgagctcaggaggaactcttacctggaaattgggaactgtatggagactccaaactgacttctttcaaaaaacaaaaacaaaaaatttttttagctttgacaaacacacaaaagtggtaataaagagagccctccttgtcaacccaaaatgtgagccccctgtggcaaaaccaccccctaccccattaacaaatcaacagacaaaattctccgagtcctttgcctcttttgataacatgttgttctgttttgtaaagtgtgtgtgcttggggttccgaggtgtgggattgagttctctgctttgtttttttttaagatattgtatgtaaatgtaaaaagttatttaaatatatattttaaagaaccctaactgccaacttttgctgaaaaagaaaaaaaaatcactgctgcattaaatgaaccacatcatgtgtagatactgttgtctccctgaagggagctcaggcctttgaaaagctcagggcttcacctgccttagaaaatgaaccagaaacttgaagtaaagctagttgataggggtacaggctctgaggagcagtgcaaaactgcctctttctttctcgtggcaaatcccaatgtacacgatttcaggtctcagacgccatgcctctccagcccacgcctttaggcaggtgatggcagcagctaggaatagggtgtacatgatccacagccctgcggagccaggtcaagccgctgctatgaaagctccagggtgatggggacgattctgcccagtgtcctcagtctgtcccctcaggtcatggtcccaagtgaaatgacagagttcacagccctggtcttggctgaggtccaggtcatagtaagggcatgttcttggggccctcgacctgaactctgaccctccgggcagggaagaggaggttgtcccctttggttgtcctggctttggagtcctttgcaaaaatattttgggccccctgccactggctgcagaaatggctcgacggggtgtgtggggacagacacccagaaggaatgtacttttgtggccttggtgtccgatggggctgggggagagtgctctccactgacccagcagcacacccatgtgcagtgcgcctgcatctgtgtgggggcagccacaccccttggctgctgcttccttgggctgcctttctgggggcatgtgactggacctacgaggtctgcactgagctccatttgaatgatacctttcctatcccatttcccccacggaagcaccgcttcagggttattcagtcctctgcctcatggctgaaattgctcatctcgtctgcagatgtctactatcctgtctacctaatgcactattatgtattgattctccatgagacagagagagagagagactatcagatagtttacacccaaagggtaggtttttgtatatttttccagccttttttattaaggggaaggggagagtttaaaaacccaaaccgttgtggttttaaggtgtttcatttttaaaagggagagagaatctatttaaagctatttcagatcagggattgtcatccttttttgtccaatgtattccttgttctttaaaaaaattttttttagaggaaactaatattagtctttgtgttcactaactcttctggtcacttgtatttatttattcattcattcatcagatatttgttgccatctgaaagaactggcccagtgggtctgaaagctcgcttgagaataggaaacttgagacctggccccctgtgggtaggagaacaaggaccacctgggttctccagtcttgaacgagaatctcactcttatcagaatgtttttcttaacctcagcgtatgatgaggaaatttacttatctctagctaggatttgacaaattccaacatcaaatgatcaaaacatttgccactgaggcttcactggtgagatccgttctccgtcctcgggtgcagtcccttgggggctgctcctcggactgcgccccgcacacctgttatcgagggtgtgagaagcgcctaagctggtgacatgtgatctgggacgccttcatttctcgggccaggagtagcagctgctaaggacagcagcttgcattgcgtggttttagggaagcagggtctggcttttaatatgaactgcaaaaagcagcttctcactgatatttttttgttgttgtttctggggggtttttttgttttgtttttaatgcctttgagtgcatattttcttcctcgtctgaaaccgaactcccaaagtggctttctttagccctggctggaaaaccacctctcaatagccttaagcaataaatagatgagtagagaatgtggcttcaactgggcttattaaagtaagtgtgtctagttttcacttgaacaagtgatagctgcagatggcgaaagaaacccatttaatttttgtagcttacaggtggtagaaacaaaaatgcaattttaaaaccttaaataccaaataccaaccattgccttttttttttttgagatggaattttgctcttgtcacccaggctggagtgcaatggcgcgatctcacctcactgcaacctctgcctcccgggtccaagtgattctcctgcctcagcctcccaagtagctgggattacaggcatgcgccaccacacccagctaattttgtatttttggtagagacagggtatctccatgttggtcaggctggtcttggattcccgacctcaggtgatccgcccacctcggcctcccaaagtgctgggattacaggcgtgagccaccatgcctgcccagcaataccaaccattgtcttttaaattcgtgttggcttctcagacagggagatcactggaataaaataaccgatggtcttattttgtcacacgtaaatcaaaagaaatgtcctctttgaagttgtaagactccaccaatgacagacacccttttcggtggactctgagtggtgtgtagtggttttatagccatggaaactaggagtatctcactttccactgagaacccctgcccccaatccctctaagttggggtgtggcagttgggcagggtcaagtgacccagccctggctgtaggacagccatatacagtgaagagttctagaaccagctaaaaatggaagtttgggtgtttaccaacaaggtacctctttatggatgcagccccagtaagctggctttaactctcagctccttccctgtctcctcctaatccaagcccttttataaaataaagccccttctgtcccactgctcacatacttatgtgctgctagtctctactcgaagttcgtgcaggactaatgcttttaaaatgaggtctaaaaaataattactagtcgagactattattctttaaacagaactgcctttttctactctttatgtaaactctttctattgtgttggtctaacaaggcactattttaaaattttttaatttttcccatagcacttaaaagagattttgtaaagaccttgctgtaaagattttgtaataaaatggtctaagggctctttttccaacattaccatttttaaaaaatgttttaaaagctagaagacaacttatgtatattctgtatatgtatagcagcacatttcatttatggaaatatgttctcagaatatttatttactaatatatttatcttaagccatgtcttatgttgagagtgtgacattgttggaataatcattgaaaatgactaacacaagaccctgtaaatacatgataattgcacacagattttacatatttgcagaccaaaaatgatttaaaacaagttgtagtcttctatggttttgtaacaaattgtacacatgactgtaaaaaaaaaaatacaattttatcaagtatgtgttaaaaaaaatca

SEQ ID NO: 378267 - DNA, 2886 bp, Homo sapiens
gcggccgcggggcccggcgcggcgcgggccaaggagacggcgttcgtggaggtggtgctgttcgagtcgagcccaagcggcgattacaccacctacaccaccggcctcacgggccgcttctcgcgggccggggccacgctcagcgccgagggcgagatcgtgcagatgcacccactgggcctatgtaataacaatgacgaagaggacttgtatgaatatggctgggtaggagtggtgaagctggaacagccagaattggacccgaaaccatgcctcactgtcctaggcaaggccaagcgagcagtacagcggggagctactgcagtcatctttgatgtgtctgaaaacccagaagctattgatcagctgaaccagggctctgaagacccgctcaagaggccggtggtgtatgtgaagggtgcagatgccattaagctgatgaacatcgtcaacaagcagaaagtggctcgagcaaggatccagcaccgccctcctcgacaacccactgaatactttgacatggggattttcctggctttcttcgtcgtggtctccttggtctgcctcatcctccttgtcaaaatcaagctgaagcagcgacgcagtcagaattccatgaacaggctggctgtgcaggctctagagaagatggaaaccagaaagttcaactccaagagcaaggggcgccgggaggggagctgtggggccctggacacactcagcagcagctccacgtccgactgtgccatctgtctggagaagtacattgatggagaggagctgcgggtcatcccctgtactcaccggtttcacaggaagtgcgtggacccctggctgctgcagcaccacacctgcccccactgtcggcacaacatcatagaacaaaagggaaacccaagcgcggtgtgtgtggagaccagcaacctctcacgtggtcggcagcagagggtgaccctgccggtgcattaccccggccgcgtgcacaggaccaacgccatcccagcctaccctacgaggacaagcatggactcccacggcaaccccgtcaccttgctgaccatggaccggcacggggagcagagcctctattccccgcagacccccgcctacatccgcagctacccacccctccacctggaccacagcctggccgctcaccgctgcggcctggagcaccgggcctactccccagcccaccccttccgcaggcccaagttgagtggccgcagcttctccaaggcagcttgcttctcccagtatgagaccatgtaccagcactactacttccagggcctcagctacccggagcaggaggggcagtccccacctagcctcgcaccccggggcccggcccgtgcctttcctccgagcggcagtggcagcctgctcttccccaccgtggtgcacgtggccccgccctcccacctggagagcggcagcacgtccagcttcagctgctatcacggccaccgctcggtgtgcagtggctacctggccgactgcccaggcagcgacagcagcagcagcagcagctccggccagtgccactgttcctccagtgactctgtggtagactgcactgaggtcagcaaccagggcgtgtacgggagctgctccaccttccgcagctccctcagcagcgactatgaccccttcatctaccgcagccggagcccctgtcgtgccagtgaggcggggggctcgggcagctcgggccggggacctgccctgtgcttcgagggctccccgcctcccgaggagctcccggcggtgcacagtcatggtgctgggcggggcgagccttggccgggccctgcctctccctcgggggatcaggtgtccacctgcagcctggagatgaactacagcagcaactcctccctggagcacagggggcccaatagctctacctcagaagtggggctcgaggcttctcctggggccgcccctgacctcaggaggacctggaaggggggccacgagttgccgtcgtgtgcctgctgctgcgagccccagccctccccagccgggcctagcgccggagcagctggcagcagcaccttgttcctggggccccacctctacgagggctctggcccggcgggtggggagccccagtcaggaagctcccagggcttgtacggccttcaccccgaccatttgcccaggacagatggggtgaaatacgagggtctgccctgctgcttctatgaagagaagcaggtggcccgcgggggcggagggggcagcggctgctacactgaggactactcggtgagtgtgcagtacacgctcaccgaggaacccccgcccggctgctaccccggggcccgggacctgagccagcgcatccccatcattccagaggatgtggactgtgatctgggcctgccctcggactgccaagggacccacagcctcggctcctggggtgggacgcgaggcccggataccccacggccccacaggggcctgggagcaacccgggaagaggagcgggctctgtgctgccaggctagggccctactgcggcctggctgccctccggaggaggcgggtgctgtcagggccaacttccctagtgccctccaggacactcaggagtccagcaccactgccactgaggctgcaggaccgagatctcactcagcagacagcagcagcccgggagcctgagctcaggaggaactcttacctggaaattgggaactgtatggagactccaaactgacttctttcaaaaaacaaaaacaaaaaatttttttagctttgacaaacacacaaaagtggtaataaagagagccctccttgtcaacccaaaatgtgagccccctgtggcaaaaccaccccctaccccattaacaaatcaacagacaaaattctccg

SEQ ID NO: 378268 - DNA, 3042 bp, Homo sapiens
gcggccgcggggcccggcgcggcgcgggccaaggagacggcgttcgtggaggtggtgctgttcgagtcgagcccaagcggcgattacaccacctacaccaccggcctcacgggccgcttctcgcgggccggggccacgctcagcgccgagggcgagatcgtgcagatgcacccactgggcctatgtaataacaatgacgaagaggacttgtatgaatatggctgggtaggagtggtgaagctggaacagccagaattggacccgaaaccatgcctcactgtcctaggcaaggccaagcgagcagtacagcggggagctactgcagtcatctttgatgtgtctgaaaacccagaagctattgatcagctgaaccagggctctgaagacccgctcaagaggccggtggtgtatgtgaagggtgcagatgccattaagctgatgaacatcgtcaacaagcagaaagtggctcgagcaaggatccagcaccgccctcctcgacaacccactgaatactttgacatggggattttcctggctttcttcgtcgtggtctccttggtctgcctcatcctccttgtcaaaatcaagctgaagcagcgacgcagtcagaattccatgaacaggctggctgtgcaggctctagagaagatggaaaccagaaagttcaactccaagagcaaggggcgccgggaggggagctgtggggccctggacacactcagcagcagctccacgtccgactgtgccatctgtctggagaagtacattgatggagaggagctgcgggtcatcccctgtactcaccggtttcacaggaagtgcgtggacccctggctgctgcagcaccacacctgcccccactgtcggcacaacatcatagaacaaaagggaaacccaagcgcggtgtgtgtggagaccagcaacctctcacgtggtcggcagcagagggtgaccctgccggtgcattaccccggccgcgtgcacaggaccaacgccatcccagcctaccctacgaggacaagcatggactcccacggcaaccccgtcaccttgctgaccatggaccggcacggggagcagagcctctattccccgcagacccccgcctacatccgcagctacccacccctccacctggaccacagcctggccgctcaccgctgcggcctggagcaccgggcctactccccagcccaccccttccgcaggcccaagttgagtggccgcagcttctccaaggcagcttgcttctcccagtatgagaccatgtaccagcactactacttccagggcctcagctacccggagcaggaggggcagtccccacctagcctcgcaccccggggcccggcccgtgcctttcctccgagcggcagtggcagcctgctcttccccaccgtggtgcacgtggccccgccctcccacctggagagcggcagcacgtccagcttcagctgctatcacggccaccgctcggtgtgcagtggctacctggccgactgcccaggcagcgacagcagcagcagcagcagctccggccagtgccactgttcctccagtgactctgtggtagactgcactgaggtcagcaaccagggcgtgtacgggagctgctccaccttccgcagctccctcagcagcgactatgaccccttcatctaccgcagccggagcccctgtcgtgccagtgaggcggggggctcgggcagctcgggccggggacctgccctgtgcttcgagggctccccgcctcccgaggagctcccggcggtgcacagtcatggtgctgggcggggcgagccttggccgggccctgcctctccctcgggggatcaggtgtccacctgcagcctggagatgaactacagcagcaactcctccctggagcacagggggcccaatagctctacctcagaagtggggctcgaggcttctcctggggccgcccctgacctcaggaggacctggaaggggggccacgagttgccgtcgtgtgcctgctgctgcgagccccagccctccccagccgggcctagcgccggagcagctggcagcagcaccttgttcctggggccccacctctacgagggctctggcccggcgggtggggagccccagtcaggaagctcccagggcttgtacggccttcaccccgaccatttgcccaggacagatggggtgaaatacgagggtctgccctgctgcttctatgaagagaagcaggtggcccgcgggggcggagggggcagcggctgctacactgaggactactcggtgagtgtgcagtacacgctcaccgaggaacccccgcccggctgctaccccggggcccgggacctgagccagcgcatccccatcattccagaggatgtggactgtgatctgggcctgccctcggactgccaagggacccacagcctcggctcctggggtgggacgcgaggcccggataccccacggccccacaggggcctgggagcaacccgggaagaggagcgggctctgtgctgccaggctagggccctactgcggcctggctgccctccggaggaggcgggtgctgtcagggccaacttccctagtgccctccaggacactcaggagtccagcaccactgccactgaggctgcaggaccgagatctcactcagcagacagcagcagcccgggagcctgagctcaggaggaactcttacctggaaattgggaactgtatggagactccaaactgacttctttcaaaaaacaaaaacaaaaaatttttttagctttgacaaacacacaaaagtggtaataaagagagccctccttgtcaacccaaaatgtgagccccctgtggcaaaaccaccccctaccccattaacaaatcaacagacaaaattctccgagtcctttgcctcttttgataacatgttgttctgttttgtaaagtgtgtgtgcttggggttccgaggtgtgggattgagttctctgctttgtttttttttaagatattgtatgtaaatgtaaaaagttatttaaatatatattttaaagaacccta

SEQ ID NO: 378269 - DNA, 5154 bp, Homo sapiens
gcggccgcggggcccggcgcggcgcgggccaaggagacggcgttcgtggaggtggtgctgttcgagtcgagcccaagcggcgattacaccacctacaccaccggcctcacgggccgcttctcgcgggccggggccacgctcagcgccgagggcgagatcgtgcagatgcacccactgggcctatgtaataacaatgacgaagaggacttgtatgaatatggctgggtaggagtggtgaagctggaacagccagaattggacccgaaaccatgcctcactgtcctaggcaaggccaagcgagcagtacagcggggagctactgcagtcatctttgatgtgtctgaaaacccagaagctattgatcagctgaaccagggctctgaagacccgctcaagaggccggtggtgtatgtgaagggtgcagatgccattaagctgatgaacatcgtcaacaagcagaaagtggctcgagcaaggatccagcaccgccctcctcgacaacccactgaatactttgacatggggattttcctggctttcttcgtcgtggtctccttggtctgcctcatcctccttgtcaaaatcaagctgaagcagcgacgcagtcagaattccatgaacaggctggctgtgcaggctctagagaagatggaaaccagaaagttcaactccaagagcaaggggcgccgggaggggagctgtggggccctggacacactcagcagcagctccacgtccgactgtgccatctgtctggagaagtacattgatggagaggagctgcgggtcatcccctgtactcaccggtttcacaggaagtgcgtggacccctggctgctgcagcaccacacctgcccccactgtcggcacaacatcatagaacaaaagggaaacccaagcgcggtgtgtgtggagaccagcaacctctcacgtggtcggcagcagagggtgaccctgccggtgcattaccccggccgcgtgcacaggaccaacgccatcccagcctaccctacgaggacaagcatggactcccacggcaaccccgtcaccttgctgaccatggaccggcacggggagcagagcctctattccccgcagacccccgcctacatccgcagctacccacccctccacctggctgccctccggaggaggcgggtgctgtcagggccaacttccctagtgccctccaggacactcaggagtccagcaccactgccactgaggctgcaggaccgagatctcactcagcagacagcagcagcccgggagcctgagctcaggaggaactcttacctggaaattgggaactgtatggagactccaaactgacttctttcaaaaaacaaaaacaaaaaatttttttagctttgacaaacacacaaaagtggtaataaagagagccctccttgtcaacccaaaatgtgagccccctgtggcaaaaccaccccctaccccattaacaaatcaacagacaaaattctccgagtcctttgcctcttttgataacatgttgttctgttttgtaaagtgtgtgtgcttggggttccgaggtgtgggattgagttctctgctttgtttttttttaagatattgtatgtaaatgtaaaaagttatttaaatatatattttaaagaaccctaactgccaacttttgctgaaaaagaaaaaaaaatcactgctgcattaaatgaaccacatcatgtgtagatactgttgtctccctgaagggagctcaggcctttgaaaagctcagggcttcacctgccttagaaaatgaaccagaaacttgaagtaaagctagttgataggggtacaggctctgaggagcagtgcaaaactgcctctttctttctcgtggcaaatcccaatgtacacgatttcaggtctcagacgccatgcctctccagcccacgcctttaggcaggtgatggcagcagctaggaatagggtgtacatgatccacagccctgcggagccaggtcaagccgctgctatgaaagctccagggtgatggggacgattctgcccagtgtcctcagtctgtcccctcaggtcatggtcccaagtgaaatgacagagttcacagccctggtcttggctgaggtccaggtcatagtaagggcatgttcttggggccctcgacctgaactctgaccctccgggcagggaagaggaggttgtcccctttggttgtcctggctttggagtcctttgcaaaaatattttgggccccctgccactggctgcagaaatggctcgacggggtgtgtggggacagacacccagaaggaatgtacttttgtggccttggtgtccgatggggctgggggagagtgctctccactgacccagcagcacacccatgtgcagtgcgcctgcatctgtgtgggggcagccacaccccttggctgctgcttccttgggctgcctttctgggggcatgtgactggacctacgaggtctgcactgagctccatttgaatgatacctttcctatcccatttcccccacggaagcaccgcttcagggttattcagtcctctgcctcatggctgaaattgctcatctcgtctgcagatgtctactatcctgtctacctaatgcactattatgtattgattctccatgagacagagagagagagagactatcagatagtttacacccaaagggtaggtttttgtatatttttccagccttttttattaaggggaaggggagagtttaaaaacccaaaccgttgtggttttaaggtgtttcatttttaaaagggagagagaatctatttaaagctatttcagatcagggattgtcatccttttttgtccaatgtattccttgttctttaaaaaaattttttttagaggaaactaatattagtctttgtgttcactaactcttctggtcacttgtatttatttattcattcattcatcagatatttgttgccatctgaaagaactggcccagtgggtctgaaagctcgcttgagaataggaaacttgagacctggccccctgtgggtaggagaacaaggaccacctgggttctccagtcttgaacgagaatctcactcttatcagaatgtttttcttaacctcagcgtatgatgaggaaatttacttatctctagctaggatttgacaaattccaacatcaaatgatcaaaacatttgccactgaggcttcactggtgagatccgttctccgtcctcgggtgcagtcccttgggggctgctcctcggactgcgccccgcacacctgttatcgagggtgtgagaagcgcctaagctggtgacatgtgatctgggacgccttcatttctcgggccaggagtagcagctgctaaggacagcagcttgcattgcgtggttttagggaagcagggtctggcttttaatatgaactgcaaaaagcagcttctcactgatatttttttgttgttgtttctggggggtttttttgttttgtttttaatgcctttgagtgcatattttcttcctcgtctgaaaccgaactcccaaagtggctttctttagccctggctggaaaaccacctctcaatagccttaagcaataaatagatgagtagagaatgtggcttcaactgggcttattaaagtaagtgtgtctagttttcacttgaacaagtgatagctgcagatggcgaaagaaacccatttaatttttgtagcttacaggtggtagaaacaaaaatgcaattttaaaaccttaaataccaaataccaaccattgccttttttttttttgagatggaattttgctcttgtcacccaggctggagtgcaatggcgcgatctcacctcactgcaacctctgcctcccgggtccaagtgattctcctgcctcagcctcccaagtagctgggattacaggcatgcgccaccacacccagctaattttgtatttttggtagagacagggtatctccatgttggtcaggctggtcttggattcccgacctcaggtgatccgcccacctcggcctcccaaagtgctgggattacaggcgtgagccaccatgcctgcccagcaataccaaccattgtcttttaaattcgtgttggcttctcagacagggagatcactggaataaaataaccgatggtcttattttgtcacacgtaaatcaaaagaaatgtcctctttgaagttgtaagactccaccaatgacagacacccttttcggtggactctgagtggtgtgtagtggttttatagccatggaaactaggagtatctcactttccactgagaacccctgcccccaatccctctaagttggggtgtggcagttgggcagggtcaagtgacccagccctggctgtaggacagccatatacagtgaagagttctagaaccagctaaaaatggaagtttgggtgtttaccaacaaggtacctctttatggatgcagccccagtaagctggctttaactctcagctccttccctgtctcctcctaatccaagcccttttataaaataaagccccttctgtcccactgctcacatacttatgtgctgctagtctctactcgaagttcgtgcaggactaatgcttttaaaatgaggtctaaaaaataattactagtcgagactattattctttaaacagaactgcctttttctactctttatgtaaactctttctattgtgttggtctaacaaggcactattttaaaattttttaatttttcccatagcacttaaaagagattttgtaaagaccttgctgtaaagattttgtaataaaatggtctaagggctctttttccaacattaccatttttaaaaaatgttttaaaagctagaagacaacttatgtatattctgtatatgtatagcagcacatttcatttatggaaatatgttctcagaatatttatttactaatatatttatcttaagccatgtcttatgttgagagtgtgacattgttggaataatcattgaaaatgactaacacaagaccctgtaaatacatgataattgcacacagattttacatatttgcagaccaaaaatgatttaaaacaagttgtagtcttctatggttttgtaacaaattgtacacatgactgtaaaaaaaaaaatacaattttatcaagtatgtgttaaaaaaaatca

SEQ ID NO: 378270 - DNA, 6212 bp, Homo sapiens
gcggccgcggggcccggcgcggcgcgggccaaggagacggcgttcgtggaggtggtgctgttcgagtcgagcccaagcggcgattacaccacctacaccaccggcctcacgggccgcttctcgcgggccggggccacgctcagcgccgagggcgagatcgtgcagatgcacccactgggcctatgtaataacaatgacgaagaggacttgtatgaatatggctgggtaggagtggtgaagctggaacagccagaattggacccgaaaccatgcctcactgtcctaggcaaggccaagcgagcagtacagcggggagctactgcagtcatctttgatgtgtctgaaaacccagaagctattgatcagctgaaccagggctctgaagacccgctcaagaggccggtggtgtatgtgaagggtgcagatgccattaagctgatgaacatcgtcaacaagcagaaagtggctcgagcaaggatccagcaccgccctcctcgacaacccactgaatactttgacatggggattttcctggctttcttcgtcgtggtctccttggtctgcctcatcctccttgtcaaaatcaagctgaagcagcgacgcagtcagaattccatgaacaggctggctgtgcaggctctagagaagatggaaaccagaaagttcaactccaagagcaaggggcgccgggaggggagctgtggggccctggacacactcagcagcagctccacgtccgactgtgccatctgtctggagaagtacattgatggagaggagctgcgggtcatcccctgtactcaccggtttcacaggaagtgcgtggacccctggctgctgcagcaccacacctgcccccactgtcggcacaacatcatagaacaaaagggaaacccaagcgcggtgtgtgtggagaccagcaacctctcacgtggtcggcagcagagggtgaccctgccggtgcattaccccggccgcgtgcacaggaccaacgccatcccagcctaccctacgaggacaagcatggactcccacggcaaccccgtcaccttgctgaccatggaccggcacggggagcagagcctctattccccgcagacccccgcctacatccgcagctacccacccctccacctggaccacagcctggccgctcaccgctgcggcctggagcaccgggcctactccccagcccaccccttccgcaggcccaagttgagtggccgcagcttctccaaggcagcttgcttctcccagtatgagaccatgtaccagcactactacttccagggcctcagctacccggagcaggaggggcagtccccacctagcctcgcaccccggggcccggcccgtgcctttcctccgagcggcagtggcagcctgctcttccccaccgtggtgcacgtggccccgccctcccacctggagagcggcagcacgtccagcttcagctgctatcacggccaccgctcggtgtgcagtggctacctggccgactgcccaggcagcgacagcagcagcagcagcagctccggccagtgccactgttcctccagtgactctgtggtagactgcactgaggtcagcaaccagggcgtgtacgggagctgctccaccttccgcagctccctcagcagcgactatgaccccttcatctaccgcagccggagcccctgtcgtgccagtgaggcggggggctcgggcagctcgggccggggacctgccctgtgcttcgagggctccccgcctcccgaggagctcccggcggtgcacagtcatggtgctgggcggggcgagccttggccgggccctgcctctccctcgggggatcaggtgtccacctgcagcctggagatgaactacagcagcaactcctccctggagcacagggggcccaatagctctacctcagaagtggggctcgaggcttctcctggggccgcccctgacctcaggaggacctggaaggggggccacgagttgccgtcgtgtgcctgctgctgcgagccccagccctccccagccgggcctagcgccggagcagctggcagcagcaccttgttcctggggccccacctctacgagggctctggcccggcgggtggggagccccagtcaggaagctcccagggcttgtacggccttcaccccgaccatttgcccaggacagatggggtgaaatacgagggtctgccctgctgcttctatgaagagaagcaggtggcccgcgggggcggagggggcagcggctgctacactgaggactactcggtgagtgtgcagtacacgctcaccgaggaacccccgcccggctgctaccccggggcccgggacctgagccagcgcatccccatcattccagaggatgtggactgtgatctgggcctgccctcggactgccaagggacccacagcctcggctcctggggtgggacgcgaggcccggataccccacggccccacaggggcctgggagcaacccgggaagaggagcgggctctgtgctgccaggctagggccctactgcggcctggctgccctccggaggaggcgggtgctgtcagggccaacttccctagtgccctccaggacactcaggagtccagcaccactgccactgaggctgcaggaccgagatctcactcagcagacagcagcagcccgggagcctgagctcaggaggaactcttacctggaaattgggaactgtatggagactccaaactgacttctttcaaaaaacaaaaacaaaaaatttttttagctttgacaaacacacaaaagtggtaataaagagagccctccttgtcaacccaaaatgtgagccccctgtggcaaaaccaccccctaccccattaacaaatcaacagacaaaattctccgagtcctttgcctcttttgataacatgttgttctgttttgtaaagtgtgtgtgcttggggttccgaggtgtgggattgagttctctgctttgtttttttttaagatattgtatgtaaatgtaaaaagttatttaaatatatattttaaagaaccctaactgccaacttttgctgaaaaagaaaaaaaaatcactgctgcattaaatgaaccacatcatgtgtagatactgttgtctccctgaagggagctcaggcctttgaaaagctcagggcttcacctgccttagaaaatgaaccagaaacttgaagtaaagctagttgataggggtacaggctctgaggagcagtgcaaaactgcctctttctttctcgtggcaaatcccaatgtacacgatttcaggtctcagacgccatgcctctccagcccacgcctttaggcaggtgatggcagcagctaggaatagggtgtacatgatccacagccctgcggagccaggtcaagccgctgctatgaaagctccagggtgatggggacgattctgcccagtgtcctcagtctgtcccctcaggtcatggtcccaagtgaaatgacagagttcacagccctggtcttggctgaggtccaggtcatagtaagggcatgttcttggggccctcgacctgaactctgaccctccgggcagggaagaggaggttgtcccctttggttgtcctggctttggagtcctttgcaaaaatattttgggccccctgccactggctgcagaaatggctcgacggggtgtgtggggacagacacccagaaggaatgtacttttgtggccttggtgtccgatggggctgggggagagtgctctccactgacccagcagcacacccatgtgcagtgcgcctgcatctgtgtgggggcagccacaccccttggctgctgcttccttgggctgcctttctgggggcatgtgactggacctacgaggtctgcactgagctccatttgaatgatacctttcctatcccatttcccccacggaagcaccgcttcagggttattcagtcctctgcctcatggctgaaattgctcatctcgtctgcagatgtctactatcctgtctacctaatgcactattatgtattgattctccatgagacagagagagagagagactatcagatagtttacacccaaagggtaggtttttgtatatttttccagccttttttattaaggggaaggggagagtttaaaaacccaaaccgttgtggttttaaggtgtttcatttttaaaagggagagagaatctatttaaagctatttcagatcagggattgtcatccttttttgtccaatgtattccttgttctttaaaaaaattttttttagaggaaactaatattagtctttgtgttcactaactcttctggtcacttgtatttatttattcattcattcatcagatatttgttgccatctgaaagaactggcccagtgggtctgaaagctcgcttgagaataggaaacttgagacctggccccctgtgggtaggagaacaaggaccacctgggttctccagtcttgaacgagaatctcactcttatcagaatgtttttcttaacctcagcgtatgatgaggaaatttacttatctctagctaggatttgacaaattccaacatcaaatgatcaaaacatttgccactgaggcttcactggtgagatccgttctccgtcctcgggtgcagtcccttgggggctgctcctcggactgcgccccgcacacctgttatcgagggtgtgagaagcgcctaagctggtgacatgtgatctgggacgccttcatttctcgggccaggagtagcagctgctaaggacagcagcttgcattgcgtggttttagggaagcagggtctggcttttaatatgaactgcaaaaagcagcttctcactgatatttttttgttgttgtttctggggggtttttttgttttgtttttaatgcctttgagtgcatattttcttcctcgtctgaaaccgaactcccaaagtggctttctttagccctggctggaaaaccacctctcaatagccttaagcaataaatagatgagtagagaatgtggcttcaactgggcttattaaagtaagtgtgtctagttttcacttgaacaagtgatagctgcagatggcgaaagaaacccatttaatttttgtagcttacaggtggtagaaacaaaaatgcaattttaaaaccttaaataccaaataccaaccattgccttttttttttttgagatggaattttgctcttgtcacccaggctggagtgcaatggcgcgatctcacctcactgcaacctctgcctcccgggtccaagtgattctcctgcctcagcctcccaagtagctgggattacaggcatgcgccaccacacccagctaattttgtatttttggtagagacagggtatctccatgttggtcaggctggtcttggattcccgacctcaggtgatccgcccacctcggcctcccaaagtgctgggattacaggcgtgagccaccatgcctgcccagcaataccaaccattgtcttttaaattcgtgttggcttctcagacagggagatcactggaataaaataaccgatggtcttattttgtcacacgtaaatcaaaagaaatgtcctctttgaagttgtaagactccaccaatgacagacacccttttcggtggactctgagtggtgtgtagtggttttatagccatggaaactaggagtatctcactttccactgagaacccctgcccccaatccctctaagttggggtgtggcagttgggcagggtcaagtgacccagccctggctgtaggacagccatatacagtgaagagttctagaaccagctaaaaatggaagtttgggtgtttaccaacaaggtacctctttatggatgcagccccagtaagctggctttaactctcagctccttccctgtctcctcctaatccaagcccttttataaaataaagccccttctgtcccactgctcacatttcatttatggaaatatgttctcagaatatttatttactaatatatttatcttaagccatgtcttatgttgagagtgtgacattgttggaataatcattgaaaatgactaacacaagaccctgtaaatacatgataattgcacacagattttacatatttgcagaccaaaaatgatttaaaacaagttgtagtcttctatggttttgtaacaaattgtacacatgactgtaaaaaaaaaaatacaattttatcaagtatgtgttaaaaaaaatca

SEQ ID NO: 378271 - DNA, 4195 bp, Homo sapiens
gcggccgcggggcccggcgcggcgcgggccaaggagacggcgttcgtggaggtggtgctgttcgagtcgagcccaagcggcgattacaccacctacaccaccggcctcacgggccgcttctcgcgggccggggccacgctcagcgccgagggcgagatcgtgcagatgcacccactgggcctatgtaataacaatgacgaagaggacttgtatgaatatggctgggtaggagtggtgaagctggaacagccagaattggacccgaaaccatgcctcactgtcctaggcaaggccaagcgagcagtacagcggggagctactgcagtcatctttgatgtgtctgaaaacccagaagctattgatcagctgaaccagggctctgaagacccgctcaagaggccggtggtgtatgtgaagggtgcagatgccattaagctgatgaacatcgtcaacaagcagaaagtggctcgagcaaggatccagcaccgccctcctcgacaacccactgaatactttgacatggggattttcctggctttcttcgtcgtggtctccttggtctgcctcatcctccttgtcaaaatcaagctgaagcagcgacgcagtcagaattccatgaacaggctggctgtgcaggctctagagaagatggaaaccagaaagttcaactccaagagcaaggggcgccgggaggggagctgtggggccctggacacactcagcagcagctccacgtccgactgtgccatctgtctggagaagtacattgatggagaggagctgcgggtcatcccctgtactcaccggtttcacaggaagtgcgtggacccctggctgctgcagcaccacacctgcccccactgtcggcacaacatcatagaacaaaagggaaacccaagcgcggtgtgtgtggagaccagcaacctctcacgtggtcggcagcagagggtgaccctgccggtgcattaccccggccgcgtgcacaggaccaacgccatcccagcctaccctacgaggacaagcatggactcccacggcaaccccgtcaccttgctgaccatggaccggcacggggagcagagcctctattccccgcagacccccgcctacatccgcagctacccacccctccacctggaccacagcctggccgctcaccgctgcggcctggagcaccgggcctactccccagcccaccccttccgcaggcccaagttgagtggccgcagcttctccaaggcagcttgcttctcccagtatgagaccatgtaccagcactactacttccagggcctcagctacccggagcaggaggggcagtccccacctagcctcgcaccccggggcccggcccgtgcctttcctccgagcggcagtggcagcctgctcttccccaccgtggtgcacgtggccccgccctcccacctggagagcggcagcacgtccagcttcagctgctatcacggccaccgctcggtgtgcagtggctacctggccgactgcccaggcagcgacagcagcagcagcagcagctccggccagtgccactgttcctccagtgactctgtggtagactgcactgaggtcagcaaccagggcgtgtacgggagctgctccaccttccgcagctccctcagcagcgactatgaccccttcatctaccgcagccggagcccctgtcgtgccagtgaggcggggggctcgggcagctcgggccggggacctgccctgtgcttcgagggctccccgcctcccgaggagctcccggcggtgcacagtcatggtgctgggcggggcgagccttggccgggccctgcctctccctcgggggatcaggtgtccacctgcagcctggagatgaactacagcagcaactcctccctggagcacagggggcccaatagctctacctcagaagtggggctcgaggcttctcctggggccgcccctgacctcaggaggacctggaaggggggccacgagttgccgtcgtgtgcctgctgctgcgagccccagccctccccagccgggcctagcgccggagcagctggcagcagcaccttgttcctggggccccacctctacgagggctctggcccggcgggtggggagccccagtcaggaagctcccagggcttgtacggccttcaccccgaccatttgcccaggacagatggggtgaaatacgagggtctgccctgctgcttctatgaagagaagcaggtggcccgcgggggcggagggggcagcggctgctacactgaggactactcggtgagtgtgcagtacacgctcaccgaggaacccccgcccggctgctaccccggggcccgggacctgagccagcgcatccccatcattccagaggatgtggactgtgatctgggcctgccctcggactgccaagggacccacagcctcggctcctggggtgggacgcgaggcccggataccccacggccccacaggggcctgggagcaacccgggaagaggagcgggctctgtgctgccaggctagggccctactgcggcctggctgccctccggaggaggcgggtgctgtcagggccaacttccctagtgccctccaggacactcaggagtccagcaccactgccactgaggctgcaggaccgagatctcactcagcagacagcagcagcccgggagcctgagctcaggaggaactcttacctggaaattgggaactgtatggagactccaaactgacttctttcaaaaaacaaaaacaaaaaatttttttagctttgacaaacacacaaaagtggtaataaagagagccctccttgtcaacccaaaatgtgagccccctgtggcaaaaccaccccctaccccattaacaaatcaacagacaaaattctccgagtcctttgcctcttttgataacatgttgttctgttttgtaaagtgtgtgtgcttggggttccgaggtgtgggattgagttctctgctttgtttttttttaagatattgtatgtaaatgtaaaaagttatttaaatatatattttaaagaaccctaactgccaacttttgctgaaaaagaaaaaaaaatcactgctgcattaaatgaaccacatcatgtgtagatactgttgtctccctgaagggagctcaggcctttgaaaagctcagggcttcacctgccttagaaaatgaaccagaaacttgaagtaaagctagttgataggggtacaggctctgaggagcagtgcaaaactgcctctttctttctcgtggcaaatcccaatgtacacgatttcaggtctcagacgccatgcctctccagcccacgcctttaggcaggtgatggcagcagctaggaatagggtgtacatgatccacagccctgcggagccaggtcaagccgctgctatgaaagctccagggtgatggggacgattctgcccagtgtcctcagtctgtcccctcaggtcatggtcccaagtgaaatgacagagttcacagccctggtcttggctgaggtccaggtcatagtaagggcatgttcttggggccctcgacctgaactctgaccctccgggcagggaagaggaggttgtcccctttggttgtcctggctttggagtcctttgcaaaaatattttgggccccctgccactggctgcagaaatggctcgacggggtgtgtggggacagacacccagaaggaatgtacttttgtggccttggtgtccgatggggctgggggagagtgctctccactgacccagcagcacacccatgtgcagtgcgcctgcatctgtgtgggggcagccacaccccttggctgctgcttccttgggctgcctttctgggggcatgtgactggacctacgaggtctgcactgagctccatttgaatgatacctttcctatcccatttcccccacggaagcaccgcttcagggttattcagtcctctgcctcatggctgaaattgctcatctcgtctgcagatgtctactatcctgtctacctaatgcactattatgtattgaaaatgactaacacaagaccctgtaaatacatgataattgcacacagattttacatatttgcagaccaaaaatgatttaaaacaagttgtagtcttctatggttttgtaacaaattgtacacatgactgtaaaaaaaaaaatacaattttatcaagtatgtgttaaaaaaaatca

SEQ ID NO: 378272 - DNA, 475 bp, Homo sapiens
caagcactgcgaaaggacgctaaggaaagtgactaaaagcagagggtgctgggcatcagagcaaaacggcgctagcattgaacagctcctaggagggtcatgtcacagctgagagtgcgctggctggcattccctccagaaggctgggagaaactcagcagcagtggttggccattagtgcccaaaggaaagcctcctgaaaactcttctgtgacagcacacaaggatccctataagacaattccaatttggctggcttggtgcatttacttccaagctagatgtgtctctgcagcctttccttgcccatttggaaatctcgcccttgtggagctgctgagaaaatggctttctctaaaatccctgttccagaagatcaggcaggtgaatgaaaatcactatctgaataagacacaggatgaataaaaacaagagagatatacaaaaagggagatattccactcaaacccccaac

SEQ ID NO: 378273 - DNA, 1958 bp, Homo sapiens
cagaaaatatctacaaatcacatatctaattaacatccagaatatataaagaactccaacaattcaacaatagcaacaaaacaatctaattcgaaaatgggccaaagacttcaacggacatttttccaaagatataaaaatggtcaacatgaaaagatactcaacatcactagctattagagaaatgcaaatcaaaacaataagacaccgctccacgcccattaggatagctattatttgaaaaaggaaagtaactgttggcaaggatgtggagaaattggaacctttgtccactgtcagtgggactggagaacagtaaagtcactgtggaaaacagtttggcaatttctcaaaaatttaagcacagaattactatatgatccagcagtttcacttcttagtaaatatccgaaagaactgaaagcagggactcccatatctacatgtacgccaattttcatagcagcattgtttacagtagccaaaggtagaaacatcccaagtgcccattaacagatgaatgaacaaaatgtggtatatatgcacaatggaatattactcagtctcgaaaaggaatggaattctgatgcacaagccttgaaaatatactaaatacaccaaactcaaaaggacatattttatgatttcacttacttgagccccagaataggcaaattcatagatcaccaggggctgggggatccaggggaatagaaagttagtgtctaatgggtacagggtttctgtttggatgaaaaagtactggaaatggacagcggggatggttgcacaatgttgtggatgtccttaatgccaccgaattgtacacttaaaaacagttaaaatgaaaatgttccctcttcactattttggaagactatgagaaggattagtgttaattcttccttaatgtttagtagaattctccagtgaagtcatctggtcctgagctttccttagttcgaagttttttttgttttgttttgttttttggttttttttttgagatggagtctcgctctgttgcccagactggagttcactggcacaatctcagctcactgcaacctctgcctcccaggttcaagcaattctcctgcctcagcctccggagtagctgggattacacacacctaccaccatgcttggctaatttttttgtatttttagtagagacggcgtttcgccatgttggccaagctggtctcaaactcctgacctcaggtgatcaacccacctcggcctcccaaagtgctgggattacaggcataagccaccgcactcagcctgttgggaggtttttgattactgactcaatcttcttatttgttactgatctgctcaagttttctatttcttcatgattcagtcttggtagtttgcacgtttttagaaatttacccatttcttctaggttatccaattttttggcatacaactgctcataatagtctcacgatactttttattttcatggtatcaattgtaatgtctcctctttcatatctgattttgtgtcttctgtttttcttagtctagccaagggtttgtcaattttgcttatcttttcaaaaacccaactctttctttgatttttttctattgtttttttctattctgttttcatttattctgttgcaaattattttcctccttctgctcactttgggattagcttattctttttctagtttgaggtgtacaattaggctgtttgagatctttcttatttttttaatgtaggcatttactgctataaacttccctctcagtggtgcttttgctgcatcccaagggttttggtatgttgtgttttcattcgttcaaaacatcatctaatttcccatttgatttcttctttggctcaatggttaagactgctgtttaccaagggtgtgtttaatttccacccatgaagccagcattaccctaataacaaaataggattaagacactac

SEQ ID NO: 378274 - DNA, 434 bp, Homo sapiens
tttatctctcccctgaactactagggtgagagtaggaactttttctaattcacttctgtgtctccagctccctaagatcattgcctggcaaatagtaactgtgcaataaatatttgttgcatgagagtgaaagtgaggcaagcacattgcttttgtctggagtagtgtgttactagggtagctttgggggatgatggagattatgaaggggctacatccttcccacccctaaccccttcctggtgcctccatttactggaatatgctacacttgaaccataggataaggccagggtatagctgaggaaggctgccttatttggcagtcttgtagggaatttgtttgcttggatcccattccggtggagtcacccaaaggtcttgttccatctgaaaaactacacttgagaccaaccttggtcttgggttggcaa

SEQ ID NO: 378275 - DNA, 552 bp, Homo sapiens
agttgtctgggggaagagcattagggacaaaggggatggcaagtgcacagactctgaggcaaaagggaggctagcgtgttccaggaaaatcagggaggccagagtcatgggggtcggtgggggagtaggcaagaaagaggatggtaggagaggaagtcaagaggtaatgggaggccaggtcctgtgggaccttgtaggccactgtagcactttgatgtggctgagatgggaaactaccagaggattttgaatatagaggagtaatatgattggactcatattttaaaaggatcactgatggctgtgttaagagtagacatgagagaatggggggcaaggtggcagacaggggaccagttaaaagactctagtgataatccaggcaagcgatggcagtggcttaaactagggtggttttggaagagagaactggttggattctggatttatgttgaaggttgagctgacacaggatttgctgatgggttgtatgtggtatatcaaaagagagtagtcaagaatgaccattaagattttggcctgagcagttgg

SEQ ID NO: 378276 - DNA, 362 bp, Homo sapiens
aagtagcacggattgctcatccgatccgtgccgccgcagggagtgtgtcaagttacagaggcgccggaatcggcccctgcgctcctcgccagccgccacgacccacctctgcccatggggccctccgtgtgcgccccttcgcccggggactgaaactgactggcccgggagacacgaggcgcccagaaggactgacagcgcggcaccaactgctctgcagacacttgaagggaaagactgggcggagagaaggagagccggtcagattcccctaactttcctggacttggaacgttcttcgaaataacttttttctcacctaggtgtaccccaattaccgctggttgtgctttttcggcact

SEQ ID NO: 378277 - DNA, 948 bp, Homo sapiens
atgcagccagaatctggggccaatggaacagtcattgctgagttcatcctgctgggcttgctggaggcgccagggctgcagccagttgtctttgtgctcttcctctttgcctacctggtcacggtcaggggcaacctcagcatcctggcagctgtcttggtggagcccaaactccacacccccatgtacttcttcctggggaacctatcagtgctggatgttgggtgcatcagcgtcactgttccatcaatgttgagtcgtctcctgtcccgcaagcgtgcagttccctgtggggcctgccttacccagctcttcttcttccatctgttcgttggagtggactgcttcctgctgaccgccatggcctatgaccaattcctggccatctgccggcccctcacctacagcacccgcatgagtcagacagtccagaggatgttggtggctgcgtcctgggcttgtgctttcaccaacgcactgacccacactgtggccatgtccacgctcaacttctgtggccccaatgtgatcaatcacttctactgtgacctcccacagctcttccagctctcctgctccagcacccaactcaatgagctgctgctttttgctgtgggttttataatggcaggtacccccatggctctcattgtcatctcctatatccacgtggcagctgcagtcctgcgaattcgctctgtagagggcaggaagaaagccttctccacatgtggctcccacctcactgtggttgccatattctatggttcaggtatctttaactatatgcgactgggttcaaccaagctttcagacaaggataaagctgttggaattttcaacactgtcatcaatcccatgctgaacccaatcatctacagcttcagaaaccctgatgtgcagagtgccatctggaggatgctcacagggaggcggtcactggcttga

SEQ ID NO: 378278 - DNA, 470 bp, Homo sapiens
ggcaaagatccaagacaaggaaggcatccctcttgaccagaagaggttgatctttgctgggacacagctggaagatagatgcaccctgtctgactacaatatccagaaagagtccactctgcagttggtcctgcacttgaggggaggtgtctgagtttttcctttcttttaagctttcaagaagtctcattgcactcagtgcctgatgcattgtcagcaagaagtaaccataaaagactcccctatattaattccattattcatataagatggttgagtgagctaattttttttgctttgaatcttgtaaactgtagataagaatgaaacaatgtgtgtgcttggcctcacccatctttccactggacagtcaaatgacgtgtgactgtgttggctctgcaagctcccatacccctagctggaccagagaatcaggcagaagtcatttggagtctaaggattgctgcttt

SEQ ID NO: 378279 - DNA, 1622 bp, Homo sapiens
agcagggggcgggctctctgacgaaggactggaaggtggcggtggtgaaggtgcaggccgttggggcggctcagaggcaggtgactatgaaaggcttatatttccaacagagttccacagatgaagaaataacatttgtatttcaagaaaaggaagatcttcctgttacagaggataactttgtgaaacttcaagttaaagcttgtgctctgagccagataaatacaaagcttctggcagaaatgaagatgaaaaaggatttatttcctgttgggagagaaattgctggaattgtattagatgttggaagcaaggtatcattctttcaaccagatgatgaagtagttggaattttgcccctggactctgaagaccctggactttgtgaagttgttagagtacatgagcattacttggttcataaaccagaaaaggtcacatggacggaagcagcaggaagcattcgggatggagtgcgtgcctatacagctctgcattatctttctcatctctctcctggaaaatcagtgctgataatggatggagcaagtgcatttggtacaatagctattcagttagcacatcatagaggagccaaagtgatttcaacagcatgcagccttgaagataagcagtgccttgaaagattcagacctcccatagcccgagtgattgatgtatctaatgggaaagttcatgttgctgaaagctgtttggaagaaacaggtggcctgggagtagatattgtcctagatgctggagtgagattatatagtaaagatgatgaaccagctgtaaaactacaactactaccacataaacatgatatcatcacacttcttggtgttggaggccactgggtaacaacagaagaaaaccttcagttggatcctccagatagccactgccttttcctcaagggagcaacgttagctttcctgaatgatgaagtttggaatttgtcaaatgtacaacagggaaaatatctttgtatcttaaaggatgtgatggagaagttatcaactggtgttttcagacctcagttggatgaacccattccactgtatgaggcaaaagtttccatggaagctgttcagaaaaatcaaggaagaaaaaagcaagttgttcaattttaattttcttctttctcagacctcagtcggatgaacatattccagtatttgaagccagaattttctttggaaattgttgagaaaaaccaaggaagataaaacaagttgcatttttaagcacgtttctctgctaagacaagatgctcagttgacacatttgaaaagtgtttgaaaaattcttgtgcaaatgatcaagataattctataattaacatcttaagggaatttttctaaaaaccttttcattgtttctatatattttgcccctgctataaaattccttccatgaagaaaactgctgctttcagcaaaagtcacactactcttgataaaagctgttgcaggcctttgctaagctatcaaagtaacgtattaattttgtatcaactccgttctcaacaccttccttaagtctttgctgtcataatttaagcatttgagtatattttgaagtcttaaaagacttagcccataggcacttaaaaaatg

SEQ ID NO: 378280 - DNA, 1387 bp, Homo sapiens
ttcttttgagacagggtattgctctgttgccctggctggagtgcagtgctcattccagctcactgtaacctcaaacccatgtgctcaagggatcctcctgcctcagcctccccagtagctggggcaacaggcacatgccaccatgcctggctaatttttaatttttttgtagagagccttgtttcccaagctgctgcactattttctataagggacttgagtatctggagattttggtcttcatgggggtcctggaaccaatccctcatggatgcgtgagggatgactgtatatcatacacacataaagtttactggcttctgcaaacaaattttgagcccattaaccaaccagcctggtcaacgaatgtacatctaaagtaagatatatacgtgctaaaattgtttttaactaaaaatgccatatgtagtgtagaaatgaaaactagacactatttcattcgcatccattgagataatagtggtgagcacttaggataagcaccaggcttgacttgctgctcttgtcacttgtccttggaaatttaggctctattacaccaccaactctcaaatcatttccctgttgtagagctaaacttgacgtcctacagaatttctctaacttaacatgttgagtctctgagagtgcaaaacttgaaacaagagaaagtggcctgcctggcatcctctgcttattgaatggttttatttaattctcctttacattgccaccttaacaatccttccagctacgtatcttaaaggatgtgatggagaagttatcaactggtgttttcagacctcagttggatgaacccattccactgtatgaggcaaaagtttccatggaagctgttcagaaaaatcaaggaagaaaaaagcaagttgttcaattttaattttcttctttctcagacctcagtcggatgaacatattccagtatttgaagccagaattttctttggaaattgttgagaaaaaccaaggaagataaaacaagttgcatttttaagcacgtttctctgctaagacaagatgctcagttgacacatttgaaaagtgtttgaaaaattcttgtgcaaatgatcaagataattctataattaacatcttaagggaatttttctaaaaaccttttcattgtttctatatattttgcccctgctataaaattccttccatgaagaaaactgctgctttcagcaaaagtcacactactcttgataaaagctgttgcaggcctttgctaagctatcaaagtaacgtattaattttgtatcaactccgttctcaacaccttccttaagtctttgctgtcataatttaagcatttgagtatattttgaagtcttaaaagacttagcccataggcacttaaaaaatg

SEQ ID NO: 378281 - DNA, 614 bp, Homo sapiens
tggttttttaaacacccctacagatgggaaaataaaccgccattttcccctggatatgaagggcaaaagtttccatggaagctgttcagaaaaatcaaggaagaaaaaagcaagttgttcaattttaattttcttctttctcagacctcagtcggatgaacatattccagtatttgaagccagaattttctttggaaattgttgagaaaaaccaaggaagataaaacaagttgcatttttaagcacgtttctctgctaagacaagatgctcagttgacacatttgaaaagtgtttgaaaaattcttgtgcaaatgatcaagataattctataattaacatcttaagggaatttttctaaaaaccttttcattgtttctatatattttgcccctgctataaaattccttccatgaagaaaactgctgctttcagcaaaagtcacactactcttgataaaagctgttgcaggcctttgctaagctatcaaagtaacgtattaattttgtatcaactccgttctcaacaccttccttaagtctttgctgtcataatttaagcatttgagtatattttgaagtcttaaaagacttagcccataggcacttaaaaaatg

SEQ ID NO: 378282 - DNA, 609 bp, Homo sapiens
agcagggggcgggctctctgacgaaggactggaaggtggcggtggtgaaggtgcaggccgttggggcggctcagaggcaggtgactatgaaaggcttatatttccaacagagttccacagatgaagaaataacatttgtatttcaagaaaaggaagatcttcctgttacagaggataactttgtgaaacttcaagttaaagcttgtgctctgagccagataaatacaaagcttctggcagaaatgaagatgaaaaaggatttatttcctgttgggagagaaattgctggaattgtattagatgttggaagcaaggtatcattctttcaaccagatgatgaagtagttggaattttgcccctggactctgaagaccctggactttgtgaagttgttagagtacatgagcattacttggttcataaaccagaaaaggtcacatggacggaagcagcaggaagcattcgggatggagtgcgtgcctatacagctctgcattatctttctcatctctctcctggaaaatcagtgctgataatggatggagcaagtgcatttggtcaataattttttagttatcccattttgaagagcccaagtggttttaacg

SEQ ID NO: 378283 - DNA, 1037 bp, Homo sapiens
agcagggggcgggctctctgacgaaggactggaaggtggcggtggtgaaggtgcaggccgttggggcggctcagaggcaggtgactatgaaaggcttatatttccaacagagttccacagatgaagaaataacatttgtatttcaagaaaaggaagatcttcctgttacagaggataactttgtgaaacttcaagttaaagcttgtgctctgagccagataaatacaaagcttctggcagaaatgaagatgaaaaaggatttatttcctgttgggagagaaattgctggaattgtattagatgttggaagcaaggtatcattctttcaaccagatgatgaagtagttggaattttgcccctggactctgaagaccctggactttgtgaagttgttagagtacatgagcattacttggttcataaaccagaaaaggtcacatggacggaagcagcaggaagcattcgggatggagtgcgtgcctatacagctctgcattatctttctcatctctctcctggattagcacatcatagaggagccaaagtgatttcaacagcatgcagccttgaagataagcagtgccttgaaagattcagacctcccatagcccgagtgattgatgtatctaatgggaaagttcatgttgctgaaagctgtttggaagaaacaggtggcctgggagtagatattgtcctagatgctggaggtaggtaccttatgaaattagtagcctgtgtagtttttttagtttgatgaatttaagaaaaaaaatttaaccagggcataattattaatgcacttattaaaccagatgttcagttttaggttttgtttttaactgaagactttttaatttaaattggaacttccactttattctcattgtaagcgctgtatgtaagagagaacatgcttatcttttacagcgtagactaggggtgtccaatcttttggcttccctggccacattggaagaagaattgtcttaggccacacataaaatacagtaacactaatgatatcttatgagccaaa

SEQ ID NO: 378284 - DNA, 889 bp, Homo sapiens
aatttagctttttttttccattccatattttatatcagaaagaaatgtagctttttttttcactttagcaacatgttggccaaaatgttgaaatactgcctagtagagacatcctttcaatgacgatgaagtgtaattttatttagtgatttagacatgtgacttacgaatttattttattttatttttttatttttttattttttggaacaaagtttcgctcttgttgcccaggctggagcacaatggcatgatctcggctcactgcaacctctgcctcccaggttcaagcgattctcctgcctcagcctcctgagtagctgggattacaggcgcccgccaccacgcccagttaatttttgtatatttagtagagacagggtttcaccatgttgaccagggtggtcttgaacttctgacctcaggtgatccacctgcctcggcctcccaaagtgctgggattacaggtgtgagccaccacgctggcatgaatttttaatagtatttcagatagcattttttctcggtgacattgttgacatatacttagcaaaatatttctatataaaattatcacaatttcctaattattcaaattggaattactatatatgtttatgtatctctcaaggttatatttttcagcattctagttacatatttacatgatggctgatatgcaaataccgtaattctcacctaccaatcttcactgattttccaacaccctcatgaagatggccagaaaagacacacacacacccctaccacttcaccaccaggattctagattggccttgcatctgccatgtacttatcacctcgctgtttcatcattttggaccatgaaatagaaaatattatcgtttacgttattaaagtttatgtg

SEQ ID NO: 378285 - DNA, 475 bp, Homo sapiens
ggcggacacagtggcctgtgcctgtagtcccaactactcatgaggctgaggctggaggattgctggagtccaggccagcctgggcaacatagtaagaccttgtctctaaataaataagaacttgtttgaagaataaatttttgtcagattattataaaatatatttcttctctctctctttttttaaaactattcccttgcaagtgagattatatagtaaagatgatgaaccagctgtaaaactacaactactaccacataaacatgatatcatcacacttcttggtgttggaggccactgggtaacaacagaagaaaaccttcaggtactatcagaagtataaagcgttgagattacaccaaaggggtgtaattaacaaacaataatgcctaagttatttgaggcaaggtatgactaaattagtataaaatctgggccaggcatggtggctcacacctatgagtccagcactat

SEQ ID NO: 378286 - DNA, 1643 bp, Homo sapiens
agcagggggcgggctctctgacgaaggactggaaggtggcggtggtgaaggtgcaggccgttggggcggctcagaggcaggtgactatgaaaggcttatatttccaacagagttccacagatgaagaaataacatttgtatttcaagaaaaggaagatcttcctgttacagaggataactttgtgaaacttcaagttaaagcttgtgctctgagccagataaatacaaagcttctggcagaaatgaagatgaaaaaggatttatttcctgttgggagagaaattgctggaattgtattagatgttggaagcaaggtatcattctttcaaccagatgatgaagtagttggaattttgcccctggactctgaagaccctggactttgtgaagttgttagagtacatgagcattacttggttcataaaccagaaaaggtcacatggacggaagcagcaggaagcattcgggatggagtgcgtgcctatacagctctgcattatctttctcatctctctcctggaaaatcagtgctgataatggatggagcaagtgcatttggtacaatagctattcagttagcacatcatagaggagccaaagtgatttcaacagcatgcagccttgaagataagcagtgccttgaaagattcagacctcccatagcccgagtgattgatgtatctaatgggaaagttcatgttgctgaaagctgtttggaagaaacaggtggcctgggagtagatattgtcctagatgctggagtgagattatatagtaaagatgatgaaccagctgtaaaactacaactactaccacataaacatgatatcatcacacttcttggtgttggaggccactgggtaacaacagaagaaaaccttcagttggatcctccagatagccactgccttttcctcaagggagcaacgttagctttcctgaatgatgaagtttggaatttgtcaaatgtacaacagggaaaatatctttcttaacaatccttccagctacgtatcttaaaggatgtgatggagaagttatcaactggtgttttcagacctcagttggatgaacccattccactgtatgaggcaaaagtttccatggaagctgttcagaaaaatcaaggaagaaaaaagcaagttgttcaattttaattttcttctttctcagacctcagtcggatgaacatattccagtatttgaagccagaattttctttggaaattgttgagaaaaaccaaggaagataaaacaagttgcatttttaagcacgtttctctgctaagacaagatgctcagttgacacatttgaaaagtgtttgaaaaattcttgtgcaaatgatcaagataattctataattaacatcttaagggaatttttctaaaaaccttttcattgtttctatatattttgcccctgctataaaattccttccatgaagaaaactgctgctttcagcaaaagtcacactactcttgataaaagctgttgcaggcctttgctaagctatcaaagtaacgtattaattttgtatcaactccgttctcaacaccttccttaagtctttgctgtcataatttaagcatttgagtatattttgaagtcttaaaagacttagcccataggcacttaaaaaatg

SEQ ID NO: 378287 - DNA, 1954 bp, Homo sapiens
agcagggggcgggctctctgacgaaggactggaaggtggcggtggtgaaggtgcaggccgttggggcggctcagaggcaggtgactatgaaaggcttatatttccaacagagttccacagatgaagaaataacatttgtatttcaagaaaaggaagatcttcctgttacagaggataactttgtgaaacttcaagttaaagcttgtgctctgagccagataaatacaaagcttctggcagaaatgaagatgaaaaaggatttatttcctgttgggagagaaattgctggaattgtattagatgttggaagcaaggtatcattctttcaaccagatgatgaagtagttggaattttgcccctggactctgaagaccctggactttgtgaagttgttagagtacatgagcattacttggttcataaaccagaaaaggtcacatggacggaagcagcaggaagcattcgggatggagtgcgtgcctatacagctctgcattatctttctcatctctctcctggaaaatcagtgctgataatggatggagcaagtgcatttggtacaatagctattcagttagcacatcatagaggagccaaagtgatttcaacagcatgcagccttgaagataagcagtgccttgaaagattcagacctcccatagcccgagtgattgatgtatctaatgggaaagttcatgttgctgaaagctgtttggaagaaacaggtggcctgggagtagatattgtcctagatgctggagtgagattatatagtaaagatgatgaaccagctgtaaaactacaactactaccacataaacatgatatcatcacacttcttggtgttggaggccactgggtaacaacagaagaaaaccttcagttggatcctccagatagccactgccttttcctcaagggagcaacgttagctttcctgaatgatgaagtttggaatttgtcaaatgtacaacagggaaaatatctttagtattccaagtgccttgcaagtattcatttaaacattaaaacagccttttgagatgtaagtactgttatcatccccatttcacaggtgaagaaacagaagcacagagatgttgatacagactcaaggacgcagcaagtggcggagcaagaatcacactcaggcagtctctctcctttctgaacagagatgagccctaagatacctggaagattttgtttttaacctcacattaaggaaagcacacatcaccttgaaaggttgcacacttactcctatgatggtgccattgcacagaaacatttcagaatacttttctaaattaaagagtttgtggagtgttttataaatatcaatgctaggaaatctttatcaaatgaagataggtttgactttttgaaacaaaagtcattcagagataagtctggtgtgattgaagccaaatcattccagttgagtaaaaataataaaaagtttggaatatacaaacaatttcaaaaagaaaggtgcaaacctctttagagtagggtcaacttaagaattccttttatttctaaaatgactggcttagaggcagcagcacttggtaaaagttttaatgtattggataaaaaaaaagttatcattacttgatagagcatatgtgtgtgtctgaagaaagatttacatagccttacacttctctctactgaatatcatacgttacttttcttaaatgtgtctagtcatatatgtgtgatatgtataaaggccagttccctccaggagcaatgacagtctttattcggagctttaaggtagttatgtaggccgggcatggtggcacatgcctgtaatcccagctactcatgaggctgaggcagaagaatcgcttggacctgggaggcagaggtttcagtgagccaagattgcactactacactccagcctggtgacagagtgagactccatctcaaaaaaaaaaa

SEQ ID NO: 378288 - DNA, 1416 bp, Homo sapiens
agcagggggcgggctctctgacgaaggactggaaggtggcggtggtgaaggtgcaggccgttggggcggctcagaggcaggtgactatgaaaggcttatatttccaacagagttccacagatgaagaaataacatttgtatttcaagaaaaggaagatcttcctgttacagaggataactttgtgaaacttcaagttaaagcttgtgctctgagccagataaatacaaagcttctggcagaaatgaagatgaaaaaggatttatttcctgttgggagagaaattgctggaattgtattagatgttggaagcaaggtatcattctttcaaccagatgatgaagtagttggaattttgcccctggactctgaagaccctggactttgtgaagttgttagagtacatgagcattacttggttcataaaccagaaaaggtcacatggacggaagcagcaggaagcattcgggatggagtgcgtgcctatacagctctgcattatctttctcatctctctcctggaaaatcagtgctgataatggatggagcaagtgcatttggtacaatagctattcagttagcacatcatagaggagccaaagtgatttcaacagcatgcagccttgaagataagcagtgccttgaaagattcagacctcccatagcccgagtgattgatgtatctaatgggaaagttcatgttgctgaaagctgtttggaagaaacaggtggcctgggagtagatattgtcctagatgctggagtgagattatatagtaaagatgatgaaccagctgtaaaactacaactactaccacataaacatgatatcatcacacttcttggtgttggaggccactgggtaacaacagaagaaaaccttcagttggatcctccagatagccactgccttttcctcaagggagcaacgttagctttcctgaatgatgaagtttggaatttgtcaaatgtacaacagggaaaatatctttcttaacaatccttccagctacgtatcttaaaggatgtgatggagaagttatcaactggtgttttcagacctcagttggatgaacccattccactgtatgaggcaaaagtttccatggaagctgttcagaaaaatcaaggaagaaaaaagcaagttgttcaattttaattttcttctttctcagacctcagtcggatgaacatattccagtatttgaagccagaattttctttggaaattgttgagaaaaaccaaggaagataaaacaagttgcatttttaagcacgtttctctgctaagacaagatgctcagttgacacatttgaaaagtgtttgaaaaattcttgtgcaaatgatcaagataattctataattaacatcttaagggaatttttctaaaaaccttttcattgtttctatatatttt

SEQ ID NO: 378289 - DNA, 1279 bp, Homo sapiens
agcagggggcgggctctctgacgaaggactggaaggtggcggtggtgaaggtgcaggccgttggggcggctcagaggcaggtgactatgaaaggcttatatttccaacagagttccacagatgaagaaataacatttgtatttcaagaaaaggaagatcttcctgttacagaggataactttgtgaaacttcaagttaaagcttgtgctctgagccagataaatacaaagcttctggcagaaatgaagatgaaaaaggatttatttcctgttgggagagaaattgctggaattgtattagatgttggaagcaaggtatcattctttcaaccagatgatgaagtagttggaattttgcccctggactctgaagaccctggactttgtgaagttgttagagtacatgagcattacttggttcataaaccagaaaaggtcacatggacggaagcagcaggaagcattcgggatggagtgcgtgcctatacagctctgcattatctttctcatctctctcctggaaaatcagtgctgataatggatggagcaagtgcatttggtacaatagctattcagttagcacatcatagaggagccaaagtgatttcaacagcatgcagccttgaagataagcagtgccttgaaagattcagacctcccatagcccgagtgattgatgtatctaatgggaaagttcatgttgctgaaagctgtttggaagaaacaggtggcctgggagtagatattgtcctagatgctggagtgagattatatagtaaagatgatgaaccagctgtaaaactacaactactaccacataaacatgatatcatcacacttcttggtgttggaggccactgggtaacaacagaagaaaaccttcagttggatcctccagatagccactgccttttcctcaagggagcaacgttagctttcctgaatgatgaagtttggaatttgtcaaatgtacaacagggaaaatatctttgtatcttaaaggatgtgatggagaagttatcaactggtgttttcagacctcagtcggatgaacatattccagtatttgaagccagaattttctttggaaattgttgagaaaaaccaaggaagataaaacaagttgcatttttaagcacgtttctctgctaagacaagatgctcagttgacacatttgaaaagtgtttgaaaaattcttgtgcaaatgatcaagataattctataattaacatcttaagggaatttttctaaaaaccttttcattgtttctatatatttt

SEQ ID NO: 378290 - DNA, 1592 bp, Homo sapiens
agcagggggcgggctctctgacgaaggactggaaggtggcggtggtgaaggtgcaggccgttggggcggctcagaggcagagttccacagatgaagaaataacatttgtatttcaagaaaaggaagatcttcctgttacagaggataactttgtgaaacttcaagttaaagcttgtgctctgagccagataaatacaaagcttctggcagaaatgaagatgaaaaaggatttatttcctgttgggagagaaattgctggaattgtattagatgttggaagcaaggtatcattctttcaaccagatgatgaagtagttggaattttgcccctggactctgaagaccctggactttgtgaagttgttagagtacatgagcattacttggttcataaaccagaaaaggtcacatggacggaagcagcaggaagcattcgggatggagtgcgtgcctatacagctctgcattatctttctcatctctctcctggaaaatcagtgctgataatggatggagcaagtgcatttggtacaatagctattcagttagcacatcatagaggagccaaagtgatttcaacagcatgcagccttgaagataagcagtgccttgaaagattcagacctcccatagcccgagtgattgatgtatctaatgggaaagttcatgttgctgaaagctgtttggaagaaacaggtggcctgggagtagatattgtcctagatgctggagtgagattatatagtaaagatgatgaaccagctgtaaaactacaactactaccacataaacatgatatcatcacacttcttggtgttggaggccactgggtaacaacagaagaaaaccttcagttggatcctccagatagccactgccttttcctcaagggagcaacgttagctttcctgaatgatgaagtttggaatttgtcaaatgtacaacagggaaaatatctttgtatcttaaaggatgtgatggagaagttatcaactggtgttttcagacctcagttggatgaacccattccactgtatgaggcaaaagtttccatggaagctgttcagaaaaatcaaggaagaaaaaagcaagttgttcaattttaattttcttctttctcagacctcagtcggatgaacatattccagtatttgaagccagaattttctttggaaattgttgagaaaaaccaaggaagataaaacaagttgcatttttaagcacgtttctctgctaagacaagatgctcagttgacacatttgaaaagtgtttgaaaaattcttgtgcaaatgatcaagataattctataattaacatcttaagggaatttttctaaaaaccttttcattgtttctatatattttgcccctgctataaaattccttccatgaagaaaactgctgctttcagcaaaagtcacactactcttgataaaagctgttgcaggcctttgctaagctatcaaagtaacgtattaattttgtatcaactccgttctcaacaccttccttaagtctttgctgtcataatttaagcatttgagtatattttgaagtcttaaaagacttagcccataggcacttaaaaaatg

SEQ ID NO: 378291 - DNA, 1480 bp, Homo sapiens
taacatttgtatttcaagaaaaggaagatcttccttttcttgaaatacaaatgttaaagcttgtgctctgagccagataaatacaaagcttctggcagaaatgaagatgaaaaaggatttatttcctgttgggagagaaattgctggaattgtattagatgttggaagcaaggtatcattctttcaaccagatgatgaagtagttggaattttgcccctggactctgaagaccctggactttgtgaagttgttagagtacatgagcattacttggttcataaaccagaaaaggtcacatggacggaagcagcaggaagcattcgggatggagtgcgtgcctatacagctctgcattatctttctcatctctctcctggaaaatcagtgctgataatggatggagcaagtgcatttggtacaatagctattcagttagcacatcatagaggagccaaagtgatttcaacagcatgcagccttgaagataagcagtgccttgaaagattcagacctcccatagcccgagtgattgatgtatctaatgggaaagttcatgttgctgaaagctgtttggaagaaacaggtggcctgggagtagatattgtcctagatgctggagtgagattatatagtaaagatgatgaaccagctgtaaaactacaactactaccacataaacatgatatcatcacacttcttggtgttggaggccactgggtaacaacagaagaaaaccttcagttggatcctccagatagccactgccttttcctcaagggagcaacgttagctttcctgaatgatgaagtttggaatttgtcaaatgtacaacagggaaaatatctttgtatcttaaaggatgtgatggagaagttatcaactggtgttttcagacctcagttggatgaacccattccactgtatgaggcaaaagtttccatggaagctgttcagaaaaatcaaggaagaaaaaagcaagttgttcaattttaattttcttctttctcagacctcagtcggatgaacatattccagtatttgaagccagaattttctttggaaattgttgagaaaaaccaaggaagataaaacaagttgcatttttaagcacgtttctctgctaagacaagatgctcagttgacacatttgaaaagtgtttgaaaaattcttgtgcaaatgatcaagataattctataattaacatcttaagggaatttttctaaaaaccttttcattgtttctatatattttgcccctgctataaaattccttccatgaagaaaactgctgctttcagcaaaagtcacactactcttgataaaagctgttgcaggcctttgctaagctatcaaagtaacgtattaattttgtatcaactccgttctcaacaccttccttaagtctttgctgtcataatttaagcatttgagtatattttgaagtcttaaaagacttagcccataggcacttaaaaaatg

SEQ ID NO: 378292 - DNA, 1832 bp, Homo sapiens
agcagggggcgggctctctgacgaaggactggaaggtggcggtggtgaaggtgcaggccgttggggcggctcagaggcaggtgactatgaaaggcttatatttccaacagagttccacagatgaagaaataacatttgtatttcaagaaaaggaagatcttcctgttacagaggataactttgtgaaacttcaagttaaagcttgtgctctgagccagataaatacaaagcttctggcagaaatgaagatgaaaaaggatttatttcctgttgggagagaaattgctggaattgtattagatgttggaagcaaggtatcattctttcaaccagatgatgaagtagttggaattttgcccctggactctgaagaccctggactttgtgaagttgttagagtacatgagcattacttggttcataaaccagaaaaggtcacatggacggaagcagcaggaagcattcgggatggagtgcgtgcctatacagctctgcattatctttctcatctctctcctggaaaatcagtgctgataatggatggagcaagtgcatttggtacaatagctattcagttagcacatcatagaggagccaaagtgatttcaacagcatgcagccttgaagataagcagtgccttgaaagattcagacctcccatagcccgagtgattgatgtatctaatgggaaagttcatgttgctgaaagctgtttggaagaaacaggtggcctgggagtagatattgtcctagatgctggagttggatcctccagatagccactgccttttcctcaagggagcaacgttagctttcctgaatgatgaagtttggaatttgtcaaatgtacaacagggaaaatatctttagtattccaagtgccttgcaagtattcatttaaacattaaaacagccttttgagatgtaagtactgttatcatccccatttcacaggtgaagaaacagaagcacagagatgttgatacagactcaaggacgcagcaagtggcggagcaagaatcacactcaggcagtctctctcctttctgaacagagatgagccctaagatacctggaagattttgtttttaacctcacattaaggaaagcacacatcaccttgaaaggttgcacacttactcctatgatggtgccattgcacagaaacatttcagaatacttttctaaattaaagagtttgtggagtgttttataaatatcaatgctaggaaatctttatcaaatgaagataggtttgactttttgaaacaaaagtcattcagagataagtctggtgtgattgaagccaaatcattccagttgagtaaaaataataaaaagtttggaatatacaaacaatttcaaaaagaaaggtgcaaacctctttagagtagggtcaacttaagaattccttttatttctaaaatgactggcttagaggcagcagcacttggtaaaagttttaatgtattggataaaaaaaaagttatcattacttgatagagcatatgtgtgtgtctgaagaaagatttacatagccttacacttctctctactgaatatcatacgttacttttcttaaatgtgtctagtcatatatgtgtgatatgtataaaggccagttccctccaggagcaatgacagtctttattcggagctttaaggtagttatgtaggccgggcatggtggcacatgcctgtaatcccagctactcatgaggctgaggcagaagaatcgcttggacctgggaggcagaggtttcagtgagccaagattgcactactacactccagcctggtgacagagtgagactccatctcaaaaaaaaaaa

SEQ ID NO: 378293 - DNA, 1744 bp, Homo sapiens
gcatgatggtgcatgccattagtcccagccactcgggaggctggggcacaagaatcacttgaacctgggaggtggaggttgcagtgagccaagatcgtgccacaaactccagcctggttgacaagagcagaactccatctcaaaaaaaaaatgaataaagtcaactaaataggcaaagagagagatacttctcctggtcacaataatcgcatggcccaaatatctagagaatccagatttgaagtgctgtatatcctgtagtctttacagaccatcaaaatgttattgacattttggtccttttttccacattaaacaaaatcagtctttttacaaatccacagattttaaaaatgtattttaatagataagaattatatttaataaacttgtaatattaactattaattttcttcactctttagttggaagcaaggtatcattctttcaaccagatgatgaagtagttggaattttgcccctggactctgaagaccctggactttgtgaagttgttagagtacatgagcattacttggttcataaaccagaaaaggtcacatggacggaagcagcaggaagcattcgggatggagtgcgtgcctatacagctctgcattatctttctcatctctctcctggaaaatcagtgctgataatggatggagcaagtgcatttggtacaatagctattcagttagcacatcatagaggagccaaagtgatttcaacagcatgcagccttgaagataagcagtgccttgaaagattcagacctcccatagcccgagtgattgatgtatctaatgggaaagttcatgttgctgaaagctgtttggaagaaacaggtggcctgggagtagatattgtcctagatgctggagtgagattatatagtaaagatgatgaaccagctgtaaaactacaactactaccacataaacatgatatcatcacacttcttggtgttggaggccactgggtaacaacagaagaaaaccttcagttggatcctccagatagccactgccttttcctcaagggagcaacgttagctttcctgaatgatgaagtttggaatttgtcaaatgtacaacagggaaaatatctttgtatcttaaaggatgtgatggagaagttatcaactggtgttttcagacctcagttggatgaacccattccactgtatgaggcaaaagtttccatggaagctgttcagaaaaatcaaggaagaaaaaagcaagttgttcaattttaattttcttctttctcagacctcagtcggatgaacatattccagtatttgaagccagaattttctttggaaattgttgagaaaaaccaaggaagataaaacaagttgcatttttaagcacgtttctctgctaagacaagatgctcagttgacacatttgaaaagtgtttgaaaaattcttgtgcaaatgatcaagataattctataattaacatcttaagggaatttttctaaaaaccttttcattgtttctatatattttgcccctgctataaaattccttccatgaagaaaactgctgctttcagcaaaagtcacactactcttgataaaagctgttgcaggcctttgctaagctatcaaagtaacgtattaattttgtatcaactccgttctcaacaccttccttaagtctttgctgtcataatttaagcatttgagtatattttgaagtcttaaaagacttagcccataggcacttaaaaaatg

SEQ ID NO: 378294 - DNA, 1020 bp, Homo sapiens
agcagggggcgggctctctgacgaaggactggaaggtggcggtggtgaaggtgcaggccgttggggcggctcagaggcaggtgactatgaaaggcttatatttccaacagagttccacagatgaagaaataacatttgtatttcaagaaaaggaagatcttcctgttacagaggataactttgtgaaacttcaagttaaagcttgtgctctgagccagataaatacaaagcttctggcagaaatgaagatgaaaaaggatttatttcctgttgggagagaaattgctggaattgtattagatgttggaagcaaggtatcattctttcaaccagatgatgaagtagttggaattttgcccctggactctgaagaccctggactttgtgaagttgttagagtacatgagcattacttggttcataaaccagaaaaggtcacatggacggaagcagcaggaagcattcgggatggagtgcgtgcctatacagctctgcattatctttctcatctctctcctggaaaatcagtgctgataatggatggagcaagtgcatttggtacaatagctattcagttagcacatcatagaggagccaaagtgatttcaacagcatgcagccttgaagataagcagtgccttgaaagattcagacctcccatagcccgagtgattgatgtatctaatgggaaagttcatgttgctgaaagctgtttggaagaaacaggtggcctgggagtagatattgtcctagatgctggaggttatatttttcagcattctagttacatatttacatgatggctgatatgcaaataccgtaattctcacctaccaatcttcactgattttccaacaccctcatgaagatggccagaaaagacacacacacacccctaccacttcaccaccaggattctagattggccttgcatctgccatgtacttatcacctcgctgtttcatcattttggaccatgaaatagaaaatattatcgtttacgttattaaagtttatgtg

SEQ ID NO: 378295 - DNA, 1070 bp, Homo sapiens
agcagggggcgggctctctgacgaaggactggaaggtggcggtggtgaaggtgcaggccgttggggcggctcagaggcaggtgactatgaaaggcttatatttccaacagagttccacagatgaagaaataacatttgtatttcaagaaaaggaagatcttcctgttacagaggataactttgtgaaacttcaagttaaagcttgtgctctgagccagataaatacaaagcttctggcagaaatgaagatgaaaaaggatttatttcctgttgggagagaaattgctggaattgtattagatgttggaagcaaggtatcattctttcaaccagatgatgaagtagttggaattttgcccctggactctgaagaccctggactttgtgaagttgttagagtacatgagcattacttggttcataaaccagaaaaggtcacatggacggaagcagcaggaagcattcgggatggagtgcgtgcctatacagctctgcattatctttctcatctctctcctggaaaatcagtgctgataatggatggagcaagtgcatttggtacaatagctattcagttagcacatcatagaggagccaaagtgatttcaacagcatgcagccttgaagataagcagtgccttgaaagattcagacctcccatagagaacagtacaattgcctgatttcctgtcctttacagcccgagtgattgatgtatctaatgggaaagttcatgttgctgaaagctgtttggaagaaacaggtggcctgggagtagatattgtcctagatgctggagtgagattatatagtaaagatgatgaaccagctgtaaaactacaactactaccacataaacatgatatcatcacacttcttggtgttggaggccactgggtaacaacagaagaaaaccttcaggtactatcagaagtataaagcgttgagattacaccaaaggggtgtaattaacaaacaataatgcctaagttatttgaggcaaggtatgactaaattagtataaaatctgggccaggcatggtggctcacacctatgagtccagcactat

SEQ ID NO: 378296 - DNA, 1128 bp, Homo sapiens
agcagggggcgggctctctgacgaaggactggaaggtggcggtggtgaaggtgcaggccgttggggcggctcagaggcaggtgactatgaaaggcttatatttccaacagagttccacagatgaagaaataacatttgtatttcaagaaaaggaagatcttcctgttacagaggataactttgtgaaacttcaagttaaagcttgtgctctgagccagataaatacaaagcttctggcagaaatgaagatgaaaaaggatttatttcctgttgggagagaaattgctggaattgtattagatgttggaagcaaggtatcattctttcaaccagatgatgaagtagttggaattttgcccctggactctgaagaccctggactttgtgaagttgttagagtacatgagcattacttggttcataaaccagaaaaggtcacatggacggaagcagcaggaagcattcgggatggagtgcgtgcctatacagctctgcattatctttctcatctctctcctggaaaatcagtgctgataatggatggagcaagtgcatttggtacaatagctattcagttagcacatcatagaggagccaaagtgatttcaacagcatgcagccttgaagataagcagtgccttgaaagattcagacctcccatagagaacagtacaattgcctgatttcctgtcctttacagcccgagtgattgatgtatctaatgggaaagttcatgttgctgaaagctgtttggaagaaacaggtggcctgggagtagatattgtcctagatgctggaggtaggtaccttatgaaattagtagcctgtgtagtttttttagtttgatgaatttaagaaaaaaaatttaaccagggcataattattaatgcacttattaaaccagatgttcagttttaggttttgtttttaactgaagactttttaatttaaattggaacttccactttattctcattgtaagcgctgtatgtaagagagaacatgcttatcttttacagcgtagactaggggtgtccaatcttttggcttccctggccacattggaagaagaattgtcttaggccacacataaaatacagtaacactaatgatatcttatgagccaaa

SEQ ID NO: 378297 - DNA, 410 bp, Homo sapiens
taaataatataaagaaatcaattcgatatggcctctgttctataaccatacacccactgtatatttttttctacacaggcatttggtacaatagctattcagttagcacatcatagaggagccaaagtgatttcaacagcatgcagccttgaagataagcagtgccttgaaagattcagacctcccataggtgggtaatattatgagcacagactttaaaacaggaaattttgaaggaaaatcacctttaaaaatgtacttgtaaaaccaagtacaaaatccctggccaggtgcagtggctcacaactgtaacctcagcaccttgggaagccaggatgggaggattgcttgagcccaggagtttgagaccagcctgagcaacatagaagacctcatctatatataatctt

SEQ ID NO: 378298 - DNA, 804 bp, Homo sapiens
ttctttcattacgataataggaaataataatagcagttaagtttccttaagtattccaaacagtattccaagtgccttgcaagtattcatttaaacattaaaacagccttttgagatgtaagtactgttatcatccccatttcacaggtgaagaaacagaagcacagagatgttgatacagactcaaggacgcagcaagtggcggagcaagaatcacactcaggcagtctctctcctttctgaacagagatgagccctaagatacctggaagattttgtttttaacctcacattaaggaaagcacacatcaccttgaaaggttgcacacttactcctatgatggtgccattgcacagaaacatttcagaatacttttctaaattaaagagtttgtggagtgttttataaatatcaatgctaggaaatctttatcaaatgaagataggtttgactttttgaaacaaaagtcattcagagataagtctggtgtgattgaagccaaatcattccagttgagtaaaaataataaaaagtttggaatatacaaacaatttcaaaaagaaaggtgcaaacctctttagagtagggtcaacttaagaattccttttatttctaaaatgactggcttagaggcagcagcacttggtaaaagttttaatgtattggataaaaaaaaagttatcattacttgatagagcatatgtgtgtgtctgaagaaagatttacatagccttacacttctctctactgaatatcatacgttacttttcttaaatgtgtctagtcatatatgtgtgatatgt

SEQ ID NO: 378299 - DNA, 1395 bp, Homo sapiens
agcagggggcgggctctctgacgaaggactggaaggtggcggtggtgaaggtgcaggccgttggggcggctcagaggcaggtgactatgaaaggcttatatttccaacagagttccacagatgaagaaataacatttgtatttcaagaaaaggaagatcttcctgttacagaggataactttgtgaaacttcaagttaaagcttgtgctctgagccagataaatacaaagcttctggcagaaatgaagatgaaaaaggatttatttcctgttgggagagaaattgctggaattgtattagatgttggaagcaaggtatcattctttcaaccagatgatgaagtagttggaattttgcccctggactctgaagaccctggactttgtgaagttgttagagtacatgagcattacttggttcataaaccagaaaaggtcacatggacggaagcagcaggaagcattcgggatggagtgcgtgcctatacagctctgcattatctttctcatctctctcctggaaaatcagtgctgataatggatggagcaagtgcatttggtacaatagctattcagttagcacatcatagaggagccaaagtgatttcaacagcatgcagccttgaagataagcagtgccttgaaagattcagacctcccatagcccgagtgattgatgtatctaatgggaaagttcatgttgctgaaagctgtttggaagaaacaggtggcctgggagtagatattgtcctagatgctggagtgagattatatagtaaagatgatgaaccagctgtaaaactacaactactaccacataaacatgatatcatcacacttcttggtgttggaggccactgggtaacaacagaagaaaaccttcagttggatcctccagatagccactgccttttcctcaagggagcaacgttagctttcctgaatgatgaagtttggaatttgtcaaatgtacaacagggaaaatatctttgtatcttaaaggatgtgatggagaagttatcaactggtgttttcagacctcagttggatgaacccattccactgtatgaggcaaaagtttccatggaagctgttcagaaaaatcaaggaagaaaaaagcaagttgttcaattttaattttcttctttctcagacctcagtcggatgaacatattccagtatttgaagccagaattttctttggaaattgttgagaaaaaccaaggaagataaaacaagttgcatttttaagcacgtttctctgctaagacaagatgctcagttgacacatttgaaaagtgtttgaaaaattcttgtgcaaatgatcaagataattctataattaacatcttaagggaatttttctaaaaaccttttcattgtttctatatatttt

SEQ ID NO: 378300 - DNA, 654 bp, Homo sapiens
agcagggggcgggctctctgacgaaggactggaaggtggcggtggtgaaggtgcaggccgttggggcggctcagaggcaggtgactatgaaaggcttatatttccaacagagttccacagatgaagaaataacatttgtatttcaagaaaaggaagatcttcctgttacagaggataactttgtgaaacttcaagttaaagcttgtgctctgagccagataaatacaaagcttctggcagaaatgaagatgaaaaaggatttatttcctgttgggagagaaattgctggaattgtattagatgttggaagcaaggtatcattctttcaaccagatgatgaagtagttgaagtactttcccggctgggtgctgtggctcacgtctgtaatcccagcacgttgggaggccaaggtgggcgaatcacctgaggtcgggagttcgagaccagcctgaccaacatggagaaacctcgtctctactaaaaatacaaaattagccaggcatggtggcacgtgcctgtaatcccagctactcaggaggctgaggcaggaaaattgcttaaacccaggaggcagaggttgtggtgagccgagatcacaccattgcactccagcctgggcaagaagaatgaaactccatctcaaaaaaaataaa

SEQ ID NO: 378301 - DNA, 813 bp, Homo sapiens
agcagggggcgggctctctgacgaaggactggaaggtggcggtggtgaaggtgcaggccgttggggcggctcagaggcaggtgactatgaaaggcttatatttccaacagagttccacagatgaagaaataacatttgtatttcaagaaaaggaagatcttcctgttacagaggataactttgtgaaacttcaagttaaagcttgtgctctgagccagataaatacaaagcttctggcagaaatgaagatgaaaaaggatttatttcctgttgggagagaaattgctggaattgtattagatgttggaagcaaggtatcattctttcaaccagatgatgaagtagttgaagtactttcccggctgggtgctgtggctcacgtctgtaatcccagcacgttgggaggccaaggtgggcgaatcacctgaggtcgggagttcgagaccagcctgaccaacatggagaaacctcgtctctactaaaaatacaaaattagccaggcatggtggcacgtgcctgtaatcccagctactcaggaggctgaggcaggaaaattgcttaaacccaggaggcagaggttgtggtgagccgagatcacaccattgcactccagcctgggcaagaagaatgaaactccatctcaaaaaaaataaaacaaaaacaaaagtgggggggccgggcccgaaaaatttttcaacactcgggggggggcgcgccagagaaagacaatggcacgggcccgggaacgggggcagggggtcccaaaaaacccgggcggggtgcaccagggggggcggtcaagccactcccccg

SEQ ID NO: 378302 - DNA, 1762 bp, Homo sapiens
agcagggggcgggctctctgacgaaggactggaaggtggcggtggtgaaggtgcaggccgttggggcggctcagaggcaggtgactatgaaaggcttatatttccaacagagttccacagatgaagaaataacatttgtatttcaagaaaaggaagatcttcctgttacagaggataactttgtgaaacttcaagttaaagcttgtgctctgagccagataaatacaaagcttctggcagaaatgaagatgaaaaaggatttatttcctgttgggagagaaattgctggaattgtattagatgttggaagcaaggtatcattctttcaaccagatgatgaagtagttggaattttgcccctggactctgaagaccctggactttgtgaagttgttagagtacatgagcattacttggttcataaaccagaaaaggtcacatggacggaagcagcaggaagcattcgggatggagtgcgtgcctatacagctctgcattatctttctcatctctctcctggaaaatcagtgctgataatggatggagcaagtgcatttggtacaatagctattcagttagcacatcatagaggagccaaagtgatttcaacagcatgcagccttgaagataagcagtgccttgaaagattcagacctcccatagcccgagtgattgatgtatctaatgggaaagttcatgttgctgaaagctgtttggaagaaacaggtggcctgggagtagatattgtcctagatgctggagtgagattatatagtaaagatgatgaaccagctgtaaaactacaactactaccacataaacatgatatcatcacacttcttggtgttggaggccactgggtaacaacagaagaaaaccttcaggtgaagaaacagaagcacagagatgttgatacagactcaaggacgcagcaagtggcggagcaagaatcacactcaggcagtctctctcctttctgaacagagatgagccctaagatacctggaagattttgtttttaacctcacattaaggaaagcacacatcaccttgaaaggttgcacacttactcctatgatggtgccattgcacagaaacatttcagaatacttttctaaattaaagagtttgtggagtgttttataaatatcaatgctaggaaatctttatcaaatgaagataggtttgactttttgaaacaaaagtcattcagagataagtctggtgtgattgaagccaaatcattccagttgagtaaaaataataaaaagtttggaatatacaaacaatttcaaaaagaaaggtgcaaacctctttagagtagggtcaacttaagaattccttttatttctaaaatgactggcttagaggcagcagcacttggtaaaagttttaatgtattggataaaaaaaaagttatcattacttgatagagcatatgtgtgtgtctgaagaaagatttacatagccttacacttctctctactgaatatcatacgttacttttcttaaatgtgtctagtcatatatgtgtgatatgtataaaggccagttccctccaggagcaatgacagtctttattcggagctttaaggtagttatgtaggccgggcatggtggcacatgcctgtaatcccagctactcatgaggctgaggcagaagaatcgcttggacctgggaggcagaggtttcagtgagccaagattgcactactacactccagcctggtgacagagtgagactccatctcaaaaaaaaaaa

SEQ ID NO: 378303 - DNA, 1659 bp, Homo sapiens
agcagggggcgggctctctgacgaaggactggaaggtggcggtggtgaaggtgcaggccgttggggcggctcagaggcaggtgactatgaaaggcttatatttccaacagagttccacagatgaagaaataacatttgtatttcaagaaaaggaagatcttcctgttacagaggataactttgtgaaacttcaagttaaagcttgtgctctgagccagataaatacaaagcttctggcagaaatgaagatgaaaaaggatttatttcctgttgggagagaaattgctggaattgtattagatgttggaagcaaggtatcattctttcaaccagatgatgaagtagttggaattttgcccctggactctgaagaccctggactttgtgaagttgttagagtacatgagcattacttggttcataaaccagaaaaggtcacatggacggaagcagcaggaagcattcgggatggagtgcgtgcctatacagctctgcattatctttctcatctctctcctggaaaatcagtgctgataatggatggagcaagtgcatttggtacaatagctattcagttagcacatcatagaggagccaaagtgatttcaacagcatgcagccttgaagataagcagtgccttgaaagattcagacctcccatagagaacagtacaattgcctgatttcctgtcctttacagcccgagtgattgatgtatctaatgggaaagttcatgttgctgaaagctgtttggaagaaacaggtggcctgggagtagatattgtcctagatgctggagtgagattatatagtaaagatgatgaaccagctgtaaaactacaactactaccacataaacatgatatcatcacacttcttggtgttggaggccactgggtaacaacagaagaaaaccttcagttggatcctccagatagccactgccttttcctcaagggagcaacgttagctttcctgaatgatgaagtttggaatttgtcaaatgtacaacagggaaaatatctttgtatcttaaaggatgtgatggagaagttatcaactggtgttttcagacctcagttggatgaacccattccactgtatgaggcaaaagtttccatggaagctgttcagaaaaatcaaggaagaaaaaagcaagttgttcaattttaattttcttctttctcagacctcagtcggatgaacatattccagtatttgaagccagaattttctttggaaattgttgagaaaaaccaaggaagataaaacaagttgcatttttaagcacgtttctctgctaagacaagatgctcagttgacacatttgaaaagtgtttgaaaaattcttgtgcaaatgatcaagataattctataattaacatcttaagggaatttttctaaaaaccttttcattgtttctatatattttgcccctgctataaaattccttccatgaagaaaactgctgctttcagcaaaagtcacactactcttgataaaagctgttgcaggcctttgctaagctatcaaagtaacgtattaattttgtatcaactccgttctcaacaccttccttaagtctttgctgtcataatttaagcatttgagtatattttgaagtcttaaaagacttagcccataggcacttaaaaaatg

SEQ ID NO: 378304 - DNA, 1622 bp, Homo sapiens
  misc_feature (976)..(977): n is a, c, g, or t
  misc_feature (980)..(981): n is a, c, g, or t
  misc_feature (985)..(985): n is a, c, g, or t
  misc_feature (1000)..(1000): n is a, c, g, or t
  misc_feature (1006)..(1007): n is a, c, g, or t
  misc_feature (1012)..(1012): n is a, c, g, or t
  misc_feature (1015)..(1015): n is a, c, g, or t
  misc_feature (1023)..(1023): n is a, c, g, or t
  misc_feature (1025)..(1025): n is a, c, g, or t
  misc_feature (1035)..(1035): n is a, c, g, or t
  misc_feature (1042)..(1042): n is a, c, g, or t
  misc_feature (1048)..(1048): n is a, c, g, or t
  misc_feature (1052)..(1052): n is a, c, g, or t
  misc_feature (1056)..(1056): n is a, c, g, or t
  misc_feature (1096)..(1096): n is a, c, g, or t
  misc_feature (1099)..(1101): n is a, c, g, or t
  misc_feature (1109)..(1110): n is a, c, g, or t
  misc_feature (1112)..(1112): n is a, c, g, or t
  misc_feature (1114)..(1114): n is a, c, g, or t
  misc_feature (1117)..(1117): n is a, c, g, or t
  misc_feature (1120)..(1120): n is a, c, g, or t
  misc_feature (1130)..(1130): n is a, c, g, or t
  misc_feature (1177)..(1177): n is a, c, g, or t
  misc_feature (1185)..(1186): n is a, c, g, or t
  misc_feature (1190)..(1190): n is a, c, g, or t
  misc_feature (1192)..(1192): n is a, c, g, or t
  misc_feature (1202)..(1202): n is a, c, g, or t
  misc_feature (1210)..(1210): n is a, c, g, or t
  misc_feature (1212)..(1212): n is a, c, g, or t
  misc_feature (1214)..(1214): n is a, c, g, or t
agcagggggcgggctctctgacgaaggactggaaggtggcggtggtgaaggtgcaggccgttggggcggctcagaggcaggtgactatgaaaggcttatatttccaacagagttccacagatgaagaaataacatttgtatttcaagaaaaggaagatcttcctgttacagaggataactttgtgaaacttcaagttaaagcttgtgctctgagccagataaatacaaagcttctggcagaaatgaagatgaaaaaggatttatttcctgttgggagagaaattgctggaattgtattagatgttggaagcaaggtatcattctttcaaccagatgatgaagtagttggaattttgcccctggactctgaagaccctggactttgtgaagttgttagagtacatgagcattacttggttcataaaccagaaaaggtcacatggacggaagcagcaggaagcattcgggatggagtgcgtgcctatacagctctgcattatctttctcatctctctcctggaaaatcagtgctgataatggatggagcaagtgcatttggtacaatagctattcagttagcacatcatagaggagccaaagtgatttcaacagcatgcagccttgaagataagcagtgccttgaaagattcagacctcccatagcccgagtgattgatgtatctaatgggaaagttcatgttgctgaaagctgtttggaagaaacaggtggcctgggagtagatattgtcctagatgctggagtgagattatatagtaaagatgatgaaccagctgtaaaactacaactactaccacataaacatgatatcatcacacttcttggtgttggaggccactgggtaacaacagaagaaaaccttcagttggatcctccagatagccactgccttttcctcaagggagcaacgttagctttcctgaatgatgaagtttggaatctcccaaacgcaccacnnccnnaacnccctactcccctaancgatcnnacgcngcncctccccncngcccctcccnccccccncccccncccncccncccccccccccccccccccccccccccccccccccccccnccnnncccccccnncncnaanccnaccccccccncccccccccccccccccccccccccccccccccccccccccaccccnccaccccnncccncnatcccccccngaaaccgntnanaaaaaccaaggaagataaaacaagttgcatttttaagcacgtttctctgctaagacaagatgctcagttgacacatttgaaaagtgtttgaaaaattcttgtgcaaatgatcaagataattctataattaacatcttaagggaatttttctaaaaaccttttcattgtttctatatattttgcccctgctataaaattccttccatgaagaaaactgctgctttcagcaaaagtcacactactcttgataaaagctgttgcaggcctttgctaagctatcaaagtaacgtattaattttgtatcaactccgttctcaacaccttccttaagtctttgctgtcataatttaagcatttgagtatattttgaagtcttaaaagacttagcccataggcacttaaaaaatg

SEQ ID NO: 378305 - DNA, 1599 bp, Homo sapiens
ggtggctcatgcctgtaatcccagcatttcgggaggccgaggcagacggatcacaaggtgactatgaaaggcttatatttccaacagagttccacagatgaagaaataacatttgtatttcaagaaaaggaagatcttcctgttacagaggataactttgtgaaacttcaagttaaagcttgtgctctgagccagataaatacaaagcttctggcagaaatgaagatgaaaaaggatttatttcctgttgggagagaaattgctggaattgtattagatgttggaagcaaggtatcattctttcaaccagatgatgaagtagttggaattttgcccctggactctgaagaccctggactttgtgaagttgttagagtacatgagcattacttggttcataaaccagaaaaggtcacatggacggaagcagcaggaagcattcgggatggagtgcgtgcctatacagctctgcattatctttctcatctctctcctggaaaatcagtgctgataatggatggagcaagtgcatttggtacaatagctattcagttagcacatcatagaggagccaaagtgatttcaacagcatgcagccttgaagataagcagtgccttgaaagattcagacctcccatagcccgagtgattgatgtatctaatgggaaagttcatgttgctgaaagctgtttggaagaaacaggtggcctgggagtagatattgtcctagatgctggagtgagattatatagtaaagatgatgaaccagctgtaaaactacaactactaccacataaacatgatatcatcacacttcttggtgttggaggccactgggtaacaacagaagaaaaccttcagttggatcctccagatagccactgccttttcctcaagggagcaacgttagctttcctgaatgatgaagtttggaatttgtcaaatgtacaacagggaaaatatctttgtatcttaaaggatgtgatggagaagttatcaactggtgttttcagacctcagttggatgaacccattccactgtatgaggcaaaagtttccatggaagctgttcagaaaaatcaaggaagaaaaaagcaagttgttcaattttaattttcttctttctcagacctcagtcggatgaacatattccagtatttgaagccagaattttctttggaaattgttgagaaaaaccaaggaagataaaacaagttgcatttttaagcacgtttctctgctaagacaagatgctcagttgacacatttgaaaagtgtttgaaaaattcttgtgcaaatgatcaagataattctataattaacatcttaagggaatttttctaaaaaccttttcattgtttctatatattttgcccctgctataaaattccttccatgaagaaaactgctgctttcagcaaaagtcacactactcttgataaaagctgttgcaggcctttgctaagctatcaaagtaacgtattaattttgtatcaactccgttctcaacaccttccttaagtctttgctgtcataatttaagcatttgagtatattttgaagtcttaaaagacttagcccataggcacttaaaaaatg

SEQ ID NO: 378306 - DNA, 1360 bp, Homo sapiens
  misc_feature (22)..(22): n is a, c, g, or t
ctcaacgctttatacttcatcntctttcaaccagatgatgaagtagttggaattttgcccctggactctgaagaccctggactttgtgaagttgttagagtacatgagcattacttggttcataaaccagaaaaggtcacatggacggaagcagcaggaagcattcgggatggagtgcgtgcctatacagctctgcattatctttctcatctctctcctggaaaatcagtgctgataatggatggagcaagtgcatttggtacaatagctattcagttagcacatcatagaggagccaaagtgatttcaacagcatgcagccttgaagataagcagtgccttgaaagattcagacctcccatagagaacagtacaattgcctgatttcctgtcctttacagcccgagtgattgatgtatctaatgggaaagttcatgttgctgaaagctgtttggaagaaacaggtggcctgggagtagatattgtcctagatgctggagtgagattatatagtaaagatgatgaaccagctgtaaaactacaactactaccacataaacatgatatcatcacacttcttggtgttggaggccactgggtaacaacagaagaaaaccttcagttggatcctccagatagccactgccttttcctcaagggagcaacgttagctttcctgaatgatgaagtttggaatttgtcaaatgtacaacagggaaaatatctttgtatcttaaaggatgtgatggagaagttatcaactggtgttttcagacctcagttggatgaacccattccactgtatgaggcaaaagtttccatggaagctgttcagaaaaatcaaggaagaaaaaagcaagttgttcaattttaattttcttctttctcagacctcagtcggatgaacatattccagtatttgaagccagaattttctttggaaattgttgagaaaaaccaaggaagataaaacaagttgcatttttaagcacgtttctctgctaagacaagatgctcagttgacacatttgaaaagtgtttgaaaaattcttgtgcaaatgatcaagataattctataattaacatcttaagggaatttttctaaaaaccttttcattgtttctatatattttgcccctgctataaaattccttccatgaagaaaactgctgctttcagcaaaagtcacactactcttgataaaagctgttgcaggcctttgctaagctatcaaagtaacgtattaattttgtatcaactccgttctcaacaccttccttaagtctttgctgtcataatttaagcatttgagtatattttgaagtcttaaaagacttagcccataggcacttaaaaaatg

SEQ ID NO: 378307 - DNA, 1543 bp, Homo sapiens
agcagggggcgggctctctgacgaaggactggaaggtggcggtggtgaaggtgcaggccgttggggcggctcagaggcaggtgactatgaaaggcttatatttccaacagagttccacagatgaagaaataacatttgtatttcaagaaaaggaagatcttcctgttacagaggataactttgtgaaacttcaagttaaagcttgtgctctgagccagataaatacaaagcttctggcagaaatgaagatgaaaaaggatttatttcctgttgggagagaaattgctggaattgtattagatgttggaagcaaggtatcattctttcaaccagatgatgaagtagttggaattttgcccctggactctgaagaccctggactttgtgaagttgttagagtacatgagcattacttggttcataaaccagaaaaggtcacatggacggaagcagcaggaagcattcgggatggagtgcgtgcctatacagctctgcattatctttctcatctctctcctggaaaatcagtgctgataatggatggagcaagtgcatttggtacaatagctattcagttagcacatcatagaggagccaaagtgatttcaacagcatgcagccttgaagataagcagtgccttgaaagattcagacctcccatagagaacagtacaattgcctgatttcctgtcctttacagcccgagtgattgatgtatctaatgggaaagttcatgttgctgaaagctgtttggaagaaacaggtggcctgggagtagatattgtcctagatgctggagtgagattatatagtaaagatgatgaaccagctgtaaaactacaactactaccacataaacatgatatcatcacacttcttggtgttggaggccactgggtaacaacagaagaaaaccttcagttggatcctccagatagccactgccttttcctcaagggagcaacgttagctttcctgaatgatgaagtttggaatttgtcaaatgtacaacagggaaaatatctttgtatcttaaaggatgtgatggagaagttatcaactggtgttttcagacctcagtcggatgaacatattccagtatttgaagccagaattttctttggaaattgttgagaaaaaccaaggaagataaaacaagttgcatttttaagcacgtttctctgctaagacaagatgctcagttgacacatttgaaaagtgtttgaaaaattcttgtgcaaatgatcaagataattctataattaacatcttaagggaatttttctaaaaaccttttcattgtttctatatattttgcccctgctataaaattccttccatgaagaaaactgctgctttcagcaaaagtcacactactcttgataaaagctgttgcaggcctttgctaagctatcaaagtaacgtattaattttgtatcaactccgttctcaacaccttccttaagtctttgctgtcataatttaagcatttgagtatattttgaagtcttaaaagacttagcccataggcacttaaaaaatg

SEQ ID NO: 378308 - DNA, 1091 bp, Homo sapiens
agcagggggcgggctctctgacgaaggactggaaggtggcggtggtgaaggtgcaggccgttggggcggctcagaggcaggtgactatgaaaggcttatatttccaacagagttccacagatgaagaaataacatttgtatttcaagaaaaggaagatcttcctgttacagaggataactttgtgaaacttcaagttaaagcttgtgctctgagccagataaatacaaagcttctggcagaaatgaagatgaaaaaggatttatttcctgttgggagagaaattgctggaattgtattagatgttggaagcaaggtatcattctttcaaccagatgatgaagtagttggaattttgcccctggactctgaagaccctggactttgtgaagttgttagagtacatgagcattacttggttcataaaccagaaaaggtcacatggacggaagcagcaggaagcattcgggatggagtgcgtgcctatacagctctgcattatctttctcatctctctcctggaaaatcagtgctgataatggatggagcaagtgcatttggtacaatagctattcagttagcacatcatagaggagccaaagtgatttcaacagcatgcagccttgaagataagcagtgccttgaaagattcagacctcccatagcccgagtgattgatgtatctaatgggaaagttcatgttgctgaaagctgtttggaagaaacaggtggcctgggagtagatattgtcctagatgctggaggtaggtaccttatgaaattagtagcctgtgtagtttttttagtttgatgaatttaagaaaaaaaatttaaccagggcataattattaatgcacttattaaaccagatgttcagttttaggttttgtttttaactgaagactttttaatttaaattggaacttccactttattctcattgtaagcgctgtatgtaagagagaacatgcttatcttttacagcgtagactaggggtgtccaatcttttggcttccctggccacattggaagaagaattgtcttaggccacacataaaatacagtaacactaatgatatcttatgagccaaa

SEQ ID NO: 378309 - DNA, 727 bp, Homo sapiens
gctgcatgatctacagatacctcaagaaaaaggatttgagaacagggctcctctgtgagcagcagtcctgggacagcaaagcccaatttcagatcccgcataaaacacaattgttctctgcaaataatgcagctaactgtgaaccaacccctacccacaactgggccagtatgtttagagagctgagagaggctttcattgaaaaagaattactgtatttgacctgataatttaccttctaggaatcagtcctagagaaatatgtagaaattcagataaggacttatctgaatctctatagaagacatgcagtgccttaaaatgggggtggggggagtccatttaagtgcatacagctttttaaagaatattttgtggcaggagaaagtgcatgtggtataaagtagaaaaggcacgatatgatattatacatgcttgatatggaatttcatattctgctcatgttaaagggcagagagaaaagacggcgaggaaatacagcagaatattaacagtagttgtctctgggagataggatttcaaacgtttctactttcttcccaaatttcccacaacaagcatatactaattttataatcaacaatatttaggaaaaaaatagtaaatttgttcaatattttccaaggtagacattgcgcccgggtgcatttgaacccagtcacacagcagcaaggtagctatctctgttcccagggtacccagttag

SEQ ID NO: 378310 - DNA, 705 bp, Homo sapiens
ttttttttgagacagagtctcgctctgttgcccaggctagagtgcagtggtgtgatttcttctcagcaggtgcagacacttctctgaagaccaacagcagaactgagtctcaggatgggtaaaggcttctgtaaacctccaaatcacatccctcttcttgtccaaccacccaacctctccacaggcaacctgatcagccacctttatacaaagtacagtattcagattggaataaaaatatatctccttgactccctgctctgagaggtatttcttctcagactcccaaaagctggattgaggaacatggcttagttggtacagtatagcaaaatgtcctgcttgttgaaactgaatttgtgattatcttctttttcctcaagaagtcattgagggctgttgtatccctataaaaggagaatttagagtagccaaataaaagggggctgaagtagtctcattacggaaaaagagagtgtgagcagccttttagtaattgattgcctcaagatgtggtattcagccagggtgaagggaaagtagttggggctgtggatctggaggtttacagaagcctttacccatcctgagactcagttctgctgttggtcttcagagaagtgtctgcacctgctgagaagaaatcacaccactgcactctagcctgggcaacagagcgagactctgtctcaaaaaaaaaaacaa

SEQ ID NO: 378311 - DNA, 384 bp, Homo sapiens
gagaacttttaaaggggattttcacaatttcaatagcccagcagtatcctctcactctcttttccttttccactgctacatggaatggaaggagctgctcgctgtgttaaaatgtggagattattttgaaaatttgaatatgaagaataagtgtcttaagccattctctcatttttataaagaaataacctgagactgagtaatttataaagaaagagttttaattggttctcggttctgcaggctgtacgggaagcatagtgacatctggtcccggggaggccccaagaagcttacaatcattgtggaaggcaaagtgggagaaggtacatcacatggcaaaagcaggagcaagagagtgaagggtgaggtgccacacacttt

SEQ ID NO: 378312 - DNA, 358 bp, Homo sapiens
atgcagtattcaagttcagaaatctatactcagatgaccttatgtaggtcatctgcttctgaggtttatctcaccagtggtcccagaaggctgcatatggaactgacctggacttaatctacaagatagatacccccagctaacctgcaaactcacagagtgatgatcatagaaacctgtattaagaaaacagatttcaggagcctttgaacaagaagagagaggaagaatgacataactgaacaagagagatggcgagcagagtttcctgaatgctgtgagcagaacaattggacagatgagggaagtctgtgacaatccagtggaatcacgcagtgtgtttaagtaaagctccctt

SEQ ID NO: 378313 - DNA, 732 bp, Homo sapiens
ttcaatatagaggatgaggaaagtagaattcaaggatggagcccaaattcttgacttgagcagctgggtaatagagccaaatgacataccatttattaacatgaagtcttggggttgggacaattttccttgggggaaaaatttacagaagtggaattgcaaagtcccctatttccttaaatatcctcatgcatctctttgtccagatatgctgtagcattgttatattgttttagtattattctatcagatccccctggtttaaacaatcagatgtagcaaaatatattgtagcccaattcacttaggtatacttacgtaaaaagaaaataacaaaggaacaaggaacatgtgctgtgggagaaattcttatagtcaaagtggaacagacagagttggcaaagtcctatgatatccccaaagtatttcaaattaaacttcgatatggaaattctgattatataagtttgataccatattaggatattgactacattttcccctgctgaatgaaaatctggctttagattaaaatggctatctaagttatttggtaacctgatggggttaaggatgttagttatattactaagtaacattatgacaaaaatgaccccttgattggtaaattaatttggactgggaagaactgcaaaggaatgataaatacctgatggggacactgtactttggaatgtcctgagttacttgtaattggcataccccttgtgt

SEQ ID NO: 378314 - DNA, 1244 bp, Homo sapiens
tccaagatgaaaccaatgagtcacaacattcacataatacactgtacaaccctgatctcttgactgtcatcaaatgtttcttacctctaaaccaaagtttcattttataatttaatttttctcattttttccattctcttagcttaagaaaagatcattacaaactttttgtaagtttttcatatatgcttgcaaagggttgtaaaactttattgtgattattcttgctttaagctgaaacttccctaatctttctttagagattgtggcatagcatgttagtttcttttccatatccaattgttttctgttatgaatacagaaatacaggcactgtcttgtaactttaaatagacatcatctcaagtctacaagaattatccaaaatggtatttaatgacatttctaggtcttcagacactattaatgcagattgtagcctctaggtcctgaagattttactagatactggttactgaaactgagctttcttgaattctttttccttccactgtggtttcccgcatttcaacatatcacctatttttgtcctcaaaggttacttaaatgttttccacagaattaaattaaatatgaatcatccctcctctgatttttgaaatgaccctttgcttcctatgataatgattcttctggtccgttttgtagttatatgttagagtttgtaaatagtcacacattttgcaactgcatataattttcttattattttttcctcttcctctaaaatgcactccagcctgggtgacagagcaagactccatctcaaaaaaaaaaaaaaaaaaattatgttaaaataaaggtcatcaaaagatattttcctaaacctttcctttaccagaaatatctctagtgtcacatggtcctttctcccttcttgcttttgtaggaatccaaagctaatctgtccctgatccggattgcacgcacctgtgccttttggggcccttctgcattagttcttccttctcttctaacctcaaaaatgtgttttctctattggctctttccctttaacatagaagtatactcacgcttttgttgaatcttgaaataaaaggcttcctttaccacatatctccctttaatactacatctctcttctcagccaaatacttgggaagagaagccctgagtttgtgtcattgttttctcacctccagttcactactttgcccactgcctgacatccagctcgctcacacacacacccaagcccaatc

SEQ ID NO: 378315 - DNA, 1738 bp, Homo sapiens
tccaagatgaaaccaatgagtcacaacattcacataatacactgtacaaccctgatctcttgactgtcatcaaatgtttcttacctctaaaccaaagtttcattttataatttaatttttctcattttttccattctcttagcttaagaaaagatcattacaaactttttgtaagtttttcatatatgcttgcaaagggttgtaaaactttattgtgattattcttgctttaagctgaaacttccctaatctttctttagagattgtggcatagcatgttagtttcttttccatatccaattgttttctgttatgaatacagaaatacaggcactgtcttgtaactttaaatagacatcatctcaagtctacaagaattatccaaaatggtatttaatgacatttctaggtcttcagacactattaatgcagattgtagcctctaggtcctgaagattttactagatactggttactgaaactgagctttcttgaattctttttccttccactgtggtttcccgcatttcaacatatcacctatttttgtcctcaaaggttacttaaatgttttccacagaattaaattaaatatgaatcatccctcctctgatttttgaaatgaccctttgcttcctatgataatgattcttctggtccgttttgtagttatatgttagagtttgtaaatagtcacacattttgcaactgcatataattttcttattattttttcctcttcctctaaaactgctgttatttcttttaactttttgtgggaaaaattaaacccatctttcactttgttgatatacttatttataattgaactccttgatttttgctcgaattgcttttcaagttacccacttttagggaagacattatttgggttttgtttagtgtatcaggctttttttagttagttgtatcaagaagtgtagacttttctatacataatatcctttttcccacagtatttttttttttttttaaagtctagccaggtgcgagtggctcacgcctgtaatcccagactttgggaggccgaggccggcggatcacgaagtcaggagatggagaccatcctggctaacacgttgaaaccccgtctttactaaaaatacaaaaaattagctggacatggtgacgggtgcctgtggtcccagctaatcaggaggctgaggcaggagaatggcatgaacccgggaggcagaggttgcagtgagccgagatcgtgccactgcactccagcctgggtgacagagcaagactccatctcaaaaaaaaaaaaaaaaaaattatgttaaaataaaggtcatcaaaagatattttcctaaacctttcctttaccagaaatatctctagtgtcacatggtcctttctcccttcttgcttttgtaggaatccaaagctaatctgtccctgatccggattgcacgcacctgtgccttttggggcccttctgcattagttcttccttctcttctaacctcaaaaatgtgttttctctattggctctttccctttaacatagaagtatactcacgcttttgttgaatcttgaaataaaaggcttcctttaccacatatctccctttaatactacatctctcttctcagccaaatacttgggaagagaagccctgagtttgtgtcattgttttctcacctccagttcactactttgcccactgcctgacatccagctcgctcacacacacacccaagcccaatc

SEQ ID NO: 378316 - DNA, 404 bp, Homo sapiens
taaattaagaggttatgtttttcatatggtgttaaataatcacaataaaaagccaaacactgtgtaagtaaaatcaaatactgtataagtaaatcaaaacatgtatatagtaaaactaaatcatgtatctgatatttaggacaccggatgtcttgcttgaggccagaatcatatgttcagtgtttattgtttaagaacaaaacagaagttttggaatacatgtgttataaaatccttgaggggaaacatgaaatgttcgaacttatatatagtcttgatagtaggtattctatagtatgtattttgctaatagtttgtgccagtagacaatgatggatatatgaattgtttatgccagtgaatacaattcactaagtaataaatgaaaacagtatttgcttttc

SEQ ID NO: 378317 - DNA, 570 bp, Homo sapiens
atgtgaatttgtatagatgtcgaagaaatgactgcaattttgtgggacctggttttggggcttctatgaagggaagatcttgtgcaaaaaatttgtgtatccagctgtagttgctgccatcttttaaaagcatgatgcctctgtcaatagatctgacattaatatgatataattacatattgatggactcattttattagaagcacttgcctttttcttggttatttgacttatacttgacggccagtttctcatgtatagaaatgtgtagcctggccatgtgcagtggctcatgcctgtaatcccagcaatttgggaggcctaggagggtggatcacctgaggtcaggagttcgagaccagttggccagcctggccaacatggtgaaaccccatctctactaaaaatgcaaacaaaaaaaaattagccaggcatggtggcaagcgcctgtaatcccagctactcgggaggctgaggcaggagaatgctgaacctgggaggcggaggttgcagtgagaggagattttgccagtgcactccagcctaggcaacaagagcaaaactccatct

SEQ ID NO: 378318 - DNA, 365 bp, Homo sapiens
gccttcctgggccatgcaagactacatttcccagcctcccttgcagctaggtgtggccacgtgatggaatggaagcgattcatgccatttccaggcctgggctaaaaaacacctcccatgtgatcttttctcccactcacctccactgctggaaagacgcagggacccagcagagggcttggaacctctgagggacagcagagccacaagagggagggagcctgggctctgaatcaccacgtgaatggcgggtagatgctcactgaatacctgcactgcgctgttacaggagagggaaatccacttccactgtatgaagtcactgagattcggggctgtctgttacagcagctgatttaccatga

SEQ ID NO: 378319 - DNA, 414 bp, Homo sapiens
tcaactgaaagtcttactgtataatatgacctcaacaaaattggacagtgctgcatagtcaagaaagggatagcaaactgaaagaactgatttagtggtattgccatctagctagcttacttaggaattatttctgatgactttaatttcaataaggcaggactaattcctttatccacatttccatctatatctttgttggatgtttggggatggaagagtccaatagtaaaagggaagtagattcttatgtggcctcaaggaaacattgtgtattagtatgggactggataactagttatctaatatctagttactttatatatttgagcataaatttaacaattaatgatactgatttaagagactgattttgtcaatcaaatgacattttggaggtaggtaaaaaaaaaa

SEQ ID NO: 378320 - DNA, 477 bp, Homo sapiens
catacctcgcagggatgatacagataaattgtttgataatttaaagtcctttgaagaataagaattccttagaaatgctaattgccttactagtgtttgatttaacttcgtctgccagaatgggcaagggaaaagaaaaatggaaagttgccttacccttgtgggttgctttaggaaactgtgataacaacatatcctgaagtgaatacgataccttatattcttagaaattctggatattggctgggcatggtggctcacgcctgtaatctcagcactaagctgaggcgggcggttcacctgaggtcaggagttcgagaccagcctggcaacatggtgaaaccccgtgtccactaaaaatacaaaaattagctgggcatggtggtgcacgcctgtaatactagctactcgggaggctgaggcaggagaattgcttgaacctgggaggtggaggttgcagtgagccaagattgcgtc

SEQ ID NO: 378321 - DNA, 452 bp, Homo sapiens
ggggaaacactagatatattaagattagtttgaatttaatatatgaacttgaattttagtattacaagggattagttttaatttgggaaattgtatccaattttcagaaattctacatttgcattaaagcagcaccaaatttgttttttaaattaaaagcaggctataatgttcatagaaatgtgctatggccaggcacagtggcttatgcctttaattccagcattctgggagcccgaggaaagaggatcacttgagcccaggatttcaagaccagcctgagcaatatagacctggtctctacaaaaaaattttttaaaaattagccaagcacggtggcgcatgcctgtaggaggatcacttgcgccctggaaatagaggttgcagtgagctgagatagcaccactgtactccatccagcctggcaacagagcaagaacatgtctcaaaaa

SEQ ID NO: 378322 - DNA, 710 bp, Homo sapiens
tgttgatatctatgacagagaataggaaatggaaagactatgatatatatattcagagttgaaatgacttctgtctggagtgattcattttaaattttaaaaccttgttgagcacttactgtctgctgggcacctgggtaggccctgggaatactgtgatgagcaagatagacaagacgtctaccctcctggggctttcctaatggggaagaaagatccttacttagctagcagtcctgtccgtaactgtgtaagggtgattttgatacatgttgggagcctggatgaagtagcacatgagtaggatattaaaggataagtaggttttgaagacggggacagaaagaaggaaaattgtggtcagggccaggggagaaaacaaggagtaactttctttggcaggaatgagggtgattcatgctggaatggtaggctggggtcagactgtggtgctataaatgcggggagagagattagagaaggcagcatgaagaatggagagaaaatgagtttgaagttgagcagacccgggttcagattttcatgctgccacttgcaaactgtgtgatgttggccatcaaggactgtgaactggctgggtgcagtggctcacacctgtcatcccagtgctttgggaggccaaggcaggaggattgcgtgaggccagaagtttgagactggcttgggcaatatagcgagacgatctttac

SEQ ID NO: 378323 - DNA, 254 bp, Homo sapiens
ttgaagagatggggtctcgctatgttcatcaggatggtttcaaactcctagcctcaagtgatcctcctccgttgacctcctaaagtgctgggattaccagcatgagcgactgtgcccgaccacctagctccttttaaatgttttcatgtcctgacccttcttaagtctttaaaatatagaaaatgcccttggtaaggaatgttaaaagtgtttgtgtatttttatggcctacttcctgtttagaaatgttctgt

SEQ ID NO: 378324 - DNA, 676 bp, Homo sapiens
ccagtggtggggctgggatttgagccaagtcttccaacttcacaatagcagagtaagaagagctgccttgttgatgggacgtgggtcggagctcccagtgtgtcttgccttcctggtgtgcttgatggcagccctgggctgctgtgaggtcctgagcacagtgcatcctgaggagacagtgctgcgggccccgcctactaacttccagagatgtcagctgcagcagggcagcgccctggttagagagacggcatggggagttggcagggggaggccctcggagaagatggcatggaggggttggggcctgtgctcctaggtgcttaggcttgcaggtgactggaatcctgactaatatcataagaggagagttcttactaacaaattacttgaacaaagactttgtttgttccttcattcgttcagcacatgtttacagtgtgcctgtgatgtcccaggcgcactgccagaatcctgacatccttgtggggggatcgaaaacataaatctagtcagtgagttcatcctgtggcatgtcagggggtgacagtggctgtggaggaaacagggaagggcagggtgtgggagtcctggtgctgtgtgaataggccgtcaggtcagccctgagacacggggcatctgcgcgagtcttgctggaggtgcacgtgtgagcccc

SEQ ID NO: 378325 - DNA, 1525 bp, Homo sapiens
gtccctcaaggccggaaagaaagtcgggcttctctagcccctggaggactcgactcactggtgcgcgatttaggtccggaggaggcgttgtgaggtgagctttttcagaagcgcgatcccaggacacgtcgggaagcaagcatccccagagctgcttggaaagaggaccaaagacgtctaaaaagtcatttggaaatatctctaaatatttgttaccatgtataagctgctaaagagaaattgggcccaacaaaactaattgaataattgaggcagatttgtgtgtatcatcaaattctatccagaagttgaagaatctgaatttaaagattgtgtgcatttaataagaggatgacctttcagtttaatttcactatagaagaccatctggaaaatgaattaacacccattagagatggagctttgaccctggattcctcaaaagagctgtcagtctcagaaagtcaaaaaggagaagagagggacagaaaatgttctgcagaacaatttgacttgcctcaggatcacttgtgggaacataagtcaatggaaaatgcagctccctctcaagacacagacagtccactcagtgcagccagcagttcaaggaacttggagccacatggaaaacagccctccttgagagctgccaaagagcatgctatgcctaaagatttaaagaagatgttagaaaataaagtcatagaaacattaccaggtttccagcatgttaagttatcagtagtgaaaaccatcttgttgaaagagaacttccctggagaaaacatagtttcaaaaagcttttcttctcactctgatctgattacaggtgtttatgagggaggcttaaaaatctgggaatgtacctttgacctcctggcttatttcacaaaggccaaagtgaaatttgctgggaaaaaagtcttggatcttggttgtggatcaggtttactaggtataactgcattcaagggagggtccaaagaaattcactttcaagattataacagtatggtgattgatgaagtaaccttacctaatgtagtagctaactccactttggaagatgaagaaaatgatgtaaatgagccagatgtgaaaagatgcaggaaaccaaaagtaacacaactatataaatgccgatttttttctggtgagtggtctgagttttgtaagcttgtactaagtagtgaaaaactttttgtaaaatatgatctcattctcacctcagaaaccatttacaacccagattattatagtaatttgcaccagactttccttagactgttaagtaaaaatggacgtgtacttttggccagcaaagcacattattttggtgtaggtggaggtgttcatctctttcagaagtttgtagaagaaagagatgtttttaagaccagaatactcaaaataattgatgaaggattgaagaggttcataattgaaataacttttaagtttcctggttaattaacattcactgagtatccaaaatgaaataaacagaaggaccaaaaaaaaaaat

SEQ ID NO: 378326 - DNA, 1470 bp, Homo sapiens
gtccctcaaggccggaaagaaagtcgggcttctctagcccctggaggactcgactcactggtgcgcgatttaggtccggaggaggcgttgtgagagctgcttggaaagaggaccaaagacgtctaaaaagtcatttggaaatatctctaaatatttgttaccatgtataagctgctaaagagaaattgggcccaacaaaactaattgaataattgaggcagatttgtgtgtatcatcaaattctatccagaagttgaagaatctgaatttaaagattgtgtgcatttaataagaggatgacctttcagtttaatttcactatagaagaccatctggaaaatgaattaacacccattagagatggagctttgaccctggattcctcaaaagagctgtcagtctcagaaagtcaaaaaggagaagagagggacagaaaatgttctgcagaacaatttgacttgcctcaggatcacttgtgggaacataagtcaatggaaaatgcagctccctctcaagacacagacagtccactcagtgcagccagcagttcaaggaacttggagccacatggaaaacagccctccttgagagctgccaaagagcatgctatgcctaaagatttaaagaagatgttagaaaataaagtcatagaaacattaccaggtttccagcatgttaagttatcagtagtgaaaaccatcttgttgaaagagaacttccctggagaaaacatagtttcaaaaagcttttcttctcactctgatctgattacaggtgtttatgagggaggcttaaaaatctgggaatgtacctttgacctcctggcttatttcacaaaggccaaagtgaaatttgctgggaaaaaagtcttggatcttggttgtggatcaggtttactaggtataactgcattcaagggagggtccaaagaaattcactttcaagattataacagtatggtgattgatgaagtaaccttacctaatgtagtagctaactccactttggaagatgaagaaaatgatgtaaatgagccagatgtgaaaagatgcaggaaaccaaaagtaacacaactatataaatgccgatttttttctggtgagtggtctgagttttgtaagcttgtactaagtagtgaaaaactttttgtaaaatatgatctcattctcacctcagaaaccatttacaacccagattattatagtaatttgcaccagactttccttagactgttaagtaaaaatggacgtgtacttttggccagcaaagcacattattttggtgtaggtggaggtgttcatctctttcagaagtttgtagaagaaagagatgtttttaagaccagaatactcaaaataattgatgaaggattgaagaggttcataattgaaataacttttaagtttcctggttaattaacattcactgagtatccaaaatgaaataaacagaaggaccaaaaaaaaaaat

SEQ ID NO: 378327 - DNA, 714 bp, Homo sapiens
gtccctcaaggccggaaagaaagtcgggcttctctagcccctggaggactcgactcactggtgcgcgatttaggtccggaggaggcgttgtgaggtgagctttttcagaagcgcgatcccaggacacgtcgggaagcaagcatccccagagctgcttggaaagaggaccaaagacgtctaaaaagtcatttggaaatatctctaaatatttgttaccatgtataagctgctaaagagaaattgggcccaacaaaactaattgaataattgaggcagatttgtgtgtatcatcaaattctatccagaagttgaagaatctgaatttaaagattgtgtgcatttaataagaggatgacctttcagtttaatttcactatagaagaccatctggaaaatgaattaacacccattagagatggagctttgaccctggattcctcaaaagagctgtcagtctcagaaagtcaaaaaggagaagagagggacagaaaatgttctgcagaacaatttgacttgcctcaggatcacttgtgggaacataagtcaatggaaaatgcagctccctctcaagacacagacagtccactcagtgcagccagcagttcaaggaacttggagccacatggaaaacagccctccttgagagctgccaaagagcatgctatgcctaaagatttaaagaagatgttagaaaataaagtcatagaaacatta

SEQ ID NO: 378328 - DNA, 1433 bp, Homo sapiens
gaggaaagaggcgcgttcctagccgcgggactgggtgacccgcctctcccccaaattagctgcttggaaagaggaccaaagacgtctaaaaagtcatttggaaatatctctaaatatttgttaccatgtataagctgctaaagagaaattgggcccaacaaaactaattgaataattgaggcagatttgtgtgtatcatcaaattctatccagaagttgaagaatctgaatttaaagattgtgtgcatttaataagaggatgacctttcagtttaatttcactatagaagaccatctggaaaatgaattaacacccattagagatggagctttgaccctggattcctcaaaagagctgtcagtctcagaaagtcaaaaaggagaagagagggacagaaaatgttctgcagaacaatttgacttgcctcaggatcacttgtgggaacataagtcaatggaaaatgcagctccctctcaagacacagacagtccactcagtgcagccagcagttcaaggaacttggagccacatggaaaacagccctccttgagagctgccaaagagcatgctatgcctaaagatttaaagaagatgttagaaaataaagtcatagaaacattaccaggtttccagcatgttaagttatcagtagtgaaaaccatcttgttgaaagagaacttccctggagaaaacatagtttcaaaaagcttttcttctcactctgatctgattacaggtgtttatgagggaggcttaaaaatctgggaatgtacctttgacctcctggcttatttcacaaaggccaaagtgaaatttgctgggaaaaaagtcttggatcttggttgtggatcaggtttactaggtataactgcattcaagggagggtccaaagaaattcactttcaagattataacagtatggtgattgatgaagtaaccttacctaatgtagtagctaactccactttggaagatgaagaaaatgatgtaaatgagccagatgtgaaaagatgcaggaaaccaaaagtaacacaactatataaatgccgatttttttctggtgagtggtctgagttttgtaagcttgtactaagtagtgaaaaactttttgtaaaatatgatctcattctcacctcagaaaccatttacaacccagattattatagtaatttgcaccagactttccttagactgttaagtaaaaatggacgtgtacttttggccagcaaagcacattattttggtgtaggtggaggtgttcatctctttcagaagtttgtagaagaaagagatgtttttaagaccagaatactcaaaataattgatgaaggattgaagaggttcataattgaaataacttttaagtttcctggttaattaacattcactgagtatccaaaatgaaataaacagaaggaccaaaaaaaaaaat

SEQ ID NO: 378329 - DNA, 1544 bp, Homo sapiens
gtccctcaaggccggaaagaaagtcgggcttctctagcccctggaggactcgactcactggtgcgcgatttaggtccggaggaggcgttgtgaggtgagctttttcagaagcgcgatcccaggacacgtcgggaagcaagcatccccagagctgcttggaaagaggaccaaagacgtctaaaaagtcatttggaaatatctctaaatatttgttaccatgtataagctgctaaagagaaattgggcccaacaaaactaattgaataattgaggcagatttgtgtgtatcatcaaattctatccagaagttgaagaatctgaatttaaagattgtgtgcatttaataagaggatgacctttcagtttaatttcactatagaagaccatctggaaaatgaattaacacccattagagatggagctttgaccctggattcctcaaaagagctgtcagtctcagaaagtcaaaaaggagaagagagggacagaaaatgttctgcagaacaatttgacttgcctcaggatcacttgtgggaacataagtcaatggaaaatgcagctccctctcaagacacagacagtccactcagtgcagccagcagttcaaggaacttggagccacatggaaaacagccctccttgagagctgccaaagagcatgctatgcctaaagatttaaagaagatgttagaaaataaagtcatagaaacattaccaggtttccagcatgttaagttatcagtagtgaaaaccatcttgttgaaagagaacttccctggagaaaacatagtttcaaaaagcttttcttctcactctgatctgattacaggtgtttatgagggaggcttaaaaatctgggaatgtacctttgacctcctggcttatttcacaaaggccaaagtgaaatttgctgggaaaaaagtcttggatcttggttgtggatcaggtttactaggtataactgcattcaagggagggtccaaagaaattcactttcaagattataacagtatggtgattgatgaagtaaccttacctaatgtagtagctaactccactttggaagatgaagaaaatgatgtaaatgagccagatgtgaaaagatgcaggaaaccaaaagtaacacaactatataaatgccgatttttttctggtgagtggtctgagttttgtaagcttgtactaagtagtgaaaaactttttgtaaaatatgatctcattctcacctcagaaaccatttacaacccagattattatagtaatttgcaccagactttccttagactgttaagtaaaaatggacgtgtacttttggccagcaaagcacacgtccaaagaaattcactttcaagattataacagtatggtgattgatgaagtaaccttacctaatgtagtagctaactccactttggaagatgaagaaaatgatgtaaatgagccagatgtgaaaagatgcaggaaaccaaaagtaacacaactatataaatgccgatttttttctggtgagtggtctgagttttgtaagcttgtactaagtagtg

SEQ ID NO: 378330 - DNA, 424 bp, Homo sapiens
gtttcaccatgttggccaggatggtctcaatctcctgacttcatgatccaccagccttggcctcccaaagtgctgggattacaggcgtgagccaccacgcccggcctagttttaaaatgtttaattgtgaagttgaaacttttgttggtgtgcgcgatgactgcaaatctattgtcttttgccttccaagcatagttctacttttccaagagccatgcaaaataagccttcatatgcttttgagtctatgtggttttttcacgaagagaattcattgctagagaatctgtaaatcttttatggcatattttaaaaaataaaataatggaattaagtagaaactgtaaacgtttctactttatttaattgatataggattatattcttagatttattttgttgttctttttaaatgttagcaaca

SEQ ID NO: 378331 - DNA, 383 bp, Homo sapiens
gagatccttgagaaaaagtgaaaacaccctgcagtaataaaaagctgaacttaggaactgtacatttacatgatggaagatgaaaacccagggtttggttagagtctagaagcaattatggctcttcttctctctcaacatcttgtttgttttgctttgttaatgtaaagcaagcacctctgttacttcttattttaaaccacttctctatatactcactgtaagcaaacattcagggctgaggtaggagatagggactttccaagtaaaactgtgtagtgctacaaggaataaaaacaagtgcacagacattttgtacactttatttttgattaacagtgagaaaaaatgcaatagtgtcatagttttttgtaggcagtctc

SEQ ID NO: 378332 - DNA, 327 bp, Homo sapiens
tggagagacgaagtctcactatgttgctcaggctgatctcaaaatcctgggctcaagcagtcctcccacctcggactcccaaaatgttgagattacaggtgtgagccactgtgccaagctatctttgttttacttgtgtctttattctggccactgtaagtaatagcgaatgccagattgtgttgcctgagtgtgctgtcgtacagactaggaccgagtctaacacgtcctgacacagccaagcagaatgaaaatgcacgaggcaaaaacaatggcagtcagagctttagaaagccagagagcaaccatcttattaataacgagact

SEQ ID NO: 378333 - DNA, 346 bp, Homo sapiens
tggtaaaacccaaatcatatccagaatcctagttgcaagagtatgggaaaggtaattttatgttccagcctctgaagaaagaatagcatacgagactaacatgagatggagctataccccactggctacttaacacccagcacaaccttctacccacacttaacaccactagcaacagcaatgtgctcctacctaatgtgacaacactatgtttcacacctatgaaaacaatctcatcttcccctgtgaggagaagacccaaaattccatcagtaactgcatccatccagtcaccactgggtgacactcaattctttcctagttcagtcaccatactatttggaca

SEQ ID NO: 378334 - DNA, 309 bp, Homo sapiens
aacagcttcatgacattggatttagcaagatttcttggatatgactctaaaggcacaggcaacaaaattagaaatagataaattggactacatcaaaatttaaaactttggtgcatcaaaagacaccatcaacagagtgaaagggcaacccacagaatggaataatatatttacaaatcatatatctgataagagattaagatctagaacatataggccgggcactgtggctcacacctgtaatcccagcactttgggaggctgaggtgggtggatcacctgcggtcaggagttcgagaccagcctggc

SEQ ID NO: 378335 - DNA, 311 bp, Homo sapiens
gtcctacaggcctcagcctattttttgttcctcagaggagacttttatgactgctgtattataaatagatctcccagtttctcttattctctttcttagtcttttatttgttgctttcattatacatattagaatttgtaatcattttacttatttctgtttacttgtatacttaaaaatctattttccccactagaatgtaaactccatgaggtcagggccatgtctattttgtcaccattgattccctgtgcctaacagtgcctggcagagcaggcagccatcagcctggcaggatgtttgattgattg

SEQ ID NO: 378336 - DNA, 327 bp, Homo sapiens
gaccaacatgggtgtatgcaaacatgtatcagggtttgtcaagctcatcattactggtatcgtgagctgaatgattttttgttgcagaggactgtcctatgtgatgcaggacatttagcagcattcctggtctccagacattatcaaatgttctggggctgtggggtgggagatcactcttggttgataaccactgataaactacaacaaatatatttaatttccccttcaaattctttgaggacaaagactatgaccttgcttattttatattctcgatattaccaaatatagcagtttatgacagatttagataaatatttgttt

SEQ ID NO: 378337 - DNA, 811 bp, Homo sapiens
actagcagattttccatgaaaataccatcgtaaagaattgtacatccagaatatgacgaaaatgttttgttctcagatgtcagtaacattaaccagacatttaaaaagagaagcacttgatgaacaccacaccaatagtactatccattattatcagattcctttacagtcttggactgccgatctttttttctcctataacatcatattagaaaaaaataacagcatagtgatgctgagttttttaaaaatgagattactggaaaaatgcaaatgtttttatggtagaactgaagtcataaatgacattattttttgaatgagacttttagctttttcagacccaattaatttaatttccttttaaaaaggcccttcctgtagtcctccaggacaactgagataagcttgggtgttcccgccattattcccctggattaatgtggggccctagaggtgaggcttattcagacaccatccctcaagtagactgggcccagtgcagttcaaagcaagcattttcatttgtttcatttttcctatttagaaatggcatttgagttttataactaatacggaatactggcattaatgagtagcaacaccaaagatctgccaaaggtacaaatataatttaagcagttaaaagagttagcttttcagaagctgtaagattgtttatttcattatttttaatgtgcttgcaaaccccataagcagcgggcctcacttgccaaggacagtagatctataccttggtcaaacagaccttccagccagcacctcttcttgtcatcattcaatattacca

SEQ ID NO: 378338 - DNA, 321 bp, Homo sapiens
ggtgataataaccattaccatctgtgagatgtccttagggtaccaagagttttatagaacctataacatggcaaattcctactcacagtcttattcaaaaacatattattctataccctatcacttttaatggtgaaacaataactcaatttcgcaaaatattttatccccaactctttacctttgtcatccactaaggtttttagtttttaaaattaatgacttcaatctttattttaataacatttttattataaaaactctaactccgagaaatggttataaacttacacttttcctaataggaatgtaagtttctca

SEQ ID NO: 378339 - DNA, 394 bp, Homo sapiens
tttcaagaaagcaggctaattattttgtagaaggcccctcagtttgggtttctctgtttccttatgattagattcagattatgcctttataataggaatctgacagaagttatgctgtattcttctcagtatgacatatgagacagtatgtgatgttactttgtctcatttctagtgatgttactttgactaatatcagatttgttgtttctcagattcttccactataaagttattatttttacctttgtaatgcattattttgtgggggaaaagctttgacactatgtaaatgttccattcctcaataaaccttcacctacttgttttagcatccattggtgttctgtgtctgaatccatcattatcctgacagttgccaagtggtgatatt

SEQ ID NO: 378340 - DNA, 382 bp, Homo sapiens
gatggctggtggcctgtgcgccaacccacacctctgtactacaacctaagatttggcatcttaggttgcaggactcctccctggagtctccctacccagactgggggcattggcagggcagagccagggcctccatccagaagtgatggccctgctccttcccactggccaatagacagctgctgtggcctgactccaagccatctcccctacccctggcctgagggtccttacaggcaaaatgaagggtttggaggagatggcccggtgctgacaagctgtgactcaatttaggccttgaaagccagcactgtattctccatgcccctaccctgctgcggggtcggggaagtgtggaccgagatggaagtgccgctggact

SEQ ID NO: 378341 - DNA, 463 bp, Homo sapiens
accaactaccagagcccggtgtgggtacagacgcccagcaccaaggtggtgtcgccggggcccgagaacaagtacgacccggagaaggacaagaccaacttcaccgtctacatcacctgcggggtgatcgccttcgtcatcgtggccggcgtcttcgccaaggtctcctacgacaaggcccaccgccctccacgggagatgaacatccacagggctctggctgacatcttaagacaacagggaccaatccccatagcacactgtgaaagagaaactatctcggctatcgatacctctcccaaagagaacacaccggtcagatcgtcctccaaaaaccactacactcctgtgcgtacggccaagcagactccaggacgacttcaataggtatcttctcagttcaaggatgttcacttacataaacctggtaattgtatcatagttagtcgacgcggccgcgaat

SEQ ID NO: 378342 - DNA, 743 bp, Homo sapiens
cactctaccaccatgaatccactcctgatccttacctttgtggcagctgctcgtgtccctgaattctggctaccacttctgtggtggctccctcatcaacgaacagtgggtggtatcagcaggccactgctacaagtcccgcatccaggtgagactgggagagcacaacatcgaagtcctggaggggaatgagcagttcatcaatgcagccaagatcatccgccacccccaatacgacaggaagactctgaacaatgacatcatgttaatcaagctctcctcacgtgcagtaatcaacgcccgcgtgtccaccatctctctgcccaccgcccctccagccactggcacgaagtgcctcatctctggctggggcaacactgcgagctctggcgccgactacccagacgagctgcagtgcctggacgctcctgtgctgagccaggctaagtgtgaagcctcctaccctggaaagattaccagcaacatgttctgtgtgggcttccttgagggaggcaaggattcatgtcagggtgattctggtggccctgtggtctgcaatggacagctccaaggagttgtctcctggggtgatggctgtgcccagaagaacaagcctggagtctacaccaaggtctacaactatgtgaaatggattaagaacaccatagctgccaacagctaaagcccccagtatctcttcagtctctataccaataaagtgaccctgttctcactgtcagtgt

SEQ ID NO: 378343 - DNA, 714 bp, Homo sapiens
aggagaattctgtcccctaccaggtgtccctgaattctggctaccacttctgtggtggctccctcatcaacgaacagtgggtggtatcagcaggccactgctacaagtcccgcatccaggtgagactgggagagcacaacatcgaagtcctggaggggaatgagcagttcatcaatgcagccaagatcatccgccacccccaatacgacaggaagactctgaacaatgacatcatgttaatcaagctctcctcacgtgcagtaatcaacgcccgcgtgtccaccatctctctgcccaccgcccctccagccactggcacgaagtgcctcatctctggctggggcaacactgcgagctctggcgccgactacccagacgagctgcagtgcctggacgctcctgtgctgagccaggctaagtgtgaagcctcctaccctggaaagattaccagcaacatgttctgtgtgggcttccttgagggaggcaaggattcatgtcagggtgattctggtggccctgtggtctgcaatggacagctccaaggagttgtctcctggggtgatggctgtgcccagaagaacaagcctggagtctacaccaaggtctacaactatgtgaaatggattaagaacaccatagctgccaacagctaaagcccccagtatctcttcagtctctataccaataaagtgaccctgttctcactgtcagtgt

SEQ ID NO: 378344 - DNA, 585 bp, Homo sapiens
cactctaccaccatgaatccactcctgatccttacctttgtggcagctgctcgtgtccctgaattctggctaccacttctgtggtggctccctcatcaacgaacagtgggtggtatcagcaggccactgctacaagtcccgcatccaggtgagactgggagagcacaacatcgaagtcctggaggggaatgagcagttcatcaatgcagccaagatcatccgccacccccaatacgacaggaagactctgaacaatgacatcatgttaatcaagctctcctcacgtgcagtaatcaacgcccgcgtgtccaccatctctctgcccaccgcccctccagccactggcacgaagtgcctcatctctggctggggcaacactgcgagctctggcgccgactacccagacgagctgcagtgcctggacgctcctgtgctgagccaggctaagtgtgaagcctggagtctacaccaaggtctacaactatgtgaaatggattaagaacaccatagctgccaacagctaaagcccccagtatctcttcagtctctataccaataaagtgaccctgttctcactgtcagtgt

SEQ ID NO: 378345 - DNA, 719 bp, Homo sapiens
cactctaccaccatgaatccactcctgatccttacctttgtggcagctgctcgtgtccctgaattctggctaccacttctgtggtggctccctcatcaacgaacagtgggtggtatcagcaggccactgctacaagtcccgcatccaggtgagactgggagagcacaacatcgaagtcctggaggggaatgagcagttcatcaatgcagccaagatcatccgccacccccaatacgacaggaagactctgaacaatgacatcatgttaatcaaggcccgcgtgtccaccatctctctgcccaccgcccctccagccactggcacgaagtgcctcatctctggctggggcaacactgcgagctctggcgccgactacccagacgagctgcagtgcctggacgctcctgtgctgagccaggctaagtgtgaagcctcctaccctggaaagattaccagcaacatgttctgtgtgggcttccttgagggaggcaaggattcatgtcagggtgattctggtggccctgtggtctgcaatggacagctccaaggagttgtctcctggggtgatggctgtgcccagaagaacaagcctggagtctacaccaaggtctacaactatgtgaaatggattaagaacaccatagctgccaacagctaaagcccccagtatctcttcagtctctataccaataaagtgaccctgttctcactgtcagtgt

SEQ ID NO: 378346 - DNA, 1036 bp, Homo sapiens
tcttcatcattgcattaccatcacccaacactatcaggggacctgccctgataatcagtctacagttgtatccagcagctccagagagacagcgaccagcaagaaggggccatgatgatggtggtggttttttcaaaacgaaaagggggatatgtagggaaaagaaagagagatcagactcttacagactcttactgtgtctacatagaaagggaagacataagagactccatttggaaaaagacctgtactttaaacaattgctttgctgagatgttgttaatctgtagctttgccccagccactttgccccaaccactttgacccagtctggagctcacaaaaacatgtgttgtatgaaatcaaggtttaaggcatgtagggctgtgcaggatgtgccttgttaaccaaatgtttgcaagcagtatacttggtaaaagtcatcaccattctcttgtctcaataaaccaggggcacaatgcactgtggaaagccgcagggacctctgcccttgaaagctgggtattattcaaagtttccccccatgtgatagtctgaaatatggcctcgtgggatgagaaaggcctgacggtcccctagcccgacacccataaaaggtctgtgctgaggtggattagtcaaagaggaaagactcttgcatttgagatagaggaaggccactgtctcctgcctgcccctgggaactgaatgtctcggtataaaacacgattgtacatttgttcaattctgagatgggagaaaaaccgccctatggtgggaggtgagacatgtttacagcaatactgccttgatattctttactccactgagatgtttgggtggagagaaacataaatctggcttacatgcacgttcagtcatagtaccttcccttgaacttcattatgacatagattctattgctcacatgtttgttgctgaccttcttattatcaccctgccctcctactacattcctttttgctgaaataataaagatagtattcaataaaaactgagggaactcagagaccgg

SEQ ID NO: 378347 - DNA, 1058 bp, Homo sapiens
acccactagacatttgaaattctacaatgaactcatcagggatgcaaatgaaagtgcctctgcagagacagaaaacccgcaatcgagcatcatcgactcgcagggtgaacaaaatggtgatatcagaagaacagatgaagttacaatccaccaaggaaactgcacatgtggagagtcagggagaggaagagaaagaaaaactcttacagactcttactgtgtctacatagaaagggaagacataagagactccatttggaaaaagacctgtactttaaacaattgctttgctgagatgttgttaatctgtagctttgccccagccactttgccccaaccactttgacccagtctggagctcacaaaaacatgtgttgtatgaaatcaaggtttaaggcatgtagggctgtgcaggatgtgccttgttaaccaaatgtttgcaagcagtatacttggtaaaagtcatcaccattctcttgtctcaataaaccaggggcacaatgcactgtggaaagccgcagggacctctgcccttgaaagctgggtattattcaaagtttccccccatgtgatagtctgaaatatggcctcgtgggatgagaaaggcctgacggtcccctagcccgacacccataaaaggtctgtgctgaggtggattagtcaaagaggaaagactcttgcatttgagatagaggaaggccactgtctcctgcctgcccctgggaactgaatgtctcggtataaaacacgattgtacatttgttcaattctgagatgggagaaaaaccgccctatggtgggaggtgagacatgtttacagcaatactgccttgatattctttactccactgagatgtttgggtggagagaaacataaatctggcttacatgcacgttcagtcatagtaccttcccttgaacttcattatgacatagattctattgctcacatgtttgttgctgaccttcttattatcaccctgccctcctactacattcctttttgctgaaataataaagatagtattcaataaaaactgagggaactcagagaccgg

SEQ ID NO: 378348 - DNA, 287 bp, Homo sapiens
tgatagatcaaaggaaaatgatccaacctaaacaacagagagataaactatgaaaaaattgaacaccaccttagaaacttataggcagtaacaaaacattgaacatgtagaatcccagaagagaaggaagcttgtgatactgaaaaaacatttgatgaaataaggactgaaatgttccaagttttatatacacataagcctacagactcaataatgtcaaagaacccccaataggataaacccaaagaaatcaatgcccagacacattatagtcaaatctgaaatct

SEQ ID NO: 378349 - DNA, 452 bp, Homo sapiens
aaaaatttattttttgccttttatttgagatgaggtagaaggctttcacgtattatggattcacattctttgttgaatatatgcattatgaatattttctcctagtttgtgacttggctattaattttcttaagcccttcaatgagcaggcatttttaaattttgggaggctaacttaacttttttattcttttataatcattgctttttgtgtcttacctaaaaaaatctttgcctgtaccaagatattcttgtatgttttcttctacaaatttcatagttttaacttttacatgtaggattatgatgtatctgaaattaatttttgtgtacagtatgaagtaaaggttaaaatttatttcatttttatatatttacacagttgttacagaaagttgcagaaaatatttacttttcctcatcaaattgctgtgaatgacctttattgaaca

SEQ ID NO: 378350 - DNA, 1365 bp, Homo sapiens
gcaacctaagtagctggaactagaggcatgcacattatgccccactagtttttaaattttttgtagagacagagtctcattatgttgcccttgctagtctccaactcctgggctcaagcaatctttctgcctcggcctcccaaagggctgggattataggcatgagctgggcaccaggccacaaaattgattttagaaaaattaaaatagtgtgcttgtgaatatgggaaaccagcactcattggtggttacatcagtttggagacccctttggatagcagtttttcaatgtgtattaagaaccctcaaagagaacaaaaaacacctaaacagcctttaactagtaacttttttcattctgagaacttgattccaacaagaaaaatccaaaagaggaaaaaggctttaagaaaagacatctttagagacactgttggtaatgttaaaatgtccgaataacccaaatgctcagcaactagagaacagtaacatgaattgcggtcgatgttctccagcctttgaagctagaggctaagaacaccacaagagaacacaaatatgctgaggaggcaacgctaagtgaataccggcgggtggcagactgcagacactgtcaacccggcatgtgccagacacaggagactttccaataggaagatagaaatgcatgataaacacagatctgatttctaacataaaaatatacctctatcttctccaaagaattctctttcaaatatatgttagtataacctttcttagtacttaagagttacttctaggaatctccctgaaggacatgatttctcattcaaacagatttaggtgcagggatgcttattacagtctcattcattatggttaaacaactggaaatgcctagatatccaggaataggggaatgataaagtatgcttgagctatacagtaagacattatatgactattgaaaagtttcttgaagaattttaactggggaaatgatcatgacataatgttaaaaaattactactacacgaaaggtatatcaaatatctaagtatgttatttatatacagaaacatggtgaaaatataccacagtggtagaagtttaggttgtgaagacatttttttccttatacatttctgaattgttccaagttaaaacaaaacaaaacacaaaacaaaaaaaccccacatactattttttttttttttttaaagctctgtcacccaggctggagtgcagtggcatgatcaatgctcacagcaaccctaaactcctgggttcaggcaatcctcctgcctcagcctcctgagtagctaggactacagttgcatgccaccatgcctggctaattttcaaaattttttgtagagaggg

SEQ ID NO: 378351 - DNA, 514 bp, Homo sapiens
agcgctcagctcctgcgccccgaccccgccatggccccccggcccctcctgctgctgctgctgctcctcgggggctccgccgcgcgccccgcgccccccagggcccggcgacactcagacgggacgttcaccagcgagctcagccgcctgcgggagggcgcgcggctccagcggctgctacagggcctggtggggaagcgcagcgagcaggacgcagagaacagcatggcctggaccaggctcagcgcgggtctgctctgcccgtcagggtccaacatgcccatcctgcaggcctggatgcccctggacgggacctggtctccctggctgccccctgggcctatggtttcagaaccagctggcgctgctgcagaaggaaccttgcggcccagatgaggaaggaaccccctcaccacctgcccggcccaggagcgcagctgcatttggggtggggggcaggatgggggagagggggaggggtggtacttggcaccaataaaggaggaatcagacc

SEQ ID NO: 378352 - DNA, 3303 bp, Homo sapiens
cgaggtgctgcgggtgcaggacaagtacttccacatcaagtgcttcgtctgtaaagcatgtggctgcgacctggccgagggcggcttcttcgtgcggcagggcgagtacatctgcacgctggactaccagaggctctacggcacccgctgcttcagctgcgaccagttcattgagggtgaggtggtgtcggcgctgggcaagacctaccaccccgactgcttcgtgtgtgccgtctgccggctgcccttcccccccggggaccgagtgaccttcaacgggaaggaatgcatgtgccagaagtgttccctgcccgtatcggtgggcagcagcgcgcacctgtcccagggcctccgaagttgtgggggctgcggcacagaaatcaagaatggccaggccctggtagccttggacaagcactggcacttgggctgttttaagtgcaagagctgtgggaagctcctgaatgccgagtacatcagcaaggatgggctgccctactgcgaagctgactatcacgccaagttcggcatccgctgtgacagctgtgagaaatacatcacggggcgcgtgctggaggccggagagaagcactaccacccttcctgcgcgctatgtgtcaggtgcggccagatgtttgcagaaggcgaagagatgtatcttcaaggttcctccatctggcatccggcgtgtcgacaagcagccagaactgaagacagaaacaaggaaaccagaacttcctcagagagcatcatttctgtccctgcttccagcacctcagggtctccgagccgtgtgatttatgccaagcttggtggtgagatcctggactacagggacttggcagcccttcctaaaagtaaggccatctatgacatcgaccgccccgacatgatctcctactcaccctacatcagccactctgcaggggacaggcagagctacggcgagggggatcaggatgaccggtcctacaagcagtgccggacctccagcccaagctccactgggtcggttagcctcgggcgctacactccgacctcacggtcaccacagcactacagccgtccaggcagtgaaagtggccggagcacccccagcctctccgtgctctctgacagcaagccgcccccctccacctaccagcaggcacctcgccacttccacgtcccagacactggcgtaaaagataacatctataggaaaccccctatctacagacagcatgctgccaggcgatcggatggggaggatggaagcttggaccaggataacaggaagaagagcagctggctgatgctcaagggggatgcagacacaaggaccaattctccagacctggacacccagtccttgtcccacagcagcgggaccgacagagaccctctccaaaggatggcaggggacagctttcactcacaatacaagatctatccgtatgactccctcatcgtcacaaaccgaattcgcgtgaaactgcccaaagacgtggaccggacgagactggagagacacttgtcgcccgaggagttccaggaagtgtttgggatgagcatcgaggagtttgaccgcctggccctctggaagaggaatgaccttaagaagaaagcccttttgttctgacggctgccagcctgccccactggtgtgtgccgggcgccgaggccaggggcccctggcgagaaccgcacacacccctcccacacaccttgctctggcttctctgtgtccatggggtgggcgggagggggtcccccagcaggtgcggcccctgcacctgccggcgacactcctgccggtagtttagggccgagacggctagcttcacgccacccttccccgctgtggcttggtgtcagggagaggctgtagagtggctgtgtcgggcatcagatggagcacacaggtggctgcagcccagcccaccttcccagcgttctcgaggtgccctggccccggtgctgggcacgtgggggacagaggtggccgggacgtgagctgtgaggcttgttgatgacgggtgctgacaccatcatcgggggtgggcacacggcccttcggagcctgggcagcctggcctcacaggcagactcgcagacggggcagtgagcgtctgggacagtgccaagagtggggtgtgtgatttttgcaggcgtctgtgatgggtctctttagggacaaatgtcaacaagggacaagacagggcaccttccgccagcgcccctccatgcgctgcgttcctcctccagatcgacccctagatgcctacacaatatctttaaagtaacacagaagtttttattttattaaaaagtatagcctacttaaacgcgagatgacatatatagagtttaattttacggtccctccgcaggggagcggcctccagccttattctccaccgctcggatctgtgtggtttcagtctgttcttggtgtggtcctcatacacagagctccctgtctagtttcttttctttttcttttttctttttctcgtcacacaggtaaccttaaagacagacccctctaaagaacgctttgtaaatacatgtgaggtatagccaccactgttttccttgctgttatttttccaagtcttggggagaaaacatcctcctctgatggccaaagccctggaatcaagggtttccacgtaccctgcctaatacccgacgtagctcttgatgcaccgtccttgtgctgtggctggcggtgtctcagcctgaaacataaaccccacatgccccaggagcgatgtgctccctgaaacagacaaccacacgctgttggggagagaaggatggagataggatggagataggatggagatgtggctcttctcatctttgaagccagcagggcatcccggagcaggaggctggccgggctccccaagcgaaggcgttggtgtctgtcattaggtgtgtgttagggtgcagcaccggccgtcacaggatgctgataagcgcgctgagaggtggatgaaacaccaaagtctgtttccccgtccgcagtgggtgttgcctctttgtgtgtgtcccgatgttcctgcctgtgagtcggccttactccgtttccttagcgcccatgacacgccaagtcccgtttcgcactcggcttctcacccgcccagctcggctagggagggggagtttttagcacctaatatgcttcctgccattgcgcaatctgagcctgagcaactggaaacccccatttctcattagtgcaatgtcatatctgatcccaggaagcctggaaaataaaagacgatgcattataacttgcggaagtacaagaaa

SEQ ID NO: 378353 - DNA, 771 bp, Homo sapiens
tgcggccgccccaacatcagaatggtaacaccaccactgttttccttgctgttatttttccaagtcttggggagaaaacatcctcctctgatggccaaagccctggaatcaagggtttccacgtaccctgcctaatacccgacgtagctcttgatgcaccgtccttgtgctgtggctggcggtgtctcagcctgaaacataaaccccacatgccccaggagcgatgtgctccctgaaacagacaaccacacgctgttggggagagaaggatggagataggatggagataggatggagatgtggctcttctcatctttgaagccagcagggcatcccggagcaggaggctggccgggctccccaagcgaaggcgttggtgtctgtcattaggtgtgtgttagggtgcagcaccggccgtcacaggatgctgataagcgcgctgagaggtggatgaaacaccaaagtctgtttccccgtccgcagtgggtgttgcctctttgtgtgtgtcccgatgttcctgcctgtgagtcggccttactccgtttccttagcgcccatgacacgccaagtcccgtttcgcactcggcttctcacccgcccagctcggctagggagggggagtttttagcacctaatatgcttcctgccattgcgcaatctgagcctgagcaactggaaacccccatttctcattagtgcaatgtcatatctgatcccaggaagcctggaaaataaaagacgatgcattataacttgcggaagtacaagaaa

SEQ ID NO: 378354 - DNA, 532 bp, Homo sapiens
aagactgaatcaggagtgattttcaaatgtagagaaaactccagataatgctgtttgcttccggccgctgtaaatcataggtgaaaaccagtagcaagtgctcactcagtgcctcccagaagcggtctgcgggtctcagctgggctgggggcagttttcattgggcaaggcttgggcttagcttcgaagcaggggctgggagaggatggatgggggtgtgagagcagaagaaagacctggctttgcagtgaggcagtcccaagttcaaatctgagctcaccactgacccgtcgtgtgatgggcgccaggtgttaggagactggaactgggtatgtgtgtggcattcggccggccatagtagctgctcagtaaacagaaactgtttctcatcctcatcctcatcctcatgcctgcaaactgtaaaccgtcctacttaacaatgaaagtagaaaagtgtttcaatgtgacaggaaagagtgaagacacagaagcttggaaatgatgatgtgttaaagaatcactttaaacaaaa

SEQ ID NO: 378355 - DNA, 3180 bp, Homo sapiens
cgaggtgctgcgggtgcaggacaagtacttccacatcaagtgcttcgtctgtaaagcatgtggctgcgacctggccgagggcggcttcttcgtgcggcagggcgagtacatctgcacgctggactaccagaggctctacggcacccgctgcttcagctgcgaccagttcattgagggtgaggtggtgtcggcgctgggcaagacctaccaccccgactgcttcgtgtgtgccgtctgccggctgcccttcccccccggggaccgagtgaccttcaacgggaaggaatgcatgtgccagaagtgttccctgcccgtatcggtgggcagcagcgcgcacctgtcccagggcctccgaagttgtgggggctgcggcacagaaatcaagaatggccaggccctggtagccttggacaagcactggcacttgggctgttttaagtgcaagagctgtgggaagctcctgaatgccgagtacatcagcaaggatgggctgccctactgcgaagctgactatcacgccaagttcggcatccgctgtgacagctgtgagaaatacatcacggggcgcgtgctggaggccggagagaagcactaccacccttcctgcgcgctatgtgtcaggtgcggccagatgtttgcagaaggcgaagagatgtatcttcaaggttcctccatctggcatccggcgtgtcgacaagcagccagaactgaagacagaaacaaggaaaccagaacttcctcagagagcatcatttctgtccctgcttccagcacctcagggtctccgagccgtgtgatttatgccaagcttggtggtgagatcctggactacagggacttggcagcccttcctaaaagtaaggccatctatgacatcgaccgccccgacatgatctcctactcaccctacatcagccactctgcaggggacaggcagagctacggcgagtcccctcagttgctctcgccaacgccgaccgagggggatcaggatgaccggtcctacaagcagtgccggacctccagcccaagctccactgggtcggttagcctcgggcgctacactccgacctcacggtcaccacagcactacagccgtccagctgccaggcgatcggatggggaggatggaagcttggaccaggataacaggaagaagagcagctggctgatgctcaagggggatgcagacacaaggaccaattctccagacctggacacccagtccttgtcccacagcagcgggaccgacagagaccctctccaaaggatggcaggggacagctttcactcacaatacaagatctatccgtatgactccctcatcgtcacaaaccgaattcgcgtgaaactgcccaaagacgtggaccggacgagactggagagacacttgtcgcccgaggagttccaggaagtgtttgggatgagcatcgaggagtttgaccgcctggccctctggaagaggaatgaccttaagaagaaagcccttttgttctgacggctgccagcctgccccactggtgtgtgccgggcgccgaggccaggggcccctggcgagaaccgcacacacccctcccacacaccttgctctggcttctctgtgtccatggggtgggcgggagggggtcccccagcaggtgcggcccctgcacctgccggcgacactcctgccggtagtttagggccgagacggctagcttcacgccacccttccccgctgtggcttggtgtcagggagaggctgtagagtggctgtgtcgggcatcagatggagcacacaggtggctgcagcccagcccaccttcccagcgttctcgaggtgccctggccccggtgctgggcacgtgggggacagaggtggccgggacgtgagctgtgaggcttgttgatgacgggtgctgacaccatcatcgggggtgggcacacggcccttcggagcctgggcagcctggcctcacaggcagactcgcagacggggcagtgagcgtctgggacagtgccaagagtggggtgtgtgatttttgcaggcgtctgtgatgggtctctttagggacaaatgtcaacaagggacaagacagggcaccttccgccagcgcccctccatgcgctgcgttcctcctccagatcgacccctagatgcctacacaatatctttaaagtaacacagaagtttttattttattaaaaagtatagcctacttaaacgcgagatgacatatatagagtttaattttacggtccctccgcaggggagcggcctccagccttattctccaccgctcggatctgtgtggtttcagtctgttcttggtgtggtcctcatacacagagctccctgtctagtttcttttctttttcttttttctttttctcgtcacacaggtaaccttaaagacagacccctctaaagaacgctttgtaaatacatgtgaggtatagccaccactgttttccttgctgttatttttccaagtcttggggagaaaacatcctcctctgatggccaaagccctggaatcaagggtttccacgtaccctgcctaatacccgacgtagctcttgatgcaccgtccttgtgctgtggctggcggtgtctcagcctgaaacataaaccccacatgccccaggagcgatgtgctccctgaaacagacaaccacacgctgttggggagagaaggatggagataggatggagataggatggagatgtggctcttctcatctttgaagccagcagggcatcccggagcaggaggctggccgggctccccaagcgaaggcgttggtgtctgtcattaggtgtgtgttagggtgcagcaccggccgtcacaggatgctgataagcgcgctgagaggtggatgaaacaccaaagtctgtttccccgtccgcagtgggtgttgcctctttgtgtgtgtcccgatgttcctgcctgtgagtcggccttactccgtttccttagcgcccatgacacgccaagtcccgtttcgcactcggcttctcacccgcccagctcggctagggagggggagtttttagcacctaatatgcttcctgccattgcgcaatctgagcctgagcaactggaaacccccatttctcattagtgcaatgtcatatctgatcccaggaagcctggaaaataaaagacgatgcattataacttgcggaagtacaagaaa

SEQ ID NO: 378356 - DNA, 2815 bp, Homo sapiens
tgcgggcggggacaagcctggctccgcagaaggggagctgccgccgccgcggtggcactgcctgatgctcggcccagtgtgccggtgccccgctgggtgacagtggactcccagggcgcagcaggagcaggtgacagactgttggctgaaggtgagggtgtccaccctcgcaggcacacgttccagggagcacggcactcaagcagggccgtcagactgggctctggtgcccagaagctgtgcaggccggagagaagcactaccacccttcctgcgcgctatgtgtcaggtgcggccagatgtttgcagaaggcgaagagatgtatcttcaaggttcctccatctggcatccggcgtgtcgacaagcagccagaactgaagacagaaacaaggaaaccagaacttcctcagagagcatcatttctgtccctgcttccagcacctcagggtctccgagccgtgtgatttatgccaagcttggtggtgagatcctggactacagggacttggcagcccttcctaaaagtaaggccatctatgacatcgaccgccccgacatgatctcctactcaccctacatcagccactctgcaggggacaggcagagctacggcgagggggatcaggatgaccggtcctacaagcagtgccggacctccagcccaagctccactgggtcggttagcctcgggcgctacactccgacctcacggtcaccacagcactacagccgtccagctgccaggcgatcggatggggaggatggaagcttggaccaggataacaggaagaagagcagctggctgatgctcaagggggatgcagacacaaggaccaattctccagacctggacacccagtccttgtcccacagcagcgggaccgacagagaccctctccaaaggatggcaggggacagctttcactcacaatacaagatctatccgtatgactccctcatcgtcacaaaccgaattcgcgtgaaactgcccaaagacgtggaccggacgagactggagagacacttgtcgcccgaggagttccaggaagtgtttgggatgagcatcgaggagtttgaccgcctggccctctggaagaggaatgaccttaagaagaaagcccttttgttctgacggctgccagcctgccccactggtgtgtgccgggcgccgaggccaggggcccctggcgagaaccgcacacacccctcccacacaccttgctctggcttctctgtgtccatggggtgggcgggagggggtcccccagcaggtgcggcccctgcacctgccggcgacactcctgccggtagtttagggccgagacggctagcttcacgccacccttccccgctgtggcttggtgtcagggagaggctgtagagtggctgtgtcgggcatcagatggagcacacaggtggctgcagcccagcccaccttcccagcgttctcgaggtgccctggccccggtgctgggcacgtgggggacagaggtggccgggacgtgagctgtgaggcttgttgatgacgggtgctgacaccatcatcgggggtgggcacacggcccttcggagcctgggcagcctggcctcacaggcagactcgcagacggggcagtgagcgtctgggacagtgccaagagtggggtgtgtgatttttgcaggcgtctgtgatgggtctctttagggacaaatgtcaacaagggacaagacagggcaccttccgccagcgcccctccatgcgctgcgttcctcctccagatcgacccctagatgcctacacaatatctttaaagtaacacagaagtttttattttattaaaaagtatagcctacttaaacgcgagatgacatatatagagtttaattttacggtccctccgcaggggagcggcctccagccttattctccaccgctcggatctgtgtggtttcagtctgttcttggtgtggtcctcatacacagagctccctgtctagtttcttttctttttcttttttctttttctcgtcacacaggtaaccttaaagacagacccctctaaagaacgctttgtaaatacatgtgaggtatagccaccactgttttccttgctgttatttttccaagtcttggggagaaaacatcctcctctgatggccaaagccctggaatcaagggtttccacgtaccctgcctaatacccgacgtagctcttgatgcaccgtccttgtgctgtggctggcggtgtctcagcctgaaacataaaccccacatgccccaggagcgatgtgctccctgaaacagacaaccacacgctgttggggagagaaggatggagataggatggagataggatggagatgtggctcttctcatctttgaagccagcagggcatcccggagcaggaggctggccgggctccccaagcgaaggcgttggtgtctgtcattaggtgtgtgttagggtgcagcaccggccgtcacaggatgctgataagcgcgctgagaggtggatgaaacaccaaagtctgtttccccgtccgcagtgggtgttgcctctttgtgtgtgtcccgatgttcctgcctgtgagtcggccttactccgtttccttagcgcccatgacacgccaagtcccgtttcgcactcggcttctcacccgcccagctcggctagggagggggagtttttagcacctaatatgcttcctgccattgcgcaatctgagcctgagcaactggaaacccccatttctcattagtgcaatgtcatatctgatcccaggaagcctggaaaataaaagacgatgcattataacttgcggaagtacaagaaa

SEQ ID NO: 378357 - DNA, 1418 bp, Homo sapiens
ctgctctgggacatgttaatgaacttggtccacagcagcagatacctttgtaggagtcaagagcagaagattctggctccagctccaccactgggtgctgtgtgtccctggcagggtcgctgtcctctgagctcagttctttcactgcagagagggtgtcaggaaccgccaggaggccgagcacgctgagggccaccccatcctcaatgcaatcctgcccctggattgcttggcggcagcaaactgcccaatggtgtcccttgctgcgtggctaactggtctctttagggacaaatgtcaacaagggacaagacagggcaccttccgccagcgcccctccatgcgctgcgttcctcctccagatcgacccctagatgcctacacaatatctttaaagtaacacagaagtttttattttattaaaaagtatagcctacttaaacgcgagatgacatatatagagtttaattttacggtccctccgcaggggagcggcctccagccttattctccaccgctcggatctgtgtggtttcagtctgttcttggtgtggtcctcatacacagagctccctgtctagtttcttttctttttcttttttctttttctcgtcacacaggtaaccttaaagacagacccctctaaagaacgctttgtaaatacatgtgaggtatagccaccactgttttccttgctgttatttttccaagtcttggggagaaaacatcctcctctgatggccaaagccctggaatcaagggtttccacgtaccctgcctaatacccgacgtagctcttgatgcaccgtccttgtgctgtggctggcggtgtctcagcctgaaacataaaccccacatgccccaggagcgatgtgctccctgaaacagacaaccacacgctgttggggagagaaggatggagataggatggagataggatggagatgtggctcttctcatctttgaagccagcagggcatcccggagcaggaggctggccgggctccccaagcgaaggcgttggtgtctgtcattaggtgtgtgttagggtgcagcaccggccgtcacaggatgctgataagcgcgctgagaggtggatgaaacaccaaagtctgtttccccgtccgcagtgggtgttgcctctttgtgtgtgtcccgatgttcctgcctgtgagtcggccttactccgtttccttagcgcccatgacacgccaagtcccgtttcgcactcggcttctcacccgcccagctcggctagggagggggagtttttagcacctaatatgcttcctgccattgcgcaatctgagcctgagcaactggaaacccccatttctcattagtgcaatgtcatatctgatcccaggaagcctggaaaataaaagacgatgcattataacttgcggaagtacaagaaa

SEQ ID NO: 378358 - DNA, 3103 bp, Homo sapiens
tgcgggcggggacaagcctggctccgcagaaggggagctgccgccgccgcggtggcactgcctgatgctcggcccagtgtgccggtgccccgctgggtgacagtggactcccagggcgcagcaggagcaggtgacagactgttggctgaaggtgagggtgtccaccctcgcaggcacacgttccagggagcacggcactcaagcagggccgtcagactgggctctggtgcccagaagctgtgcaggccggagagaagcactaccacccttcctgcgcgctatgtgtcaggtgcggccagatgtttgcagaaggcgaagagatgtatcttcaaggttcctccatctggcatccggcgtgtcgacaagcagccagaactgaagacagaaacaaggaaaccagaacttcctcagagagcatcatttctgtccctgcttccagcacctcagggtctccgagccgtgtgatttatgccaagcttggtggtgagatcctggactacagggacttggcagcccttcctaaaagtaaggccatctatgacatcgaccgccccgacatgatctcctactcaccctacatcagccactctgcaggggacaggcagagctacggcgagtcccctcagttgctctcgccaacgccgaccgagggggatcaggatgaccggtcctacaagcagtgccggacctccagcccaagctccactgggtcggttagcctcgggcgctacactccgacctcacggtcaccacagcactacagccgtccagctggtactgtgagtgtgggtaccagtagctgcctctccctgtcccaacacccaagccctacatccgtgttcagacatcattacatcccctacttccgaggcagtgaaagtggccggagcacccccagcctctccgtgctctctgacagcaagccgcccccctccacctaccagcaggcacctcgccacttccacgtcccagacactggcgtaaaagataacatctataggaaaccccctatctacagacagcatgctgccaggcgatcggatggggaggatggaagcttggaccaggataacaggaagaagagcagctggctgatgctcaagggggatgcagacacaaggaccaattctccagacctggacacccagtccttgtcccacagcagcgggaccgacagagaccctctccaaaggatggcaggggacagctttcactcacaatacaagatctatccgtatgactccctcatcgtcacaaaccgaattcgcgtgaaactgcccaaagacgtggaccggacgagactggagagacacttgtcgcccgaggagttccaggaagtgtttgggatgagcatcgaggagtttgaccgcctggccctctggaagaggaatgaccttaagaagaaagcccttttgttctgacggctgccagcctgccccactggtgtgtgccgggcgccgaggccaggggcccctggcgagaaccgcacacacccctcccacacaccttgctctggcttctctgtgtccatggggtgggcgggagggggtcccccagcaggtgcggcccctgcacctgccggcgacactcctgccggtagtttagggccgagacggctagcttcacgccacccttccccgctgtggcttggtgtcagggagaggctgtagagtggctgtgtcgggcatcagatggagcacacaggtggctgcagcccagcccaccttcccagcgttctcgaggtgccctggccccggtgctgggcacgtgggggacagaggtggccgggacgtgagctgtgaggcttgttgatgacgggtgctgacaccatcatcgggggtgggcacacggcccttcggagcctgggcagcctggcctcacaggcagactcgcagacggggcagtgagcgtctgggacagtgccaagagtggggtgtgtgatttttgcaggcgtctgtgatgggtctctttagggacaaatgtcaacaagggacaagacagggcaccttccgccagcgcccctccatgcgctgcgttcctcctccagatcgacccctagatgcctacacaatatctttaaagtaacacagaagtttttattttattaaaaagtatagcctacttaaacgcgagatgacatatatagagtttaattttacggtccctccgcaggggagcggcctccagccttattctccaccgctcggatctgtgtggtttcagtctgttcttggtgtggtcctcatacacagagctccctgtctagtttcttttctttttcttttttctttttctcgtcacacaggtaaccttaaagacagacccctctaaagaacgctttgtaaatacatgtgaggtatagccaccactgttttccttgctgttatttttccaagtcttggggagaaaacatcctcctctgatggccaaagccctggaatcaagggtttccacgtaccctgcctaatacccgacgtagctcttgatgcaccgtccttgtgctgtggctggcggtgtctcagcctgaaacataaaccccacatgccccaggagcgatgtgctccctgaaacagacaaccacacgctgttggggagagaaggatggagataggatggagataggatggagatgtggctcttctcatctttgaagccagcagggcatcccggagcaggaggctggccgggctccccaagcgaaggcgttggtgtctgtcattaggtgtgtgttagggtgcagcaccggccgtcacaggatgctgataagcgcgctgagaggtggatgaaacaccaaagtctgtttccccgtccgcagtgggtgttgcctctttgtgtgtgtcccgatgttcctgcctgtgagtcggccttactccgtttccttagcgcccatgacacgccaagtcccgtttcgcactcggcttctcacccgcccagctcggctagggagggggagtttttagcacctaatatgcttcctgccattgcgcaatctgagcctgagcaactggaaacccccatttctcattagtgcaatgtcatatctgatcccaggaagcctggaaaataaaagacgatgcattataacttgcggaagtacaagaaa

SEQ ID NO: 378359 - DNA, 754 bp, Homo sapiens
cgaggtgctgcgggtgcaggacaagtacttccacatcaagtgcttcgtctgtaaagcatgtggctgcgacctggccgagggcggcttcttcgtgcggcagggcgagtacatctgcacgctggactaccagaggctctacggcacccgctgcttcagctgcgaccagttcattgagggtgaggtggtgtcggcgctgggcaagacctaccaccccgactgcttcgtgtgtgccgtctgccggctgcccttcccccccggggaccgagtgaccttcaacgggaaggaatgcatgtgccagaagtgttccctgcccgtatcggtgggcagcagcgcgcacctgtcccagggcctccgaagttgtgggggctgcggcacagaaatcaagaatggccaggccctggtagccttggacaagcactggcacttgggctgttttaagtgcaagacagaagaaagacctggctttgcagtgaggcagtcccaagttcaaatctgagctcaccactgacccgtcgtgtgatgggcgccaggtgttaggagactggaactgggtatgtgtgtggcattcggccggccatagtagctgctcagtaaacagaaactgtttctcatcctcatcctcatcctcatgcctgcaaactgtaaaccgtcctacttaacaatgaaagtagaaaagtgtttcaatgtgacaggaaagagtgaagacacagaagcttggaaatgatgatgtgttaaagaatcactttaaacaaaa

SEQ ID NO: 378360 - DNA, 352 bp, Homo sapiens
ttgacagaaaaatatattatttactttgcagaggaacaaagcagtcagagaaaattgtggaggactagtaactcaagaacagatgtagatttaaacaagtgacaagtgcagcaaaactctttattaggattttaatgatcttaattttgcaatgatctgtcataatttcaacaagaaagcttaaagtcaaaagaagataaattattaaaaataggcttctagtaactactgtaagaaaacaacagcaatatgaagagataattatatacaatatagccgaaaagttggaagactgtgtgtctagtaatagggcatttgttatatgatacattataatcatatagtagtcacc

SEQ ID NO: 378361 - DNA, 368 bp, Homo sapiens
ttttgcaaatataacaataatagtaataacacaattttgtcatttaaaaaattacccattcatttttcaaacttgactgttagtggaggggtatatgtgtgtctgtgtttccacttatgtaatggctgtctcattatttaaattaatttataattatttttcagtgtacagagtgattagcggcttgtaatgctgttacaatgtagcattgtaatgtaagatgaagaaaaattaggatttaggtgggatttttaaaaatttatcaattcagctactttttaaaagaagtcctattccaattggacctttaaaatttttattttggtaatatttcaacttaagatgtattaaaactagcaattctgtgg

SEQ ID NO: 378362 - DNA, 368 bp, Homo sapiens
cagttcaagcaatttgtatcctgatttacatttcagcattgtttatgaggttgaagaagcataataccacctttgttttggcggggggtaattgaatttaaggttgcctggcttagagatgtgtgttagactttagtctccagcaaataaaacccttagtaggtccaagtattaaagtcagtcttaaaacttgaattggccatattgtacagggctggtatgaagttttttcttttctttcttcctaccacaattaattgtatacatggatttaacaattgtgtaatctattgtatattaatgcagttactttaagcgaagccttacgagtttacttttttcaatggttgttatacatcttattgtgt

SEQ ID NO: 378363 - DNA, 258 bp, Homo sapiens
ttgaaatgccttacaataagcttggcacttacttaccttcacacaaagcagacacattttattgtgattttagtgttccatattatatggtacagtaccaaaggaaaactctaaaatatgtactcaaaatcctgatgtgcccttctttccaaacaggtggcaccacaatgaatataacctttagagttaatatctgaggacaaacccagcagttacaccagcatgatttaggtcctgctgttacaattattattattg

SEQ ID NO: 378364 - DNA, 2707 bp, Homo sapiens
cccgggagagggagctctcgggtcggggctagggaaggctgaccccgctcggcccgggtgaaagggcggtgacggcactgggtggggccgagctccagggctggctgctgggctgctaagggaactgtgagccgctcagagccgcgcgcctcccgggcggggcggggccggccgtgggagtccgcgcgtgcccgcgccgagctgcctgctccggcggcttcgctgctagctcgcggcgacgtcgggccgattttcccaggatgacagagctgaggcagagggtggcccatgagccggttgcgccacccgaggacaaggagtcagagtcagaagcaaaggtagatggagagactgcatcggacagtgagagccgggcagaatccgcacccctgccagtctctgcagatgataccccggaggtcctcaatagggccctttccaacttgtcttcaagatggaagaactggtgggtgagaggcatcctgactttggccatgattgcatttttcttcatcatcatttacctgggaccaatggttttgatgataatcgtgatgtgcgttcagattaagtgtttccatgagataatcactattggctacaacgtctaccactcatatgatctgccctggttcaggacgctcagctggtactttctcctgtgtgtaaactatttcttctatggtgagacagtgacggattacttcttcaccctggtccagagagaagagcctttgcggattctcagtaaataccaccggttcatttcctttactctctatctaataggattctgcatgtttgtactgagtctggtcaagaagcattatcgactgcagttctacatgtttggctggacccatgtgacattgctgattgttgtaacacagtcacatcttgttatccacaacctatttgaaggaatgatctggttcattgtccccatatcttgtgtgatctgtaatgacatcatggcctatatgtttggctttttctttggtcggaccccactcatcaagctgtccccgaagaagacctgggaaggcttcattgggggcttctttgctactgtggtgtttggccttctgctgtcctatgtgatgtccgggtacagatgctttgtctgccctgtggagtacaacaatgacaccaacagcttcactgtggactgtgagccctcggacctgtttcgcctgcaggagtacaacattcctggggtgatccagtcagtcattggctggaaaacggtccggatgtaccccttccagattcacagcatcgctctctccacctttgcctcgctcattggcccctttggaggattcttcgcaagtggattcaaacgagcctttaaaatcaaagactttgccaataccattcctggccatggaggcatcatggatcgctttgactgccagtatctgatggccacctttgtcaatgtatacatcgccagttttatcagaggccctaacccaagcaaactgattcagcagttcctgactttacggccagatcagcagctccacatcttcaacacgctgcggtctcatctgatcgacaaagggatgctgacatccaccacagaggacgagtaggggccacccagggccaggagaacaggaacagaactgagcaggggcaggtctccaaggcaagcccagctggtgtgacttagacaatgacgaggcttcaactcactgtcttttttttttttttttggagggtattttttatttgtgggttcaaaaaatctgtatatacagtctatgtgtttagaatttgtgttgtaagtaaactacagctttgagttggaaagaagtcacgggttgtaaaaccatttggatttttttaaaacaaaagtattaataatctggaagacagtgttgcccaggtcaggagtgttttcttggtggttccagcccccatcaattgaactgtttctgggctcagtcagacacagacattcatctgtgtctgaccaaatcaggggacttccccacctgtggtgggaggcacagcttagatgttttgtacacctggtcttttctagaaatccctgcttggagctgcagaagggttgccttctgtaggtcggaggaatggaggcttactaaccaggtaagccttctatgcatccacaccaaaatcctgcagaatgtaagtaagctctgctttataagatgggttcaccttcatcgcagactgaaagtttcagtttttatttttttcagaaagcacgaaaaattatttataatagtctggagaaaaaacacactgtaatatttcaagtgtatgcagtagaatgtactgtaactgagccctttcccacatgtctaggctccaatgtctcctgtaggtccacctaactgtgtgttttcagggacaatgccatccatgtttgtgctgtagacttgctgctgctgaatcctttctggggactttctcatcgggcagggagcagagggcttctcgttcatgcaccctttgcctgaacacccatgtagctgctgtgttgtgtatatattactcttaagaggagtgtgtgtgtctgtgtttgttttaaaagtcacttatttcttacagtgatttcaattgcaccatgacttcttcactaaaaccacaaagtcctgcttaaaactatggaaaacctaacctgattagagccttgactattttgaagattaaatgcacactttttatataa

SEQ ID NO: 378365 - DNA, 2611 bp, Homo sapiens
  misc_feature (383)..(383): n is a, c, g, or t
  misc_feature (2425)..(2425): n is a, c, g, or t
aaaaattagccaggcatggtggtagcatgcacctgtagtcccagctccttgggaggctgagatgggaggatctcttgagcccaggaggttgaggcttcaaggagctgtgatagtgccactatactccagcctgggtgatggggcaagatcgtgtcttgaaaaaagaaaggaaaatatttttacagatttatataatcttttttggggacacattttttgggactttgatctggatttgagtgtagtcacttaattagtatatcgttttctaatataaaactattcgaatgactgattgaaacagaaagggaaccaaagggaggaggatataagatagggaacaaggaaaccatatttgggggagctttaaaaggtgacatggntaagagaatggggttttatgaaagaaaggttcttaacaagtaatcattgttcgcaaagctatagttatcaaaacaccctttgctgagaacttgctctctgtccacagctgtccccgaagaagacctgggaaggcttcattgggggcttctttgctactgtggtgtttggccttctggtaggtggtggctttcagctgtgtaagggattgggtggacagaggcctcataccaccttccaaggcctgtccagagctggagagtgtctttggaggccaggactgtcctgctgaatggcaaccttgccctgaagagggccactggccatgccagccatccaccagctttcaggcagggtgctagcagttggagagcaccttctatgccctctcgcgcccaggcatggtgacatcagcaggtagccttcttgtcaggcatttgatgttccaaggtcagggtgagtgcacccaagggaagatgagatacacagcttttctcctatgtgtgccttgcccagaggtgggtgattttcctgccctttccagagcaccattctctgcttctgacccttgggccagtcctccttcttcagcactgtctggctgcccttcagtgctcaccgcccagctttgttgctttccagccttgttcctcctgagatctgcctctcactgtgccccttccccatggcctctctccagttatcactgacttcagagatcttgaggaaagtggtcctagctccccaaatggggagagtcttcttgtagttctttgccccagtcccttcaggttttcccggattctttcggggcctgggtgtttgggttcctgtatgtaaccttggtgggtcatgagccttttttttttttttaattgaggtaaaatatgtatggtaaaacatgaacctctgagcacatagctcgcagttagcagggtactaggcaccctcaggaacatggccaaaccaggtgcctgtgtctgggctggatggttggaacttacttccttgccggtctctctgttattcctcctcagctgtcctatgtgatgtccgggtacagatgctttgtctgccctgtggagtacaacaatgacaccaacagcttcactgtggactgtgagccctcggacctgtttcgcctgcaggagtacaacattcctggggtgatccagtcagtcattggctgggtatgtgccactcacagggggtgagcggcctccatggacagtggctacaaagagagatccccctccatcacctgccctctgaaaaaagctagcttcctccttcccaaagctgtaagccccaggatgaaggagaattgctcacgccaggtcagggtatgggcaggacagctttcccccaacatcagattgtttagaccagtggttttcaaagtgtgttctgtggatccctggagggccctgggatccttttagttgcgggggtagggtgggggggtctgtgaggtcacaactgtttcataattagactatgacattattttcctttttcaatgtgttgacatttgctgtgatacggcgcaaaagcagcagtggttaaaactgcgttaaggcagtgggttcctcatgccacacactcacagtacaaacaggccagttctaatgaatgtctatgaaatagtaaagttactaattttgttaaatcttgacctttgtacacacacctttttaacactctctactgaaatggaaagtatgtgtaaaacatttctgctaagtactgtagtacagtgcttgcctaaagggaaagcatgtgtgcagttgtttgagttgtgagctaaattagctgctttttttttagaaaagaaagtaaattttacttggaaagaaccaacaaattataatttttcagacttgggtatttggcagacatttttcttgaaaaggatgaagtgagcctatcactttaaagaaaacaactgaggctaggcacagtggctcacacctgaaatcccagcactttggaaggccgaggcaggcagatctcttgaggtcaggagttccagaccagcctgggnaacatggcgaaaccccgtctttactaaaaatacaaaaaaatatagctggggatggtggcgtgtgcctgtaatcccagctaccagctactcaggaggttgagttgcttgaacccaggaggcggaggatgcagtgagccaagatcgcaccactgcactccagcctgggtgacagagtgagactgtctc

SEQ ID NO: 378366 - DNA, 924 bp, Homo sapiens
cccgggagagggagctctcgggtcggggctagggaaggctgaccccgctcggcccgggtgaaagggcggtgacggcactgggtggggccgagctccagggctggctgctgggctgctaagggaactgtgagccgctcagagccgcgcgcctcccgggcggggcggggccggccgtgggagtccgcgcgtgcccgcgccgagctgcctgctccggcggcttcgctgctagctcgcggcgacgtcgggccgattttcccaggatgacagagctgaggcagagggtggcccatgagccggttgcgccacccgaggacaaggagtcagagtcagaagcaaaggtagatggagagactgcatcggacagtgagagccgggcagaatccgcacccctgccagtctctgcagatgataccccggaggtcctcaatagggccctttccaacttgtcttcaagatggaagaactggtgggtgagaggcatcctgactttggccatgattgcatttttcttcatcatcatttacctgggaccaatggttttgatgataatcgtaagtgccatttcacactattttagttttcccttcagtttttgctgcaggcccggttgtcttaagtgcgaggtgttgggttggttgtgggaattgacgggggtccaggcttctcagaaaacctctgccatagaacatctgtgacttcccacttctcagtagccacctggagggtcattggtgtaggctggttgtttatggttgaagatgtctcagtgtcttttcttttaaaaaactgactttattgcctgtgatcccagcactttgtgaggctgaggtgggcggatcacgaggtcaggagtttgagaccagcctgaccaacatggtgaaaccctgtctctactaaaaatacaaaaattagccacgcgtggtg

SEQ ID NO: 378367 - DNA, 3308 bp, Homo sapiens
cccgggagagggagctctcgggtcggggctagggaaggctgaccccgctcggcccgggtgaaagggcggtgacggcactgggtggggccgagctccagggctggctgctgggctgctaagggaactgtgagccgctcagagccgcgcgcctcccgggcggggcggggccggccgtgggagtccgcgcgtgcccgcgccgagctgcctgctccggcggcttcgctgctagctcgcggcgacgtcgggccgattttcccaggatgacagagctgaggcagagggtggcccatgagccggttgcgccacccgaggacaagataattggagggtccaccatcactttgtcacctgctcaatggttggctggagctgaggatcatcggttcccaccaatccctgttgccttacaccaggctcacggcttcccctaatgcagcctgtaactttttgatgactggacgcaacggacattagggagacacccagaaggaagaaagcacaagatttggtgacaggatgtcaacagagcagttacactaggaggaatgtttttggtgaaagataatgagatcatgggttttttttaaacaactttcgtgttattgcagttgacagtggactatccaaagagaactgttcctaccgatttttagaacatatattttggccaggcacagtgctgctcgcctgtaatcctagcttctagggaggctgaggcaggaggatcgcttgagcccaggagtttgagaccctgtctcaaaaaacaaaaacaaaaacatattttggagaacatttagggctggggctgaggatttagcagtcgcttgcagagacaagatactttgaagtctctaatttttcatttggctatcctggttcagcctgaaagaattctgacttaccttgtactactagttggagtcagagtcagaagcaaaggtagatggagagactgcatcggacagtgagagccgggcagaatccgcacccctgccagtctctgcagatgataccccggaggtcctcaatagggccctttccaacttgtcttcaagatggaagaactggtgggtgagaggcatcctgactttggccatgattgcatttttcttcatcatcatttacctgggaccaatggttttgatgataatcgtgatgtgcgttcagattaagtgtttccatgagataatcactattggctacaacgtctaccactcatatgatctgccctggttcaggacgctcagctggtactttctcctgtgtgtaaactatttcttctatggtgagacagtgacggattacttcttcaccctggtccagagagaagagcctttgcggattctcagtaaataccaccggttcatttcctttactctctatctaataggattctgcatgtttgtactgagtctggtcaagaagcattatcgactgcagttctacatgtttggctggacccatgtgacattgctgattgttgtaacacagtcacatcttgttatccacaacctatttgaaggaatgatctggttcattgtccccatatcttgtgtgatctgtaatgacatcatggcctatatgtttggctttttctttggtcggaccccactcatcaagctgtccccgaagaagacctgggaaggcttcattgggggcttctttgctactgtggtgtttggccttctgctgtcctatgtgatgtccgggtacagatgctttgtctgccctgtggagtacaacaatgacaccaacagcttcactgtggactgtgagccctcggacctgtttcgcctgcaggagtacaacattcctggggtgatccagtcagtcattggctggaaaacggtccggatgtaccccttccagattcacagcatcgctctctccacctttgcctcgctcattggcccctttggaggattcttcgcaagtggattcaaacgagcctttaaaatcaaagactttgccaataccattcctggccatggaggcatcatggatcgctttgactgccagtatctgatggccacctttgtcaatgtatacatcgccagttttatcagaggccctaacccaagcaaactgattcagcagttcctgactttacggccagatcagcagctccacatcttcaacacgctgcggtctcatctgatcgacaaagggatgctgacatccaccacagaggacgagtaggggccacccagggccaggagaacaggaacagaactgagcaggggcaggtctccaaggcaagcccagctggtgtgacttagacaatgacgaggcttcaactcactgtcttttttttttttttttggagggtattttttatttgtgggttcaaaaaatctgtatatacagtctatgtgtttagaatttgtgttgtaagtaaactacagctttgagttggaaagaagtcacgggttgtaaaaccatttggatttttttaaaacaaaagtattaataatctggaagacagtgttgcccaggtcaggagtgttttcttggtggttccagcccccatcaattgaactgtttctgggctcagtcagacacagacattcatctgtgtctgaccaaatcaggggacttccccacctgtggtgggaggcacagcttagatgttttgtacacctggtcttttctagaaatccctgcttggagctgcagaagggttgccttctgtaggtcggaggaatggaggcttactaaccaggtaagccttctatgcatccacaccaaaatcctgcagaatgtaagtaagctctgctttataagatgggttcaccttcatcgcagactgaaagtttcagtttttatttttttcagaaagcacgaaaaattatttataatagtctggagaaaaaacacactgtaatatttcaagtgtatgcagtagaatgtactgtaactgagccctttcccacatgtctaggctccaatgtctcctgtaggtccacctaactgtgtgttttcagggacaatgccatccatgtttgtgctgtagacttgctgctgctgaatcctttctggggactttctcatcgggcagggagcagagggcttctcgttcatgcaccctttgcctgaacacccatgtagctgctgtgttgtgtatatattactcttaagaggagtgtgtgtgtctgtgtttgttttaaaagtcacttatttcttacagtgatttcaattgcaccatgacttcttcactaaaaccacaaagtcctgcttaaaactatggaaaacctaacctgattagagccttgactattttgaagattaaatgcacactttttatataa

SEQ ID NO: 378368 - DNA, 2691 bp, Homo sapiens
tggacacttcaatgtgtttaaatacttttctgttacaaagattcaatacaggctgggtgcagtggtacacggctatatcccagtgctttggaggctgaggcaggaggatcgcttgagcccaggagtttgagaccctgtctcaaaaaacaaaaacaaaaacatattttggagaacatttagggctggggctgaggatttagcagtcgcttgcagagacaagatactttgaagtctctaatttttcatttggctatcctggttcagcctgaaagaattctgacttaccttgtactactagttggagtcagagtcagaagcaaaggtagatggagagactgcatcggacagtgagagccgggcagaatccgcacccctgccagtctctgcagatgataccccggaggtcctcaatagggccctttccaacttgtcttcaagatggaagaactggtgggtgagaggcatcctgactttggccatgattgcatttttcttcatcatcatttacctgggaccaatggttttgatgataatcgtgatgtgcgttcagattaagtgtttccatgagataatcactattggctacaacgtctaccactcatatgatctgccctggttcaggacgctcagctggtactttctcctgtgtgtaaactatttcttctatggtgagacagtgacggattacttcttcaccctggtccagagagaagagcctttgcggattctcagtaaataccaccggttcatttcctttactctctatctaataggattctgcatgtttgtactgagtctggtcaagaagcattatcgactgcagttctacatgtttggctggacccatgtgacattgctgattgttgtaacacagtcacatcttgttatccacaacctatttgaaggaatgatctggttcattgtccccatatcttgtgtgatctgtaatgacatcatggcctatatgtttggctttttctttggtcggaccccactcatcaagctgtccccgaagaagacctgggaaggcttcattgggggcttctttgctactgtggtgtttggccttctgctgtcctatgtgatgtccgggtacagatgctttgtctgccctgtggagtacaacaatgacaccaacagcttcactgtggactgtgagccctcggacctgtttcgcctgcaggagtacaacattcctggggtgatccagtcagtcattggctggaaaacggtccggatgtaccccttccagattcacagcatcgctctctccacctttgcctcgctcattggcccctttggaggattcttcgcaagtggattcaaacgagcctttaaaatcaaagactttgccaataccattcctggccatggaggcatcatggatcgctttgactgccagtatctgatggccacctttgtcaatgtatacatcgccagttttatcagaggccctaacccaagcaaactgattcagcagttcctgactttacggccagatcagcagctccacatcttcaacacgctgcggtctcatctgatcgacaaagggatgctgacatccaccacagaggacgagtaggggccacccagggccaggagaacaggaacagaactgagcaggggcaggtctccaaggcaagcccagctggtgtgacttagacaatgacgaggcttcaactcactgtcttttttttttttttttggagggtattttttatttgtgggttcaaaaaatctgtatatacagtctatgtgtttagaatttgtgttgtaagtaaactacagctttgagttggaaagaagtcacgggttgtaaaaccatttggatttttttaaaacaaaagtattaataatctggaagacagtgttgcccaggtcaggagtgttttcttggtggttccagcccccatcaattgaactgtttctgggctcagtcagacacagacattcatctgtgtctgaccaaatcaggggacttccccacctgtggtgggaggcacagcttagatgttttgtacacctggtcttttctagaaatccctgcttggagctgcagaagggttgccttctgtaggtcggaggaatggaggcttactaaccaggtaagccttctatgcatccacaccaaaatcctgcagaatgtaagtaagctctgctttataagatgggttcaccttcatcgcagactgaaagtttcagtttttatttttttcagaaagcacgaaaaattatttataatagtctggagaaaaaacacactgtaatatttcaagtgtatgcagtagaatgtactgtaactgagccctttcccacatgtctaggctccaatgtctcctgtaggtccacctaactgtgtgttttcagggacaatgccatccatgtttgtgctgtagacttgctgctgctgaatcctttctggggactttctcatcgggcagggagcagagggcttctcgttcatgcaccctttgcctgaacacccatgtagctgctgtgttgtgtatatattactcttaagaggagtgtgtgtgtctgtgtttgttttaaaagtcacttatttcttacagtgatttcaattgcaccatgacttcttcactaaaaccacaaagtcctgcttaaaactatggaaaacctaacctgattagagccttgactattttgaagattaaatgcacactttttatataa

SEQ ID NO: 378369 - DNA, 2742 bp, Homo sapiens
cccgggagagggagctctcgggtcggggctagggaaggctgaccccgctcggcccgggtgaaagggcggtgacggcactgggtggggccgagctccagggctggctgctgggctgctaagggaactgtgagccgctcagagccgcgcgcctcccgggcggggcggggccggccgtgggagtccgcgcgtgcccgcgccgagctgcctgctccggcggcttcgctgctagctcgcggcgacgtcgggccgattttcccaggatgacagagctgaggcagagggtggcccatgagccggttgcgccacccgaggacaaggagtcagagtcagaagcaaaggtagatggagagactgcatcggacagtgagagccgggcagaatccgcacccctgccagtctctgcagatgataccccggaggtcctcaatagggccctttccaacttgtcttcaagatggaagaactggtgggtgagaggcatcctgactttggccatgattgcatttttcttcatcatcatttacctgggaccaatggttttgatgataatcgtgatgtgcgttcagattaagtgtttccatgagataatcactattggctacaacgtctaccactcatatgatctgccctggttcaggacgctcagctggtactttctcctgtgtgtaaactatttcttctatggtgagacagtgacggattacttcttcaccctggtccagagagaagagcctttgcggattctcagtaaataccaccggttcatttcctttactctctatctaataggattctgcatgtttgtactgagtctggtcaagaagcattatcgactgcagttctacatgtttggctggacccatgtgacattgctgattgttgtaacacagtcacatcttgttatccacaacctatttgaaggaatgatctggtgagaattgggagttggattttcccttttattttgttcattgtccccatatcttgtgtgatctgtaatgacatcatggcctatatgtttggctttttctttggtcggaccccactcatcaagctgtccccgaagaagacctgggaaggcttcattgggggcttctttgctactgtggtgtttggccttctgctgtcctatgtgatgtccgggtacagatgctttgtctgccctgtggagtacaacaatgacaccaacagcttcactgtggactgtgagccctcggacctgtttcgcctgcaggagtacaacattcctggggtgatccagtcagtcattggctggaaaacggtccggatgtaccccttccagattcacagcatcgctctctccacctttgcctcgctcattggcccctttggaggattcttcgcaagtggattcaaacgagcctttaaaatcaaagactttgccaataccattcctggccatggaggcatcatggatcgctttgactgccagtatctgatggccacctttgtcaatgtatacatcgccagttttatcagaggccctaacccaagcaaactgattcagcagttcctgactttacggccagatcagcagctccacatcttcaacacgctgcggtctcatctgatcgacaaagggatgctgacatccaccacagaggacgagtaggggccacccagggccaggagaacaggaacagaactgagcaggggcaggtctccaaggcaagcccagctggtgtgacttagacaatgacgaggcttcaactcactgtcttttttttttttttttggagggtattttttatttgtgggttcaaaaaatctgtatatacagtctatgtgtttagaatttgtgttgtaagtaaactacagctttgagttggaaagaagtcacgggttgtaaaaccatttggatttttttaaaacaaaagtattaataatctggaagacagtgttgcccaggtcaggagtgttttcttggtggttccagcccccatcaattgaactgtttctgggctcagtcagacacagacattcatctgtgtctgaccaaatcaggggacttccccacctgtggtgggaggcacagcttagatgttttgtacacctggtcttttctagaaatccctgcttggagctgcagaagggttgccttctgtaggtcggaggaatggaggcttactaaccaggtaagccttctatgcatccacaccaaaatcctgcagaatgtaagtaagctctgctttataagatgggttcaccttcatcgcagactgaaagtttcagtttttatttttttcagaaagcacgaaaaattatttataatagtctggagaaaaaacacactgtaatatttcaagtgtatgcagtagaatgtactgtaactgagccctttcccacatgtctaggctccaatgtctcctgtaggtccacctaactgtgtgttttcagggacaatgccatccatgtttgtgctgtagacttgctgctgctgaatcctttctggggactttctcatcgggcagggagcagagggcttctcgttcatgcaccctttgcctgaacacccatgtagctgctgtgttgtgtatatattactcttaagaggagtgtgtgtgtctgtgtttgttttaaaagtcacttatttcttacagtgatttcaattgcaccatgacttcttcactaaaaccacaaagtcctgcttaaaactatggaaaacctaacctgattagagccttgactattttgaagattaaatgcacactttttatataa

SEQ ID NO: 378370 - DNA, 2375 bp, Homo sapiens
cccgggagagggagctctcgggtcggggctagggaaggctgaccccgctcggcccgggtgaaagggcggtgacggcactgggtggggccgagctccagggctggctgctgggctgctaagggaactgtgagccgctcagagccgcgcgcctcccgggcggggcggggccggccgtgggagtccgcgcgtgcccgcgccgagctgcctgctccggcggcttcgctgctagctcgcggcgacgtcgggccgattttcccaggatgacagagctgaggcagagggtggcccatgagccggttgcgccacccgaggacaaggtactttctcctgtgtgtaaactatttcttctatggtgagacagtgacggattacttcttcaccctggtccagagagaagagcctttgcggattctcagtaaataccaccggttcatttcctttactctctatctaataggattctgcatgtttgtactgagtctggtcaagaagcattatcgactgcagttctacatgtttggctggacccatgtgacattgctgattgttgtaacacagtcacatcttgttatccacaacctatttgaaggaatgatctggttcattgtccccatatcttgtgtgatctgtaatgacatcatggcctatatgtttggctttttctttggtcggaccccactcatcaagctgtccccgaagaagacctgggaaggcttcattgggggcttctttgctactgtggtgtttggccttctgctgtcctatgtgatgtccgggtacagatgctttgtctgccctgtggagtacaacaatgacaccaacagcttcactgtggactgtgagccctcggacctgtttcgcctgcaggagtacaacattcctggggtgatccagtcagtcattggctggaaaacggtccggatgtaccccttccagattcacagcatcgctctctccacctttgcctcgctcattggcccctttggaggattcttcgcaagtggattcaaacgagcctttaaaatcaaagactttgccaataccattcctggccatggaggcatcatggatcgctttgactgccagtatctgatggccacctttgtcaatgtatacatcgccagttttatcagaggccctaacccaagcaaactgattcagcagttcctgactttacggccagatcagcagctccacatcttcaacacgctgcggtctcatctgatcgacaaagggatgctgacatccaccacagaggacgagtaggggccacccagggccaggagaacaggaacagaactgagcaggggcaggtctccaaggcaagcccagctggtgtgacttagacaatgacgaggcttcaactcactgtcttttttttttttttttggagggtattttttatttgtgggttcaaaaaatctgtatatacagtctatgtgtttagaatttgtgttgtaagtaaactacagctttgagttggaaagaagtcacgggttgtaaaaccatttggatttttttaaaacaaaagtattaataatctggaagacagtgttgcccaggtcaggagtgttttcttggtggttccagcccccatcaattgaactgtttctgggctcagtcagacacagacattcatctgtgtctgaccaaatcaggggacttccccacctgtggtgggaggcacagcttagatgttttgtacacctggtcttttctagaaatccctgcttggagctgcagaagggttgccttctgtaggtcggaggaatggaggcttactaaccaggtaagccttctatgcatccacaccaaaatcctgcagaatgtaagtaagctctgctttataagatgggttcaccttcatcgcagactgaaagtttcagtttttatttttttcagaaagcacgaaaaattatttataatagtctggagaaaaaacacactgtaatatttcaagtgtatgcagtagaatgtactgtaactgagccctttcccacatgtctaggctccaatgtctcctgtaggtccacctaactgtgtgttttcagggacaatgccatccatgtttgtgctgtagacttgctgctgctgaatcctttctggggactttctcatcgggcagggagcagagggcttctcgttcatgcaccctttgcctgaacacccatgtagctgctgtgttgtgtatatattactcttaagaggagtgtgtgtgtctgtgtttgttttaaaagtcacttatttcttacagtgatttcaattgcaccatgacttcttcactaaaaccacaaagtcctgcttaaaactatggaaaacctaacctgattagagccttgactattttgaagattaaatgcacactttttatataa

SEQ ID NO: 378371 - DNA, 2605 bp, Homo sapiens
cccgggagagggagctctcgggtcggggctagggaaggctgaccccgctcggcccgggtgaaagggcggtgacggcactgggtggggccgagctccagggctggctgctgggctgctaagggaactgtgagccgctcagagccgcgcgcctcccgggcggggcggggccggccgtgggagtccgcgcgtgcccgcgccgagctgcctgctccggcggcttcgctgctagctcgcggcgacgtcgggccgattttcccaggatgacagagctgaggcagagggtggcccatgagccggttgcgccacccgaggacaagatggaagaactggtgggtgagaggcatcctgactttggccatgattgcatttttcttcatcatcatttacctgggaccaatggttttgatgataatcgtgatgtgcgttcagattaagtgtttccatgagataatcactattggctacaacgtctaccactcatatgatctgccctggttcaggacgctcagctggtactttctcctgtgtgtaaactatttcttctatggtgagacagtgacggattacttcttcaccctggtccagagagaagagcctttgcggattctcagtaaataccaccggttcatttcctttactctctatctaataggattctgcatgtttgtactgagtctggtcaagaagcattatcgactgcagttctacatgtttggctggacccatgtgacattgctgattgttgtaacacagtcacatcttgttatccacaacctatttgaaggaatgatctggtgagaattgggagttggattttcccttttattttgttcattgtccccatatcttgtgtgatctgtaatgacatcatggcctatatgtttggctttttctttggtcggaccccactcatcaagctgtccccgaagaagacctgggaaggcttcattgggggcttctttgctactgtggtgtttggccttctgctgtcctatgtgatgtccgggtacagatgctttgtctgccctgtggagtacaacaatgacaccaacagcttcactgtggactgtgagccctcggacctgtttcgcctgcaggagtacaacattcctggggtgatccagtcagtcattggctggaaaacggtccggatgtaccccttccagattcacagcatcgctctctccacctttgcctcgctcattggcccctttggaggattcttcgcaagtggattcaaacgagcctttaaaatcaaagactttgccaataccattcctggccatggaggcatcatggatcgctttgactgccagtatctgatggccacctttgtcaatgtatacatcgccagttttatcagaggccctaacccaagcaaactgattcagcagttcctgactttacggccagatcagcagctccacatcttcaacacgctgcggtctcatctgatcgacaaagggatgctgacatccaccacagaggacgagtaggggccacccagggccaggagaacaggaacagaactgagcaggggcaggtctccaaggcaagcccagctggtgtgacttagacaatgacgaggcttcaactcactgtcttttttttttttttttggagggtattttttatttgtgggttcaaaaaatctgtatatacagtctatgtgtttagaatttgtgttgtaagtaaactacagctttgagttggaaagaagtcacgggttgtaaaaccatttggatttttttaaaacaaaagtattaataatctggaagacagtgttgcccaggtcaggagtgttttcttggtggttccagcccccatcaattgaactgtttctgggctcagtcagacacagacattcatctgtgtctgaccaaatcaggggacttccccacctgtggtgggaggcacagcttagatgttttgtacacctggtcttttctagaaatccctgcttggagctgcagaagggttgccttctgtaggtcggaggaatggaggcttactaaccaggtaagccttctatgcatccacaccaaaatcctgcagaatgtaagtaagctctgctttataagatgggttcaccttcatcgcagactgaaagtttcagtttttatttttttcagaaagcacgaaaaattatttataatagtctggagaaaaaacacactgtaatatttcaagtgtatgcagtagaatgtactgtaactgagccctttcccacatgtctaggctccaatgtctcctgtaggtccacctaactgtgtgttttcagggacaatgccatccatgtttgtgctgtagacttgctgctgctgaatcctttctggggactttctcatcgggcagggagcagagggcttctcgttcatgcaccctttgcctgaacacccatgtagctgctgtgttgtgtatatattactcttaagaggagtgtgtgtgtctgtgtttgttttaaaagtcacttatttcttacagtgatttcaattgcaccatgacttcttcactaaaaccacaaagtcctgcttaaaactatggaaaacctaacctgattagagccttgactattttgaagattaaatgcacactttttatataa

SEQ ID NO: 378372 - DNA, 1511 bp, Homo sapiens
tgggcatgtatgcacctaaacttttacttcatttactcttctcagaaaacggtccggatgtaccccttccagattcacagcatcgctctctccacctttgcctcgctcattggcccctttggaggattcttcgcaagtggattcaaacgagcctttaaaatcaaagactttgccaataccattcctggccatggaggcatcatggatcgctttgactgccagtatctgatggccacctttgtcaatgtatacatcgccagttttatcagaggccctaacccaagcaaactgattcagcagttcctgactttacggccagatcagcagctccacatcttcaacacgctgcggtctcatctgatcgacaaagggatgctgacatccaccacagaggacgagtaggggccacccagggccaggagaacaggaacagaactgagcaggggcaggtctccaaggcaagcccagctggtgtgacttagacaatgacgaggcttcaactcactgtcttttttttttttttttggagggtattttttatttgtgggttcaaaaaatctgtatatacagtctatgtgtttagaatttgtgttgtaagtaaactacagctttgagttggaaagaagtcacgggttgtaaaaccatttggatttttttaaaacaaaagtattaataatctggaagacagtgttgcccaggtcaggagtgttttcttggtggttccagcccccatcaattgaactgtttctgggctcagtcagacacagacattcatctgtgtctgaccaaatcaggggacttccccacctgtggtgggaggcacagcttagatgttttgtacacctggtcttttctagaaatccctgcttggagctgcagaagggttgccttctgtaggtcggaggaatggaggcttactaaccaggtaagccttctatgcatccacaccaaaatcctgcagaatgtaagtaagctctgctttataagatgggttcaccttcatcgcagactgaaagtttcagtttttatttttttcagaaagcacgaaaaattatttataatagtctggagaaaaaacacactgtaatatttcaagtgtatgcagtagaatgtactgtaactgagccctttcccacatgtctaggctccaatgtctcctgtaggtccacctaactgtgtgttttcagggacaatgccatccatgtttgtgctgtagacttgctgctgctgaatcctttctggggactttctcatcgggcagggagcagagggcttctcgttcatgcaccctttgcctgaacacccatgtagctgctgtgttgtgtatatattactcttaagaggagtgtgtgtgtctgtgtttgttttaaaagtcacttatttcttacagtgatttcaattgcaccatgacttcttcactaaaaccacaaagtcctgcttaaaactatggaaaacctaacctgattagagccttgactattttgaagattaaatgcacactttttatataa

SEQ ID NO: 378373 - DNA, 2416 bp, Homo sapiens
cccgggagagggagctctcgggtcggggctagggaaggctgaccccgctcggcccgggtgaaagggcggtgacggcactgggtggggccgagctccagggctggctgctgggctgctaagggaactgtgagccgctcagagccgcgcgcctcccgggcggggcggggccggccgtgggagtccgcgcgtgcccgcgccgagctgcctgctccggcggcttcgctgctagctcgcggcgacgtcgggccgattttcccaggatgacagagctgaggcagagggtggcccatgagccggttgcgccacccgaggacaagataattggagggtccaccatcactttgtcacctgctcaatggttggctggagctgaggatcatcggttcccaccaatccctgttgccttacaccaggctcacggcttcccctaatgcagcctgtaactttttgatgactggacgcaacggacattagggagacacccagaaggaagaaagcacaagatttggtgacaggatgtcaacagagcagttacactaggaggaatgtttttggtgaaagataatgagatcatgggttttttttaaacaactttcgtgttattgcagttgacagtggactatccaaagagaactgttcctaccgatttttagaacatatattttggccaggcacagtgctgctcgcctgtaatcctagcttctagggaggctgaggcaggaggatcgcttgagcccaggagtttgagaccctgtctcaaaaaacaaaaacaaaaacatattttggagaacatttagggctggggctgaggatttagcagtcgcttgcagagacaagatactttgaagtctctaatttttcatttggctatcctggttcagcctgaaagaattctgacttaccttgtactactagttggagtcagagtcagaagcaaaggtagatggagagactgcatcggacagtgagagccgggcagaatccgcacccctgccagtctctgcagatgataccccggaggtcctcaatagggccctttccaacttgtcttcaagatggaagaactggtgggtgagaggcatcctgactttggccatggaggcatcatggatcgctttgactgccagtatctgatggccacctttgtcaatgtatacatcgccagttttatcagaggccctaacccaagcaaactgattcagcagttcctgactttacggccagatcagcagctccacatcttcaacacgctgcggtctcatctgatcgacaaagggatgctgacatccaccacagaggacgagtaggggccacccagggccaggagaacaggaacagaactgagcaggggcaggtctccaaggcaagcccagctggtgtgacttagacaatgacgaggcttcaactcactgtcttttttttttttttttggagggtattttttatttgtgggttcaaaaaatctgtatatacagtctatgtgtttagaatttgtgttgtaagtaaactacagctttgagttggaaagaagtcacgggttgtaaaaccatttggatttttttaaaacaaaagtattaataatctggaagacagtgttgcccaggtcaggagtgttttcttggtggttccagcccccatcaattgaactgtttctgggctcagtcagacacagacattcatctgtgtctgaccaaatcaggggacttccccacctgtggtgggaggcacagcttagatgttttgtacacctggtcttttctagaaatccctgcttggagctgcagaagggttgccttctgtaggtcggaggaatggaggcttactaaccaggtaagccttctatgcatccacaccaaaatcctgcagaatgtaagtaagctctgctttataagatgggttcaccttcatcgcagactgaaagtttcagtttttatttttttcagaaagcacgaaaaattatttataatagtctggagaaaaaacacactgtaatatttcaagtgtatgcagtagaatgtactgtaactgagccctttcccacatgtctaggctccaatgtctcctgtaggtccacctaactgtgtgttttcagggacaatgccatccatgtttgtgctgtagacttgctgctgctgaatcctttctggggactttctcatcgggcagggagcagagggcttctcgttcatgcaccctttgcctgaacacccatgtagctgctgtgttgtgtatatattactcttaagaggagtgtgtgtgtctgtgtttgttttaaaagtcacttatttcttacagtgatttcaattgcaccatgacttcttcactaaaaccacaaagtcctgcttaaaactatggaaaacctaacctgattagagccttgactattttgaagattaaatgcacactttttatataa

SEQ ID NO: 378374 - DNA, 1515 bp, Homo sapiens
cccgggagagggagctctcgggtcggggctagggaaggctgaccccgctcggcccgggtgaaagggcggtgacggcactgggtggggccgagctccagggctggctgctgggctgctaagggaactgtgagccgctcagagccgcgcgcctcccgggcggggcggggccggccgtgggagtccgcgcgtgcccgcgccgagctgcctgctccggcggcttcgctgctagctcgcggcgacgtcgggccgattttcccaggatgacagagctgaggcagagggtggcccatgagccggttgcgccacccgaggacaagataattggagggtccaccatcactttgtcacctgctcaatggttggctggagctgaggatcatcggttcccaccacagaggacgagtaggggccacccagggccaggagaacaggaacagaactgagcaggggcaggtctccaaggcaagcccagctggtgtgacttagacaatgacgaggcttcaactcactgtcttttttttttttttttggagggtattttttatttgtgggttcaaaaaatctgtatatacagtctatgtgtttagaatttgtgttgtaagtaaactacagctttgagttggaaagaagtcacgggttgtaaaaccatttggatttttttaaaacaaaagtattaataatctggaagacagtgttgcccaggtcaggagtgttttcttggtggttccagcccccatcaattgaactgtttctgggctcagtcagacacagacattcatctgtgtctgaccaaatcaggggacttccccacctgtggtgggaggcacagcttagatgttttgtacacctggtcttttctagaaatccctgcttggagctgcagaagggttgccttctgtaggtcggaggaatggaggcttactaaccaggtaagccttctatgcatccacaccaaaatcctgcagaatgtaagtaagctctgctttataagatgggttcaccttcatcgcagactgaaagtttcagtttttatttttttcagaaagcacgaaaaattatttataatagtctggagaaaaaacacactgtaatatttcaagtgtatgcagtagaatgtactgtaactgagccctttcccacatgtctaggctccaatgtctcctgtaggtccacctaactgtgtgttttcagggacaatgccatccatgtttgtgctgtagacttgctgctgctgaatcctttctggggactttctcatcgggcagggagcagagggcttctcgttcatgcaccctttgcctgaacacccatgtagctgctgtgttgtgtatatattactcttaagaggagtgtgtgtgtctgtgtttgttttaaaagtcacttatttcttacagtgatttcaattgcaccatgacttcttcactaaaaccacaaagtcctgcttaaaactatggaaaacctaacctgattagagccttgactattttgaagattaaatgcacactttttatataa

SEQ ID NO: 378375 - DNA, 308 bp, Homo sapiens
ttcttcactaaaaccacaaagtcctgcttaaaactatggaaaacctaacctgattagagccttgactattttgaagattaaatgcacactttttatataatgtgaccagtttaaatgtagtttgtattgtactgggggacctttcgttgttgttgtttgcttaaactgtgattttttttcccctccctaatttcaggggtgagattgactttgggaagacagattagttctttgtcaggccaacaagtgatggagtgcgggagagagaacttggcacccaaatatatcaaactattccgtgccgtgga

SEQ ID NO: 378376 - DNA, 2832 bp, Homo sapiens
  misc_feature (2725)..(2730): n is a, c, g, or t
  misc_feature (2741)..(2742): n is a, c, g, or t
  misc_feature (2752)..(2752): n is a, c, g, or t
  misc_feature (2829)..(2829): n is a, c, g, or t
cccgggagagggagctctcgggtcggggctagggaaggctgaccccgctcggcccgggtgaaagggcggtgacggcactgggtggggccgagctccagggctggctgctgggctgctaagggaactgtgagccgctcagagccgcgcgcctcccgggcggggcggggccggccgtgggagtccgcgcgtgcccgcgccgagctgcctgctccggcggcttcgctgctagctcgcggcgacgtcgggccgattttcccaggatgacagagctgaggcagagggtggcccatgagccggttgcgccacccgaggacaaggagtcagagtcagaagcaaaggtagatggagagactgcatcggacagtgagagccgggcagaatccgcacccctgccagtctctgcagatgataccccggaggtcctcaatagggccctttccaacttgtcttcaagatggaagaactggtgggtgagaggcatcctgactttggccatgattgcatttttcttcatcatcatttacctgggaccaatggttttgatgataatcgtgatgtgcgttcagattaagtgtttccatgagataatcactattggctacaacgtctaccactcatatgatctgccctggttcaggacgctcagctggtactttctcctgtgtgtaaactatttcttctatggtgagacagtgacggattacttcttcaccctggtccagagagaagagcctttgcggattctcagtaaataccaccggttcatttcctttactctctatctaataggattctgcatgtttgtactgagtctggtcaagaagcattatcgactgcagttctacatgtttggctggacccatgtgacattgctgattgttgtaacacagtcacatcttgttatccacaacctatttgaaggaatgatctggttcattgtccccatatcttgtgtgatctgtaatgacatcatggcctatatgtttggctttttctttggtcggaccccactcatcaagctgtccccgaagaagacctgggaaggcttcattgggggcttctttgctactgtggtgtttggccttctgctgtcctatgtgatgtccgggtacagatgctttgtctgccctgtggagtacaacaatgacaccaacagcttcactgtggactgtgagccctcggacctgtttcgcctgcaggagtacaacattcctggggtgatccagtcagtcattggctggaaaacggtccggatgtaccccttccagattcacagcatcgctctctccacctttgcctcgctcattggcccctttggaggattcttcgcaagtggattcaaacgagcctttaaaatcaaagactttgccaataccattcctggccatggaggcatcatggatcgctttgactgccagtatctgatggccacctttgtcaatgtatacatcgccagttttatcagaggccctaacccaagcaaactgattcagcagttcctgactttacggccagatcagcagctccacatcttcaacacgctgcggtctcatctgatcgacaaagggatgctgacatccaccacagaggacgagtaggggccacccagggccaggagaacaggaacagaactgagcaggggcaggtctccaaggcaagcccagctggtgtgacttagacaatgacgaggcttcaactcactgtcttttttttttttttttggagggtattttttatttgtgggttcaaaaaatctgtatatacagtctatgtgtttagaatttgtgttgtaagtaaactacagctttgagttggaaagaagtcacgggttgtaaaaccatttggatttttttaaaacaaaagtattaataatctggaagacagtgttgcccaggtcaggagtgttttcttggtggttccagcccccatcaattgaactgtttctgggctcagtcagacacagacattcatctgtgtctgaccaaatcaggggacttccccacctgtggtgggaggcacagcttagatgttttgtacacctggtcttttctagaaatccctgcttggagctgcagaagggttgccttctgtaggtcggaggaatggaggcttactaaccaggtaagccttctatgcatccacaccaaaatcctgcagaatgtaagtaagctctgctttataagatgggttcaccttcatcgcagactgaaagtttcagtttttatttttttcagaaagcacgaaaaattatttataatagtctggagaaaaaacacactgtaatatttcaagtgtatgcagtagaatgtactgtaactgagccctttcccacatgtctaggctccaatgtctcctgtaggtccacctaactgtgtgttttcagggacaatgccatccatgtttgtgctgtagacttgctgctgctgaatcctttctggggactttctcatcgggcagggagcagagggcttctcgttcatgcaccctttgcctgaacacccatgtagctgctgtgttgtgtatatattactcttaagaggagtgtgtgtgtctgtgtttgttttaaaagtcacttatttcttacagtgatttcaattgcaccatgacttcttcactaaaaccacaaagtcctgcttaaaactatggaaaacctaacctgattagagccttgactattttgaagattaaatgcacactttttatataaaaaaaaaaaaaaaaaaannnnnnacggggggggnncccccccccntttttttttttttaaaaaaaaaaaggggggggggggggggggggggggggggggggggggggggggggggggggggnggg

SEQ ID NO: 378377 - DNA, 2664 bp, Homo sapiens
ggggacgcgcgcagaggggtcgtcttgttctctgaccctttgtcgcagccgacggcggccccgggcccgggtagcgcgaagggccctcgggtgcccggccttcgcggcgcgcgcgtcaggggtcggcgggtcggggtcccggctcagggtctgactgaagtggctcccccggggcgcaggaaggagcttctcgggagtggcgcacggcctcctgcctcgctgggctggctgcggggactcccctctcccccaactccgtgaggccttcctggaggagtcagagtcagaagcaaaggtagatggagagactgcatcggacagtgagagccgggcagaatccgcacccctgccagtctctgcagatgataccccggaggtcctcaatagggccctttccaacttgtcttcaagatggaagaactggtgggtgagaggcatcctgactttggccatgattgcatttttcttcatcatcatttacctgggaccaatggttttgatgataatcgtgatgtgcgttcagattaagtgtttccatgagataatcactattggctacaacgtctaccactcatatgatctgccctggttcaggacgctcagctggtactttctcctgtgtgtaaactatttcttctatggtgagacagtgacggattacttcttcaccctggtccagagagaagagcctttgcggattctcagtaaataccaccggttcatttcctttactctctatctaataggattctgcatgtttgtactgagtctggtcaagaagcattatcgactgcagttctacatgtttggctggacccatgtgacattgctgattgttgtaacacagtcacatcttgttatccacaacctatttgaaggaatgatctggttcattgtccccatatcttgtgtgatctgtaatgacatcatggcctatatgtttggctttttctttggtcggaccccactcatcaagctgtccccgaagaagacctgggaaggcttcattgggggcttctttgctactgtggtgtttggccttctgctgtcctatgtgatgtccgggtacagatgctttgtctgccctgtggagtacaacaatgacaccaacagcttcactgtggactgtgagccctcggacctgtttcgcctgcaggagtacaacattcctggggtgatccagtcagtcattggctggaaaacggtccggatgtaccccttccagattcacagcatcgctctctccacctttgcctcgctcattggcccctttggaggattcttcgcaagtggattcaaacgagcctttaaaatcaaagactttgccaataccattcctggccatggaggcatcatggatcgctttgactgccagtatctgatggccacctttgtcaatgtatacatcgccagttttatcagaggccctaacccaagcaaactgattcagcagttcctgactttacggccagatcagcagctccacatcttcaacacgctgcggtctcatctgatcgacaaagggatgctgacatccaccacagaggacgagtaggggccacccagggccaggagaacaggaacagaactgagcaggggcaggtctccaaggcaagcccagctggtgtgacttagacaatgacgaggcttcaactcactgtcttttttttttttttttggagggtattttttatttgtgggttcaaaaaatctgtatatacagtctatgtgtttagaatttgtgttgtaagtaaactacagctttgagttggaaagaagtcacgggttgtaaaaccatttggatttttttaaaacaaaagtattaataatctggaagacagtgttgcccaggtcaggagtgttttcttggtggttccagcccccatcaattgaactgtttctgggctcagtcagacacagacattcatctgtgtctgaccaaatcaggggacttccccacctgtggtgggaggcacagcttagatgttttgtacacctggtcttttctagaaatccctgcttggagctgcagaagggttgccttctgtaggtcggaggaatggaggcttactaaccaggtaagccttctatgcatccacaccaaaatcctgcagaatgtaagtaagctctgctttataagatgggttcaccttcatcgcagactgaaagtttcagtttttatttttttcagaaagcacgaaaaattatttataatagtctggagaaaaaacacactgtaatatttcaagtgtatgcagtagaatgtactgtaactgagccctttcccacatgtctaggctccaatgtctcctgtaggtccacctaactgtgtgttttcagggacaatgccatccatgtttgtgctgtagacttgctgctgctgaatcctttctggggactttctcatcgggcagggagcagagggcttctcgttcatgcaccctttgcctgaacacccatgtagctgctgtgttgtgtatatattactcttaagaggagtgtgtgtgtctgtgtttgttttaaaagtcacttatttcttacagtgatttcaattgcaccatgacttcttcactaaaaccacaaagtcctgcttaaaactatggaaaacctaacctgattagagccttgactattttgaagattaaatgcacactttttatataa

SEQ ID NO: 378378 - DNA, 2727 bp, Homo sapiens
cccgggagagggagctctcgggtcggggctagggaaggctgaccccgctcggcccgggtgaaagggcggtgacggcactgggtggggccgagctccagggctggctgctgggctgctaagggaactgtgagccgctcagagccgcgcgcctcccgggcggggcggggccggccgtgggagtccgcgcgtgcccgcgccgagctgcctgctccggcggcttcgctgctagctcgcggcgacgtcgggccgattttcccaggatgacagagctgaggcagagggtggcccatgagccggttgcgccacccgaggacaaggagtcagagtcagaagcaaaggtagatggagagactgcatcggacagtgagagccgggcagaatccgcacccctgccagtctctgcagatgataccccggaggtcctcaatagggccctttccaacttgtcttcaagatggaagaactggtgggtgagaggcatcctgactttggccatgattgcatttttcttcatcatcatttacctgggaccaatggttttgatgataatcgtgatgtgcgttcagattaagtgtttccatgagataatcactattggctacaacgtctaccactcatatgatctgccctggttcaggacgctcagctggtactttctcctgtgtgtaaactatttcttctatggtgagacagtgacggattacttcttcaccctggtccagagagaagagcctttgcggattctcagtaaataccaccggttcatttcctttactctctatctaataggattctgcatgtttgtactgagtctggtcaagaagcattatcgactgcagttctacatgtttggctggacccatgtgacattgctgattgttgtaacacagtcacatcttgttatccacaacctatttgaaggaatgatctggttcattgtccccatatcttgtgtgatctgtaatgacatcatggcctatatgtttggctttttctttggtcggaccccactcatcaagctgtccccgaagaagacctgggaaggcttcattgggggcttctttgctactgtggtgtttggccttctgctgtcctatgtgatgtccgggtacagatgctttgtctgccctgtggagtacaacaatgacaccaacagcttcactgtggactgtgagccctcggacctgtttcgcctgcaggagtacaacattcctggggtgatccagtcagtcattggctgggtatgtgccactcacaggggaaaacggtccggatgtaccccttccagattcacagcatcgctctctccacctttgcctcgctcattggcccctttggaggattcttcgcaagtggattcaaacgagcctttaaaatcaaagactttgccaataccattcctggccatggaggcatcatggatcgctttgactgccagtatctgatggccacctttgtcaatgtatacatcgccagttttatcagaggccctaacccaagcaaactgattcagcagttcctgactttacggccagatcagcagctccacatcttcaacacgctgcggtctcatctgatcgacaaagggatgctgacatccaccacagaggacgagtaggggccacccagggccaggagaacaggaacagaactgagcaggggcaggtctccaaggcaagcccagctggtgtgacttagacaatgacgaggcttcaactcactgtcttttttttttttttttggagggtattttttatttgtgggttcaaaaaatctgtatatacagtctatgtgtttagaatttgtgttgtaagtaaactacagctttgagttggaaagaagtcacgggttgtaaaaccatttggatttttttaaaacaaaagtattaataatctggaagacagtgttgcccaggtcaggagtgttttcttggtggttccagcccccatcaattgaactgtttctgggctcagtcagacacagacattcatctgtgtctgaccaaatcaggggacttccccacctgtggtgggaggcacagcttagatgttttgtacacctggtcttttctagaaatccctgcttggagctgcagaagggttgccttctgtaggtcggaggaatggaggcttactaaccaggtaagccttctatgcatccacaccaaaatcctgcagaatgtaagtaagctctgctttataagatgggttcaccttcatcgcagactgaaagtttcagtttttatttttttcagaaagcacgaaaaattatttataatagtctggagaaaaaacacactgtaatatttcaagtgtatgcagtagaatgtactgtaactgagccctttcccacatgtctaggctccaatgtctcctgtaggtccacctaactgtgtgttttcagggacaatgccatccatgtttgtgctgtagacttgctgctgctgaatcctttctggggactttctcatcgggcagggagcagagggcttctcgttcatgcaccctttgcctgaacacccatgtagctgctgtgttgtgtatatattactcttaagaggagtgtgtgtgtctgtgtttgttttaaaagtcacttatttcttacagtgatttcaattgcaccatgacttcttcactaaaaccacaaagtcctgcttaaaactatggaaaacctaacctgattagagccttgactattttgaagattaaatgcacactttttatataa

SEQ ID NO: 378379 - DNA, 2570 bp, Homo sapiens
cccgggagagggagctctcgggtcggggctagggaaggctgaccccgctcggcccgggtgaaagggcggtgacggcactgggtggggccgagctccagggctggctgctgggctgctaagggaactgtgagccgctcagagccgcgcgcctcccgggcggggcggggccggccgtgggagtccgcgcgtgcccgcgccgagctgcctgctccggcggcttcgctgctagctcgcggcgacgtcgggccgattttcccaggatgacagagctgaggcagagggtggcccatgagccggttgcgccacccgaggacaagatggaagaactggtgggtgagaggcatcctgactttggccatgattgcatttttcttcatcatcatttacctgggaccaatggttttgatgataatcgtgatgtgcgttcagattaagtgtttccatgagataatcactattggctacaacgtctaccactcatatgatctgccctggttcaggacgctcagctggtactttctcctgtgtgtaaactatttcttctatggtgagacagtgacggattacttcttcaccctggtccagagagaagagcctttgcggattctcagtaaataccaccggttcatttcctttactctctatctaataggattctgcatgtttgtactgagtctggtcaagaagcattatcgactgcagttctacatgtttggctggacccatgtgacattgctgattgttgtaacacagtcacatcttgttatccacaacctatttgaaggaatgatctggttcattgtccccatatcttgtgtgatctgtaatgacatcatggcctatatgtttggctttttctttggtcggaccccactcatcaagctgtccccgaagaagacctgggaaggcttcattgggggcttctttgctactgtggtgtttggccttctgctgtcctatgtgatgtccgggtacagatgctttgtctgccctgtggagtacaacaatgacaccaacagcttcactgtggactgtgagccctcggacctgtttcgcctgcaggagtacaacattcctggggtgatccagtcagtcattggctggaaaacggtccggatgtaccccttccagattcacagcatcgctctctccacctttgcctcgctcattggcccctttggaggattcttcgcaagtggattcaaacgagcctttaaaatcaaagactttgccaataccattcctggccatggaggcatcatggatcgctttgactgccagtatctgatggccacctttgtcaatgtatacatcgccagttttatcagaggccctaacccaagcaaactgattcagcagttcctgactttacggccagatcagcagctccacatcttcaacacgctgcggtctcatctgatcgacaaagggatgctgacatccaccacagaggacgagtaggggccacccagggccaggagaacaggaacagaactgagcaggggcaggtctccaaggcaagcccagctggtgtgacttagacaatgacgaggcttcaactcactgtcttttttttttttttttggagggtattttttatttgtgggttcaaaaaatctgtatatacagtctatgtgtttagaatttgtgttgtaagtaaactacagctttgagttggaaagaagtcacgggttgtaaaaccatttggatttttttaaaacaaaagtattaataatctggaagacagtgttgcccaggtcaggagtgttttcttggtggttccagcccccatcaattgaactgtttctgggctcagtcagacacagacattcatctgtgtctgaccaaatcaggggacttccccacctgtggtgggaggcacagcttagatgttttgtacacctggtcttttctagaaatccctgcttggagctgcagaagggttgccttctgtaggtcggaggaatggaggcttactaaccaggtaagccttctatgcatccacaccaaaatcctgcagaatgtaagtaagctctgctttataagatgggttcaccttcatcgcagactgaaagtttcagtttttatttttttcagaaagcacgaaaaattatttataatagtctggagaaaaaacacactgtaatatttcaagtgtatgcagtagaatgtactgtaactgagccctttcccacatgtctaggctccaatgtctcctgtaggtccacctaactgtgtgttttcagggacaatgccatccatgtttgtgctgtagacttgctgctgctgaatcctttctggggactttctcatcgggcagggagcagagggcttctcgttcatgcaccctttgcctgaacacccatgtagctgctgtgttgtgtatatattactcttaagaggagtgtgtgtgtctgtgtttgttttaaaagtcacttatttcttacagtgatttcaattgcaccatgacttcttcactaaaaccacaaagtcctgcttaaaactatggaaaacctaacctgattagagccttgactattttgaagattaaatgcacactttttatataa

SEQ ID NO: 378380 - DNA, 3037 bp, Homo sapiens
  misc_feature (383)..(383): n is a, c, g, or t
aaaaattagccaggcatggtggtagcatgcacctgtagtcccagctccttgggaggctgagatgggaggatctcttgagcccaggaggttgaggcttcaaggagctgtgatagtgccactatactccagcctgggtgatggggcaagatcgtgtcttgaaaaaagaaaggaaaatatttttacagatttatataatcttttttggggacacattttttgggactttgatctggatttgagtgtagtcacttaattagtatatcgttttctaatataaaactattcgaatgactgattgaaacagaaagggaaccaaagggaggaggatataagatagggaacaaggaaaccatatttgggggagctttaaaaggtgacatggntaagagaatggggttttatgaaagaaaggttcttaacaagtaatcattgttcgcaaagctatagttatcaaaacaccctttgctgagaacttgctctctgtccacagctgtccccgaagaagacctgggaaggcttcattgggggcttctttgctactgtggtgtttggccttctggtaggtggtggctttcagctgtgtaagggattgggtggacagaggcctcataccaccttccaaggcctgtccagagctggagagtgtctttggaggccaggactgtcctgctgaatggcaaccttgccctgaagagggccactggccatgccagccatccaccagctttcaggcagggtgctagcagttggagagcaccttctatgccctctcgcgcccaggcatggtgacatcagcaggtagccttcttgtcaggcatttgatgttccaaggtcagggtgagtgcacccaagggaagatgagatacacagcttttctcctatgtgtgccttgcccagaggtgggtgattttcctgccctttccagagcaccattctctgcttctgacccttgggccagtcctccttcttcagcactgtctggctgcccttcagtgctcaccgcccagctttgttgctttccagccttgttcctcctgagatctgcctctcactgtgccccttccccatggcctctctccagttatcactgacttcagagatcttgaggaaagtggtcctagctccccaaatggggagagtcttcttgtagttctttgccccagtcccttcaggttttcccggattctttcggggcctgggtgtttgggttcctgtatgtaaccttggtgggtcatgagccttttttttttttttaattgaggtaaaatatgtatggtaaaacatgaacctctgagcacatagctcgcagttagcagggtactaggcaccctcaggaacatggccaaaccaggtgcctgtgtctgggctggatggttggaacttacttccttgccggtctctctgttattcctcctcagctgtcctatgtgatgtccgggtacagatgctttgtctgccctgtggagtacaacaatgacaccaacagcttcactgtggactgtgagccctcggacctgtttcgcctgcaggagtacaacattcctggggtgatccagtcagtcattggctggaaaacggtccggatgtaccccttccagattcacagcatcgctctctccacctttgcctcgctcattggcccctttggaggattcttcgcaagtggattcaaacgagcctttaaaatcaaagactttgccaataccattcctggccatggaggcatcatggatcgctttgactgccagtatctgatggccacctttgtcaatgtatacatcgccagttttatcagaggccctaacccaagcaaactgattcagcagttcctgactttacggccagatcagcagctccacatcttcaacacgctgcggtctcatctgatcgacaaagggatgctgacatccaccacagaggacgagtaggggccacccagggccaggagaacaggaacagaactgagcaggggcaggtctccaaggcaagcccagctggtgtgacttagacaatgacgaggcttcaactcactgtcttttttttttttttttggagggtattttttatttgtgggttcaaaaaatctgtatatacagtctatgtgtttagaatttgtgttgtaagtaaactacagctttgagttggaaagaagtcacgggttgtaaaaccatttggatttttttaaaacaaaagtattaataatctggaagacagtgttgcccaggtcaggagtgttttcttggtggttccagcccccatcaattgaactgtttctgggctcagtcagacacagacattcatctgtgtctgaccaaatcaggggacttccccacctgtggtgggaggcacagcttagatgttttgtacacctggtcttttctagaaatccctgcttggagctgcagaagggttgccttctgtaggtcggaggaatggaggcttactaaccaggtaagccttctatgcatccacaccaaaatcctgcagaatgtaagtaagctctgctttataagatgggttcaccttcatcgcagactgaaagtttcagtttttatttttttcagaaagcacgaaaaattatttataatagtctggagaaaaaacacactgtaatatttcaagtgtatgcagtagaatgtactgtaactgagccctttcccacatgtctaggctccaatgtctcctgtaggtccacctaactgtgtgttttcagggacaatgccatccatgtttgtgctgtagacttgctgctgctgaatcctttctggggactttctcatcgggcagggagcagagggcttctcgttcatgcaccctttgcctgaacacccatgtagctgctgtgttgtgtatatattactcttaagaggagtgtgtgtgtctgtgtttgttttaaaagtcacttatttcttacagtgatttcaattgcaccatgacttcttcactaaaaccacaaagtcctgcttaaaactatggaaaacctaacctgattagagccttgactattttgaagattaaatgcacactttttatataa

SEQ ID NO: 378381 - DNA, 394 bp, Homo sapiens
agatgaggagcctgggagagcaaagcagtgtgagttctccaaattgcacagcttatgagtgcccttcagggttctgtaagttggccctggaccagggaccaggaatggtatttcttctcatctgccttaggaagattgaatggtatgcgaaaaaagtcctggttgagaagttgaggcacaggttttgctccagatttgctgataactgcatgtgagattttagaaacctcaaaaaaatcgacccttccgaaaaccaatgctctgcctttcgttttcaaggacattaaaatattgctaacttgaatacacaagaagaaagagggtggtataagtaacagctgatctcactcccttttaaatataaatcatttcaaatggaatgatgtcctttgca

SEQ ID NO: 378382 - DNA, 1406 bp, Homo sapiens
aacaatagacaaccgtggctttgacaatgccttccctcaaccccctttctgctcctgctgtgacacttgcattcaagagcaaggacgtctgccatccgatgcatggacaatggaatgaggaatacaaggcagcggggaagaaaggaaatcagatgaattctgagctaagatggcagggttctcaccttttccattttggggaatttttttgttttttgggtttttttttttttttttgccaaaaataaaaagtctggatggagtcttcccgcagagaagaaataaaaagagtgtttgaattgttggatggttctgaaggcttctgaatttgcaaacgaattttagaactatttgcagaggtctacttgctgccagtcatctctctctctctctctttctcttctgttttatgtcctgctatctccatcatgcctctgttactatgaagactttctgcctgtgtaagtaagtgagagtgtgcattccttaatgtttgaatcaagacacacgtctgcatgcatttctaatctaagaagcctatagcagttactacaactatcaattagtcagcaatagctgagaacttcaacgcctctgaaggaacaaaggtggaaagacaggcagatactccagcatctggatcatgcaacttgctggctacaaataatggcaccttctctggcttttatctgtgtttagtcctcaaatctatgtaacattatgggttattaatgtatccagccacataattagatatggagcatctaagacatatatgtttctttggcattattgggaataaaatgcattaagctgaactaaaaggaattgcctgctgacaaaaaagagtttatcgtatatgtgatctacgttccattttaatcaactcccactagaactgaaattaactatacggtagagttctttgttcatttcagtggtttttatgaaagaagctaagaaaatagtgattaaaaaaggaaagctaaatatttagctgtagaaaagcatataagaagattaattttcctccataaatgaaatcattttggtttaaactcaagcctggattttggttaatgttgagtgggtttgtgtgggggggctgtgtgtgtttagttgcaagtgttgtgagcaccgtcttacactgcatatgtctgtgttaacttgtattgaatatattctgggctaaccacctgaaacaaaataaagacttcttttatctcattttacagaaacctcaaaaaaatcgacccttccgaaaaccaatgctctgcctttcgttttcaaggacattaaaatattgctaacttgaatacacaagaagaaagagggtggtataagtaacagctgatctcactcccttttaaatataaatcatttcaaatggaatgatgtcctttgca

SEQ ID NO: 378383 - DNA, 1181 bp, Homo sapiens
agatgaggagcctgggagagcaaagcagtgtgagttctccaaattgcacagcttatgagtgcccttcagggttctgtaagttggccctggaccagggaccaggaatggtatttcttctcatctgccttaggaagattgaatggtatgcgaaaaaagtcctggttgagaagttgaggcacaggttttgctccagatttgctgataactgcatgtgagattttagactttctgcctgtgtaagtaagtgagagtgtgcattccttaatgtttgaatcaagacacacgtctgcatgcatttctaatctaagaagcctatagcagttactacaactatcaattagtcagcaatagctgagaacttcaacgcctctgaaggaacaaaggtggaaagacaggcagatactccagcatctggatcatgcaacttgctggctacaaataatggcaccttctctggcttttatctgtgtttagtcctcaaatctatgtaacattatgggttattaatgtatccagccacataattagatatggagcatctaagacatatatgtttctttggcattattgggaataaaatgcattaagctgaactaaaaggaattgcctgctgacaaaaaagagtttatcgtatatgtgatctacgttccattttaatcaactcccactagaactgaaattaactatacggtagagttctttgttcatttcagtggtttttatgaaagaagctaagaaaatagtgattaaaaaaggaaagctaaatatttagctgtagaaaagcatataagaagattaattttcctccataaatgaaatcattttggtttaaactcaagcctggattttggttaatgttgagtgggtttgtgtgggggggctgtgtgtgtttagttgcaagtgttgtgagcaccgtcttacactgcatatgtctgtgttaacttgtattgaatatattctgggctaaccacctgaaacaaaataaagacttcttttatctcattttacagaaacctcaaaaaaatcgacccttccgaaaaccaatgctctgcctttcgttttcaaggacattaaaatattgctaacttgaatacacaagaagaaagagggtggtataagtaacagctgatctcactcccttttaaatataaatcatttcaaatggaatgatgtcctttgca

SEQ ID NO: 378384 - DNA, 1017 bp, Homo sapiens
acgtgcatggtgcggagcccaggccctagggaatcgtggggtcgtatcccgcgggtggaggccggggtggcgccggccggggcgggggagcccaaaagaccggctgccgcctgctccccggaaaagggcactcgtctccgtgggtgtggcggagcgcgcggtgcatgcagccgcagcacggtccttggcaaacaaggatgagaaaaatatccaaccacgggagcctgcgggtggcgaaggtggcataccccctggggctgtgtgtgggcgtgttcatctatgttgcctacatcaagtggcaccgggccaccgccacccaggccttcttcagcatcaccagggcagccccgggggcccggtggggtcagcaggcccacagccccctggggacagctgcagacgggcacgaggtcttctacgggatcatgtttgatgcaggaagcactggcacccgagtacacgtcttccagttcacccggccccccagagaaactcccacgttaacccacgaaaccttcaaagcactgaagccaggtctttctgcctatgctgatgatgttgaaaagagcgctcagggaatccgggaactactggatgttgctaaacaggacattccgttcgacttctggaaggccacccctctggtcctcaaggccacagctggcttacgcctgttacctggagaaaaggcccagaagttactgcagaagacagaagtatttaaaggcattcgctttccttggtaaggggatgactggtgtttccatcatgagcgaaacaagctaacatgactaacaccctttattccatccagccctctctcctaggaggcctgccccggtaaccggctttttggcccaatggggcattatcgagaattcccaaaaacgattagcctcattatcccacattatagcaccattacctcttaactatatttactagctaataattccactaataattaatcccattttacacgttacatactgccgctgactttaaccaccaatttcc

SEQ ID NO: 378385 - DNA, 3207 bp, Homo sapiens
acgtgcatggtgcggagcccaggccctagggaatcgtggggtcgtatcccgcgggtggaggccggggtggcgccggccggggcgggggagcccaaaagaccggctgccgcctgctccccggaaaagggcactcgtctccgtgggtgtggcggagcgcgcggtgcatggaatgggctatgtgaatgaaaaaaggtatccgttatgaaacttccagaaaaacgagctacatttttcagcagccgcagcacggtccttggcaaacaaggatgagaaaaatatccaaccacgggagcctgcgggtggcgaaggtggcataccccctggggctgtgtgtgggcgtgttcatctatgttgcctacatcaagtggcaccgggccaccgccacccaggccttcttcagcatcaccagggcagccccgggggcccggtggggtcagcaggcccacagccccctggggacagctgcagacgggcacgaggtcttctacgggatcatgtttgatgcaggaagcactggcacccgagtacacgtcttccagttcacccggccccccagagaaactcccacgttaacccacgaaaccttcaaagcactgaagccaggtctttctgcctatgctgatgatgttgaaaagagcgctcagggaatccgggaactactggatgttgctaaacaggacattccgttcgacttctggaaggccacccctctggtcctcaaggccacagctggcttacgcctgttacctggagaaaaggcccagaagttactgcagaaggtgaaagaagtatttaaagcatcgcctttccttgtaggggatgactgtgtttccatcatgaacggaacagatgaaggcgtttcggcgtggatcaccatcaacttcctgacaggcagcttgaaaactccaggagggagcagcgtgggcatgctggacttgggcggaggatccactcagatcgccttcctgccacgcgtggagggcaccctgcaggcctccccacccggctacctgacggcactgcggatgtttaacaggacctacaagctctattcctacagctacctcgggctcgggctgatgtcggcacgcctggcgatcctgggcggcgtggaggggcagcctgctaaggatggaaaggagttggtcagcccttgcttgtctcccagtttcaaaggagagtgggaacacgcagaagtcacgtacagggtttcagggcagaaagcagcggcaagcctgcacgagctgtgtgctgccagagtgtcagaggtccttcaaaacagagtgcacaggacggaggaagtgaagcatgtggacttctatgctttctcctactattacgaccttgcagctggtgtgggcctcatagatgcggagaagggaggcagcctggtggtgggggacttcgagatcgcagccaagtacgtgtgtcggaccctggagacacagccgcagagcagccccttctcatgcatggacctcacctacgtcagcctgctactccaggagttcggctttcccaggagcaaagtgctgaagctcactcggaaaattgacaatgttgagaccagctgggctctgggggccatttttcattacatcgactccctgaacagacagaagagtccagcctcatagtggccgagccatccctgtccccgtcagcagtgtctgtgtgtctgcataaaccctcctgtcctggacgtgacttcatcctgaggagccacagcacaggccgtgctggcactttctgcacactggctctgggacttgcagaaggcctggtgctgccctggcatcagcctcttccagtcacatctggccagagggctgtctggacctgggccctgctcaatgccacctgtctgcctgggctccaagtgggcaggaccaggacagaaccacaggcacacactgagggggcagtgtggctccctgcctgtcccatccccatgccccgtccgcggggctgtggctgctgctgtgcatgtccctgcgatgggagtcttgtctcccagcctgtcagtttcctccccagggcagagctccccttcctgcgagagtctgggaggcggtgcaggctgtcctggctgctctggggaagccgagggacagccataacacccccgggacagtaggtctgggcggcaccactgggaactctggacttgagtgtgtttgcctcttccttgggtatgaatgtgtgagttcacccagaggcctgctctcctcacacattgtgtggtttggggttaatgatggagggagacacctcctcatagacggcaggtgcccacctttcagggagtctcccagcatgggcggatgccgggcatgagctgctgtaaactatttgtggctgtgctgcttgagtgacgtctctgtcgtgtgggtgccaagtgcttgtgtagaaactgtgttctgagcccccttttctggacaccaactgtgtcctgtgaatgtatcgctactgtgagctgttcccgcctagccagggccatgtcttaggtgcagctgtgccacgggtcagctgagccacagtcccagaaccaagctctcggtgtctcgggccaccatccgcccacctcgggctgaccccacctcctccatggacagtgtgagccccgggccgtgcatcctgctcagtgtggcgtcagtgtcggggctgagccccttgagctgcttcagtgaatgtacagtgcccggcacgagctgaacctcatgtgttccactcccaataaaaggttgacagggaaaaaaaaaaaaaaaaaaaaaaaaaaaaaaaaaaaaaaaaaaaaaaaaaaaaaaaaaaaaaagaagagagggggggcgcgcgccgccagaaagatattcccgccgcgagggggggcccgccgcagctcggcacgcgcggcacccacgcatttcttgttgttagacacagaggcggcgcctccaatagaggagggacgcctctcttataataaagccgaggacgcgcgcacggggcgcgccgcgcggtatataacagaacgagcgcgctgcgagagcgcgaggcgacaaaagcgcgtgccgacacgcgggagaccacacttgtggggagggagagagcgaccaccccatctatctgtcgggggggagggagcgacacaaaactatgtgtgggcgggcgaacaacctctctctctccatagaaagagaatttattaagacgcgcctctcgaggggg

SEQ ID NO: 378386 - DNA, 3288 bp, Homo sapiens
acgtgcatggtgcggagcccaggccctagggaatcgtggggtcgtatcccgcgggtggaggccggggtggcgccggccggggcgggggagcccaaaagaccggctgccgcctgctccccggaaaagggcactcgtctccgtgggtgtggcggagcgcgcggtgcatggaatgggctatgtgaatgaaaaaaggtatccgttatgaaacttccagaaaaacgagctacatttttcagcagccgcagcacggtccttggcaaacaaggatgagaaaaatatccaaccacgggagcctgcgggtggcgaaggtggcataccccctggggctgtgtgtgggcgtgttcatctatgttgcctacatcaagtggcaccgggccaccgccacccaggccttcttcagcatcaccagggcagccccgggggcccggtggggtcagcaggcccacagccccctggggacagctgcagacgggcacgaggtcttctacgggatcatgtttgatgcaggaagcactggcacccgagtacacgtcttccagttcacccggccccccagagaaactcccacgttaacccacgaaaccttcaaagcactgaagccaggtctttctgcctatgctgatgatgttgaaaagagcgctcagggaatccgggaactactggatgttgctaaacaggacattccgttcgacttctggaaggccacccctctggtcctcaaggccacagctggcttacgcctgttacctggagaaaaggcccagaagttactgcagaaggtgaaagaagtatttaaagcatcgcctttccttgtaggggatgactgtgtttccatcatgaacggaacagatgaaggcgtttcggcgtggatcaccatcaacttcctgacaggcagcttgaaaactccaggagggagcagcgtgggcatgctggacttgggcggaggatccactcagatcgccttcctgccacgcgtggagggcaccctgcaggcctccccacccggctacctgacggcactgcggatgtttaacaggacctacaagctctattcctacagctacctcgggctcgggctgatgtcggcacgcctggcgatcctgggcggcgtggaggggcagcctgctaaggatggaaaggagttggtcagcccttgcttgtctcccagtttcaaaggagagtgggaacacgcagaagtcacgtacagggtttcagggcagaaagcagcggcaagcctgcacgagctgtgtgctgccagagtgtcagaggtccttcaaaacagagtgcacaggacggaggaagtgaagcatgtggacttctatgctttctcctactattacgaccttgcagctggtgtgggcctcatagatgcggagaagggaggcagcctggtggtgggggacttcgagatcgcagccaagtacgtgtgtcggaccctggagacacagccgcagagcagccccttctcatgcatggacctcacctacgtcagcctgctactccaggagttcggctttcccaggagcaaagtgctgaagctcactcggaaaattgacaatgttgagaccagctgggctctgggggccatttttcattacatcgactccctgaacagacagaagagtccagcctcatagtggccgagccatccctgtccccgtcagcagtgtctgtgtgtctgcataaaccctcctgtcctggacgtgacttcatcctgaggagccacagcacaggccgtgctggcactttctgcacactggctctgggacttgcagaaggcctggtgctgccctggcatcagcctcttccagtcacatctggccagagggctgtctggacctgggccctgctcaatgccacctgtctgcctgggctccaagtgggcaggaccaggacagaaccacaggcacacactgagggggcagtgtggctccctgcctgtcccatccccatgccccgtccgcggggctgtggctgctgctgtgcatgtccctgcgatgggagtcttgtctcccagcctgtcagtttcctccccagggcagagctccccttcctgcgagagtctgggaggcggtgcaggctgtcctggctgctctggggaagccgagggacagccataacacccccgggacagtaggtctgggcggcaccactgggaactctggacttgagtgtgtttgcctcttccttgggtatgaatgtgtgagttcacccagaggcctgctctcctcacacattgtgtggtttggggttaatgatggagggagacacctcctcatagacggcaggtgcccacctttcagggagtctcccagcatgggcggatgccgggcatgagctgctgtaaactatttgtggctgtgctgcttgagtgacgtctctgtcgtgtgggtgccaagtgcttgtgtagaaactgtgttctgagcccccttttctggacaccaactgtgtcctgtgaatgtatcgctactgtgagctgttcccgcctagccagggccatgtcttaggtgcagctgtgccacgggtcagctgagccacagtcccagaaccaagctctcggtgtctcgggccaccatccgcccacctcgggctgaccccacctcctccatggacagtgtgagccccgggccgtgcatcctgctcagtgtggcgtcagtgtcggggctgagccccttgagctgcttcagtgaatgtacagtgcccggcacgagctgaacctcatgtgttccactcccaataaaaggttgacagggaaaaaaaaaaaaaaaaaaaaaaaaaaaaaaaaaaaaaaaaaaaaaaaaaaaaaaaaaaaaaaaaaaaaaaaaaaaaaaaaaaaaaaaaaaaaaaaaaaaaaaaaaaaaaaaaaaaaaaaaaaaaaaaaaaaaaaaaaaaaaaaaaaaaaaaaattttcttggaaaaaaacttttggggatttttttttaatggcccaggggaaaacttttttttaacccccttttttttttgcccccaaatttttttaaaaaaaaattttttttccccccccatttttttttaagggggccccccctttttttttttccccccttttttttaaacacccgttctaaataaaattttaaacctttaaattttccaatttttttaaaaaaatattcccccgggggggtcttcaaaaatttccctatgtgttttaaaaaaaaactctccaaaaaattttggggggaaaacatttaacccctttttaagagaaaattgccttatttgtgaaacacggtgttttctccactggggaaaaaggggcccctt

SEQ ID NO: 378387 - DNA, 3138 bp, Homo sapiens
acgtgcatggtgcggagcccaggccctagggaatcgtggggtcgtatcccgcgggtggaggccggggtggcgccggccggggcgggggagcccaaaagaccggctgccgcctgctccccggaaaagggcactcgtctccgtgggtgtggcggagcgcgcggtgcatgcagccgcagcacggtccttggcaaacaaggatgagaaaaatatccaaccacgggagcctgcgggtggcgaaggtggcataccccctggggctgtgtgtgggcgtgttcatctatgttgcctacatcaagtggcaccgggccaccgccacccaggccttcttcagcatcaccagggcagccccgggggcccggtggggtcagcaggcccacagccccctggggacagctgcagacgggcacgaggtcttctacgggatcatgtttgatgcaggaagcactggcacccgagtacacgtcttccagttcacccggccccccagagaaactcccacgttaacccacgaaaccttcaaagcactgaagccaggtctttctgcctatgctgatgatgttgaaaagagcgctcagggaatccgggaactactggatgttgctaaacaggacattccgttcgacttctggaaggccacccctctggtcctcaaggccacagctggcttacgcctgttacctggagaaaaggcccagaagttactgcagaaggtgaaagaagtatttaaagcatcgcctttccttgtaggggatgactgtgtttccatcatgaacggaacagatgaaggcgtttcggcgtggatcaccatcaacttcctgacaggcagcttgaaaactccaggagggagcagcgtgggcatgctggacttgggcggaggatccactcagatcgccttcctgccacgcgtggagggcaccctgcaggcctccccacccggctacctgacggcactgcggatgtttaacaggacctacaagctctattcctacagctacctcgggctcgggctgatgtcggcacgcctggcgatcctgggcggcgtggaggggcagcctgctaaggatggaaaggagttggtcagcccttgcttgtctcccagtttcaaaggagagtgggaacacgcagaagtcacgtacagggtttcagggcagaaagcagcggcaagcctgcacgagctgtgtgctgccagagtgtcagaggtccttcaaaacagagtgcacaggacggaggaagtgaagcatgtggacttctatgctttctcctactattacgaccttgcagctggtgtgggcctcatagatgcggagaagggaggcagcctggtggtgggggacttcgagatcgcagccaagtacgtgtgtcggaccctggagacacagccgcagagcagccccttctcatgcatggacctcacctacgtcagcctgctactccaggagttcggctttcccaggagcaaagtgctgaagctcactcggaaaattgacaatgttgagaccagctgggctctgggggccatttttcattacatcgactccctgaacagacagaagagtccagcctcatagtggccgagccatccctgtccccgtcagcagtgtctgtgtgtctgcataaaccctcctgtcctggacgtgacttcatcctgaggagccacagcacaggccgtgctggcactttctgcacactggctctgggacttgcagaaggcctggtgctgccctggcatcagcctcttccagtcacatctggccagagggctgtctggacctgggccctgctcaatgccacctgtctgcctgggctccaagtgggcaggaccaggacagaaccacaggcacacactgagggggcagtgtggctccctgcctgtcccatccccatgccccgtccgcggggctgtggctgctgctgtgcatgtccctgcgatgggagtcttgtctcccagcctgtcagtttcctccccagggcagagctccccttcctgcgagagtctgggaggcggtgcaggctgtcctggctgctctggggaagccgagggacagccataacacccccgggacagtaggtctgggcggcaccactgggaactctggacttgagtgtgtttgcctcttccttgggtatgaatgtgtgagttcacccagaggcctgctctcctcacacattgtgtggtttggggttaatgatggagggagacacctcctcatagacggcaggtgcccacctttcagggagtctcccagcatgggcggatgccgggcatgagctgctgtaaactatttgtggctgtgctgcttgagtgacgtctctgtcgtgtgggtgccaagtgcttgtgtagaaactgtgttctgagcccccttttctggacaccaactgtgtcctgtgaatgtatcgctactgtgagctgttcccgcctagccagggccatgtcttaggtgcagctgtgccacgggtcagctgagccacagtcccagaaccaagctctcggtgtctcgggccaccatccgcccacctcgggctgaccccacctcctccatggacagtgtgagccccgggccgtgcatcctgctcagtgtggcgtcagtgtcggggctgagccccttgagctgcttcagtgaatgtacagtgcccggcacgagctgaacctcatgtgttccactcccaataaaaggttgacagggaaaaaaaaaaaaaaaaaaaaaaaaaaaaaaaaaaaaaaaaaaaaaaaaaaaaaaaaaaaaaagaagagagggggggcgcgcgccgccagaaagatattcccgccgcgagggggggcccgccgcagctcggcacgcgcggcacccacgcatttcttgttgttagacacagaggcggcgcctccaatagaggagggacgcctctcttataataaagccgaggacgcgcgcacggggcgcgccgcgcggtatataacagaacgagcgcgctgcgagagcgcgaggcgacaaaagcgcgtgccgacacgcgggagaccacacttgtggggagggagagagcgaccaccccatctatctgtcgggggggagggagcgacacaaaactatgtgtgggcgggcgaacaacctctctctctccatagaaagagaatttattaagacgcgcctctcgaggggg

SEQ ID NO: 378388 - DNA, 3105 bp, Homo sapiens
acgtgcatggtgcggagcccaggccctagggaatcgtggggtcgtatcccgcgggtggaggccggggtggcgccggccggggcgggggagcccaaaagaccggctgccgcctgctccccggaaaagggcactcgtctccgtgggtgtggcggagcgcgcggtgcatggaatgggctatgtgaatgaaaaaaggtatccgttatgaaacttccagaaaaacgagctacatttttcagcagccgcagcacggtccttggcaaacaaggatgagaaaaatatccaaccacgggagcctgcgggtggcgaaggtggcataccccctggggctgtgtgtgggcgtgttcatctatgttgcctacatcaagtggcaccgggccaccgccacccaggccttcttcagcatcaccagggcagccccgggggcccggtggggtcagcaggcccacagccccctggggacagctgcagacgggcacgaggtcttctacgggatcatgtttgatgcaggaagcactggcacccgagtacacgtcttccagttcacccggccccccagagaaactcccacgttaacccacgaaaccttcaaagcactgaagccaggtctttctgcctatgctgatgatgttgaaaagagcgctcagggaatccgggaactactggatgttgctaaacaggacattccgttcgacttctggaaggccacccctctggtcctcaaggccacagctggcttacgcctgttacctggagaaaaggcccagaagttactgcagaaggtgaaagaagtatttaaagcatcgcctttccttgtaggggatgactgtgtttccatcatgaacggaacagatgaaggcgtttcggcgtggatcaccatcaacttcctgacaggcagcttgaaaactccaggagggagcagcgtgggcatgctggacttgggcggaggatccactcagatcgccttcctgccacgcgtggagggcaccctgcaggcctccccacccggctacctgacggcactgcggatgtttaacaggacctacaagctctattcctacagctacctcgggctcgggctgatgtcggcacgcctggcgatcctgggcggcgtggaggggcagcctgcggcaagcctgcacgagctgtgtgctgccagagtgtcagaggtccttcaaaacagagtgcacaggacggaggaagtgaagcatgtggacttctatgctttctcctactattacgaccttgcagctggtgtgggcctcatagatgcggagaagggaggcagcctggtggtgggggacttcgagatcgcagccaagtacgtgtgtcggaccctggagacacagccgcagagcagccccttctcatgcatggacctcacctacgtcagcctgctactccaggagttcggctttcccaggagcaaagtgctgaagctcactcggaaaattgacaatgttgagaccagctgggctctgggggccatttttcattacatcgactccctgaacagacagaagagtccagcctcatagtggccgagccatccctgtccccgtcagcagtgtctgtgtgtctgcataaaccctcctgtcctggacgtgacttcatcctgaggagccacagcacaggccgtgctggcactttctgcacactggctctgggacttgcagaaggcctggtgctgccctggcatcagcctcttccagtcacatctggccagagggctgtctggacctgggccctgctcaatgccacctgtctgcctgggctccaagtgggcaggaccaggacagaaccacaggcacacactgagggggcagtgtggctccctgcctgtcccatccccatgccccgtccgcggggctgtggctgctgctgtgcatgtccctgcgatgggagtcttgtctcccagcctgtcagtttcctccccagggcagagctccccttcctgcgagagtctgggaggcggtgcaggctgtcctggctgctctggggaagccgagggacagccataacacccccgggacagtaggtctgggcggcaccactgggaactctggacttgagtgtgtttgcctcttccttgggtatgaatgtgtgagttcacccagaggcctgctctcctcacacattgtgtggtttggggttaatgatggagggagacacctcctcatagacggcaggtgcccacctttcagggagtctcccagcatgggcggatgccgggcatgagctgctgtaaactatttgtggctgtgctgcttgagtgacgtctctgtcgtgtgggtgccaagtgcttgtgtagaaactgtgttctgagcccccttttctggacaccaactgtgtcctgtgaatgtatcgctactgtgagctgttcccgcctagccagggccatgtcttaggtgcagctgtgccacgggtcagctgagccacagtcccagaaccaagctctcggtgtctcgggccaccatccgcccacctcgggctgaccccacctcctccatggacagtgtgagccccgggccgtgcatcctgctcagtgtggcgtcagtgtcggggctgagccccttgagctgcttcagtgaatgtacagtgcccggcacgagctgaacctcatgtgttccactcccaataaaaggttgacagggaaaaaaaaaaaaaaaaaaaaaaaaaaaaaaaaaaaaaaaaaaaaaaaaaaaaaaaaaaaaaagaagagagggggggcgcgcgccgccagaaagatattcccgccgcgagggggggcccgccgcagctcggcacgcgcggcacccacgcatttcttgttgttagacacagaggcggcgcctccaatagaggagggacgcctctcttataataaagccgaggacgcgcgcacggggcgcgccgcgcggtatataacagaacgagcgcgctgcgagagcgcgaggcgacaaaagcgcgtgccgacacgcgggagaccacacttgtggggagggagagagcgaccaccccatctatctgtcgggggggagggagcgacacaaaactatgtgtgggcgggcgaacaacctctctctctccatagaaagagaatttattaagacgcgcctctcgaggggg

SEQ ID NO: 378389 - DNA, 2816 bp, Homo sapiens
acgtgcatggtgcggagcccaggccctagggaatcgtggggtcgtatcccgcgggtggaggccggggtggcgccggccggggcgggggagcccaaaagaccggctgccgcctgctccccggaaaagggcactcgtctccgtgggtgtggcggagcgcgcggtgcatgaaactcccacgttaacccacgaaaccttcaaagcactgaagccaggtctttctgcctatgctgatgatgttgaaaagagcgctcagggaatccgggaactactggatgttgctaaacaggacattccgttcgacttctggaaggccacccctctggtcctcaaggccacagctggcttacgcctgttacctggagaaaaggcccagaagttactgcagaaggtgaaagaagtatttaaagcatcgcctttccttgtaggggatgactgtgtttccatcatgaacggaacagatgaaggcgtttcggcgtggatcaccatcaacttcctgacaggcagcttgaaaactccaggagggagcagcgtgggcatgctggacttgggcggaggatccactcagatcgccttcctgccacgcgtggagggcaccctgcaggcctccccacccggctacctgacggcactgcggatgtttaacaggacctacaagctctattcctacagctacctcgggctcgggctgatgtcggcacgcctggcgatcctgggcggcgtggaggggcagcctgctaaggatggaaaggagttggtcagcccttgcttgtctcccagtttcaaaggagagtgggaacacgcagaagtcacgtacagggtttcagggcagaaagcagcggcaagcctgcacgagctgtgtgctgccagagtgtcagaggtccttcaaaacagagtgcacaggacggaggaagtgaagcatgtggacttctatgctttctcctactattacgaccttgcagctggtgtgggcctcatagatgcggagaagggaggcagcctggtggtgggggacttcgagatcgcagccaagtacgtgtgtcggaccctggagacacagccgcagagcagccccttctcatgcatggacctcacctacgtcagcctgctactccaggagttcggctttcccaggagcaaagtgctgaagctcactcggaaaattgacaatgttgagaccagctgggctctgggggccatttttcattacatcgactccctgaacagacagaagagtccagcctcatagtggccgagccatccctgtccccgtcagcagtgtctgtgtgtctgcataaaccctcctgtcctggacgtgacttcatcctgaggagccacagcacaggccgtgctggcactttctgcacactggctctgggacttgcagaaggcctggtgctgccctggcatcagcctcttccagtcacatctggccagagggctgtctggacctgggccctgctcaatgccacctgtctgcctgggctccaagtgggcaggaccaggacagaaccacaggcacacactgagggggcagtgtggctccctgcctgtcccatccccatgccccgtccgcggggctgtggctgctgctgtgcatgtccctgcgatgggagtcttgtctcccagcctgtcagtttcctccccagggcagagctccccttcctgcgagagtctgggaggcggtgcaggctgtcctggctgctctggggaagccgagggacagccataacacccccgggacagtaggtctgggcggcaccactgggaactctggacttgagtgtgtttgcctcttccttgggtatgaatgtgtgagttcacccagaggcctgctctcctcacacattgtgtggtttggggttaatgatggagggagacacctcctcatagacggcaggtgcccacctttcagggagtctcccagcatgggcggatgccgggcatgagctgctgtaaactatttgtggctgtgctgcttgagtgacgtctctgtcgtgtgggtgccaagtgcttgtgtagaaactgtgttctgagcccccttttctggacaccaactgtgtcctgtgaatgtatcgctactgtgagctgttcccgcctagccagggccatgtcttaggtgcagctgtgccacgggtcagctgagccacagtcccagaaccaagctctcggtgtctcgggccaccatccgcccacctcgggctgaccccacctcctccatggacagtgtgagccccgggccgtgcatcctgctcagtgtggcgtcagtgtcggggctgagccccttgagctgcttcagtgaatgtacagtgcccggcacgagctgaacctcatgtgttccactcccaataaaaggttgacagggaaaaaaaaaaaaaaaaaaaaaaaaaaaaaaaaaaaaaaaaaaaaaaaaaaaaaaaaaaaaaagaagagagggggggcgcgcgccgccagaaagatattcccgccgcgagggggggcccgccgcagctcggcacgcgcggcacccacgcatttcttgttgttagacacagaggcggcgcctccaatagaggagggacgcctctcttataataaagccgaggacgcgcgcacggggcgcgccgcgcggtatataacagaacgagcgcgctgcgagagcgcgaggcgacaaaagcgcgtgccgacacgcgggagaccacacttgtggggagggagagagcgaccaccccatctatctgtcgggggggagggagcgacacaaaactatgtgtgggcgggcgaacaacctctctctctccatagaaagagaatttattaagacgcgcctctcgaggggg

SEQ ID NO: 378390 - DNA, 2994 bp, Homo sapiens
acgtgcatggtgcggagcccaggccctagggaatcgtggggtcgtatcccgcgggtggaggccggggtggcgccggccggggcgggggagcccaaaagaccggctgccgcctgctccccggaaaagggcactcgtctccgtgggtgtggcggagcgcgcggtgcatgcagccgcagcacggtccttggcaaacaaggatgagaaaaatatccaaccacgggagcctgcgggtggcgaaggtggcataccccctggggctgtgtgtgggcgtgttcatctatgttgcctacatcaagtggcaccgggccaccgccacccaggccttcttcagcatcaccagggcagccccgggggcccggtggggtcagcaggcccacagccccctggggacagctgcagacgggcacgaggtcttctacgggatcatgtttgatgcaggaagcactggcacccgagtacacgtcttccagttcacccggccccccagagaaactcccacgttaacccacgaaaccttcaaagcactgaagccaggtctttctgcctatgctgatgatgttgaaaaggtgaaagaagtatttaaagcatcgcctttccttgtaggggatgactgtgtttccatcatgaacggaacagatgaaggcgtttcggcgtggatcaccatcaacttcctgacaggcagcttgaaaactccaggagggagcagcgtgggcatgctggacttgggcggaggatccactcagatcgccttcctgccacgcgtggagggcaccctgcaggcctccccacccggctacctgacggcactgcggatgtttaacaggacctacaagctctattcctacagctacctcgggctcgggctgatgtcggcacgcctggcgatcctgggcggcgtggaggggcagcctgctaaggatggaaaggagttggtcagcccttgcttgtctcccagtttcaaaggagagtgggaacacgcagaagtcacgtacagggtttcagggcagaaagcagcggcaagcctgcacgagctgtgtgctgccagagtgtcagaggtccttcaaaacagagtgcacaggacggaggaagtgaagcatgtggacttctatgctttctcctactattacgaccttgcagctggtgtgggcctcatagatgcggagaagggaggcagcctggtggtgggggacttcgagatcgcagccaagtacgtgtgtcggaccctggagacacagccgcagagcagccccttctcatgcatggacctcacctacgtcagcctgctactccaggagttcggctttcccaggagcaaagtgctgaagctcactcggaaaattgacaatgttgagaccagctgggctctgggggccatttttcattacatcgactccctgaacagacagaagagtccagcctcatagtggccgagccatccctgtccccgtcagcagtgtctgtgtgtctgcataaaccctcctgtcctggacgtgacttcatcctgaggagccacagcacaggccgtgctggcactttctgcacactggctctgggacttgcagaaggcctggtgctgccctggcatcagcctcttccagtcacatctggccagagggctgtctggacctgggccctgctcaatgccacctgtctgcctgggctccaagtgggcaggaccaggacagaaccacaggcacacactgagggggcagtgtggctccctgcctgtcccatccccatgccccgtccgcggggctgtggctgctgctgtgcatgtccctgcgatgggagtcttgtctcccagcctgtcagtttcctccccagggcagagctccccttcctgcgagagtctgggaggcggtgcaggctgtcctggctgctctggggaagccgagggacagccataacacccccgggacagtaggtctgggcggcaccactgggaactctggacttgagtgtgtttgcctcttccttgggtatgaatgtgtgagttcacccagaggcctgctctcctcacacattgtgtggtttggggttaatgatggagggagacacctcctcatagacggcaggtgcccacctttcagggagtctcccagcatgggcggatgccgggcatgagctgctgtaaactatttgtggctgtgctgcttgagtgacgtctctgtcgtgtgggtgccaagtgcttgtgtagaaactgtgttctgagcccccttttctggacaccaactgtgtcctgtgaatgtatcgctactgtgagctgttcccgcctagccagggccatgtcttaggtgcagctgtgccacgggtcagctgagccacagtcccagaaccaagctctcggtgtctcgggccaccatccgcccacctcgggctgaccccacctcctccatggacagtgtgagccccgggccgtgcatcctgctcagtgtggcgtcagtgtcggggctgagccccttgagctgcttcagtgaatgtacagtgcccggcacgagctgaacctcatgtgttccactcccaataaaaggttgacagggaaaaaaaaaaaaaaaaaaaaaaaaaaaaaaaaaaaaaaaaaaaaaaaaaaaaaaaaaaaaaagaagagagggggggcgcgcgccgccagaaagatattcccgccgcgagggggggcccgccgcagctcggcacgcgcggcacccacgcatttcttgttgttagacacagaggcggcgcctccaatagaggagggacgcctctcttataataaagccgaggacgcgcgcacggggcgcgccgcgcggtatataacagaacgagcgcgctgcgagagcgcgaggcgacaaaagcgcgtgccgacacgcgggagaccacacttgtggggagggagagagcgaccaccccatctatctgtcgggggggagggagcgacacaaaactatgtgtgggcgggcgaacaacctctctctctccatagaaagagaatttattaagacgcgcctctcgaggggg

SEQ ID NO: 378391 - DNA, 2852 bp, Homo sapiens
acgtgcatggtgcggagcccaggccctagggaatcgtggggtcgtatcccgcgggtggaggccggggtggcgccggccggggcgggggagcccaaaagaccggctgccgcctgctccccggaaaagggcactcgtctccgtgggtgtggcggagcgcgcggtgcatggaatgggctatgtgaatgaaaaaaggtatccgttatgaaacttccagaaaaacgagctacatttttcagcagccgcagcacggtccttggcaaacaaggatgagaaaaatatccaaccacgggagcctgcgggtggcgaaggtggcataccccctggggctgtgtgtgggcgtgttcatctatgttgcctacatcaagtggcaccgggccaccgccacccaggccttcttcagcatcaccagggcagccccgggggcccggtggggtcagcaggcccacagccccctggggacagctgcagacgggcacgaggtcttctacgggatcatgtttgatgcaggaagcactggcacccgagtacacgtcttccagttcacccggccccccagagaaactcccacgttaacccacgaaaccttcaaagcactgaagccaggtctttctgcctatgctgatgatgttgaaaagagcgctcagggaatccgggaactactggatgttgctaaacaggacattccgttcgacttctggaaggccacccctctggtcctcaaggccacagctggcttacgcctgttacctggagaaaaggcccagaagttactgcagaaggtgaaagaagtatttaaagcatcgcctttccttgtaggggatgactgtgtttccatcatgaacggaacagatgaaggcgtttcggcgtggatcaccatcaacttcctgacaggcagcttgaaaactccaggagggagcagcgtgggcatgctggacttgggcggaggatccactcagatcgccttcctgccacgcgtggagggcaccctgcaggcctccccacccggctacctgacggcactgcggatgtttaacaggacctacaagctctattcctacagctacctcgggctcgggctgatgtcggcacgcctggcgatcctgggcggcgtggaggggcagcctgctaaggatggaaaggagttggtcagcccttgcttgtctcccagtttcaaaggagagtgggaacacgcagaagtcacgtacagggtttcagggcagaaagcagcggcaagcctgcacgagctgtgtgctgccagagtgtcagaggtccttcaaaacagagtgcacaggacggaggaagtgaagcatgtggacttctatgctttctcctactattacgaccttgcagctggtgtgggcctcatagatgcggagaagggaggcagcctggtggtgggggacttcgagatcgcagccaagtacgtgtgtcggaccctggagacacagccgcagagcagccccttctcatgcatggacctcacctacgtcagcctgctactccaggagttcggctttcccaggagcaaagtgctgaagctcactcggaaaattgacaatgttgagaccagctgggctctgggggccatttttcattacatcgactccctgaacagacagaagagtccagcctcatagtggccgagccatccctgtccccgtcagcagtgtctgtgtgtctgcataaaccctcctgtcctggacgtgacttcatcctgaggagccacagcacaggccgtgctggcactttctgcacactggctctgggacttgcagaaggcctggtgctgccctggcatcagcctcttccagtcacatctggccagagggctgtctggacctgggccctgctcaatgccacctgtctgcctgggctccaagtgggcaggaccaggacagaaccacaggcacacactgagggggcagtgtggctccctgcctgtcccatccccatgccccgtccgcggggctgtggctgctgctgtgcatgtccctgcgatgggagtcttgtctcccagcctgtcagtttcctccccagggcagagctccccttcctgcgagagtctgggaggcggtgcaggctgtcctggctgctctggggaagccgagggacagccataacacccccgggacagtaggtctgggcggcaccactgggaactctggacttgagtgtgtttgcctcttccttgggtatgaatgtgtgagttcacccagaggcctgctctcctcacacattgtgtggtttggggttaatgatggagggagacacctcctcatagacggcaggtgcccacctttcagggagtctcccagcatgggcggatgccgggcatgagctgctgtaaactatttgtggctgtgctgcttgagtgacgtctctgtcgtgtgggtgccaagtgcttgtgtagaaactgtgttctgagcccccttttctggacaccaactgtgtcctgtgaatgtatcgctactgtgagctgttcccgcctagccagggccatgtcttaggtgcagctgtgccacgggtcagctgagccacagtcccagaaccaagctctcggtgtctcgggccaccatccgcccacctcgggctgaccccacctcctccatggacagtgtgagccccgggccgtgcatcctgctcagtgtggcgtcagtgtcggggctgagccccttgagctgcttcagtgaatgtacagtgcccggcacgagctgaacctcatgtgttccactcccaataaaaggttgacaggggcttctccttctctgggattcctctcgttgagcgacagtagcatttgcccacctggcacctgagatccctgtttactaaaccttagaaaagctgccaaa

SEQ ID NO: 378392 - DNA, 2261 bp, Homo sapiens
aggcatcagcagcttcctcctcagagtccaggtctgccgctgccttcgtgcccacggtcttcactccctgcgccgggaccaacaatgccctggctcctgagggctgcttttgacctgtgcggggagcagccccaacttggggtggggtcttacaggcttctggacctgccttttcctgacaattcaggtcagagtctcaagtcccctgggaggggccccaagcagctgtgaggcctgggtgctcggagcccactgaccgctagccttgtgcttgtccccagcggcaagcctgcacgagctgtgtgctgccagagtgtcagaggtccttcaaaacagagtgcacaggacggaggaagtgaagcatgtggacttctatgctttctcctactattacgaccttgcagctggtgtgggcctcatagatgcggagaagggaggcagcctggtggtgggggacttcgagatcgcagccaagtacgtgtgtcggaccctggagacacagccgcagagcagccccttctcatgcatggacctcacctacgtcagcctgctactccaggagttcggctttcccaggagcaaagtgctgaagctcactcggaaaattgacaatgttgagaccagctgggctctgggggccatttttcattacatcgactccctgaacagacagaagagtccagcctcatagtggccgagccatccctgtccccgtcagcagtgtctgtgtgtctgcataaaccctcctgtcctggacgtgacttcatcctgaggagccacagcacaggccgtgctggcactttctgcacactggctctgggacttgcagaaggcctggtgctgccctggcatcagcctcttccagtcacatctggccagagggctgtctggacctgggccctgctcaatgccacctgtctgcctgggctccaagtgggcaggaccaggacagaaccacaggcacacactgagggggcagtgtggctccctgcctgtcccatccccatgccccgtccgcggggctgtggctgctgctgtgcatgtccctgcgatgggagtcttgtctcccagcctgtcagtttcctccccagggcagagctccccttcctgcgagagtctgggaggcggtgcaggctgtcctggctgctctggggaagccgagggacagccataacacccccgggacagtaggtctgggcggcaccactgggaactctggacttgagtgtgtttgcctcttccttgggtatgaatgtgtgagttcacccagaggcctgctctcctcacacattgtgtggtttggggttaatgatggagggagacacctcctcatagacggcaggtgcccacctttcagggagtctcccagcatgggcggatgccgggcatgagctgctgtaaactatttgtggctgtgctgcttgagtgacgtctctgtcgtgtgggtgccaagtgcttgtgtagaaactgtgttctgagcccccttttctggacaccaactgtgtcctgtgaatgtatcgctactgtgagctgttcccgcctagccagggccatgtcttaggtgcagctgtgccacgggtcagctgagccacagtcccagaaccaagctctcggtgtctcgggccaccatccgcccacctcgggctgaccccacctcctccatggacagtgtgagccccgggccgtgcatcctgctcagtgtggcgtcagtgtcggggctgagccccttgagctgcttcagtgaatgtacagtgcccggcacgagctgaacctcatgtgttccactcccaataaaaggttgacagggaaaaaaaaaaaaaaaaaaaaaaaaaaaaaaaaaaaaaaaaaaaaaaaaaaaaaaaaaaaaaagaagagagggggggcgcgcgccgccagaaagatattcccgccgcgagggggggcccgccgcagctcggcacgcgcggcacccacgcatttcttgttgttagacacagaggcggcgcctccaatagaggagggacgcctctcttataataaagccgaggacgcgcgcacggggcgcgccgcgcggtatataacagaacgagcgcgctgcgagagcgcgaggcgacaaaagcgcgtgccgacacgcgggagaccacacttgtggggagggagagagcgaccaccccatctatctgtcgggggggagggagcgacacaaaactatgtgtgggcgggcgaacaacctctctctctccatagaaagagaatttattaagacgcgcctctcgaggggg

SEQ ID NO: 378393 - DNA, 1893 bp, Homo sapiens
ggagtgcggagccagcgggtgcctgtagtgggtggaattggggtctgcacttgcccctccgcccccaggtgggagtcacctggagcgtgaagggacgtgtctcatccccagtgtgtcggaccctggagacacagccgcagagcagccccttctcatgcatggacctcacctacgtcagcctgctactccaggagttcggctttcccaggagcaaagtgctgaagctcactcggaaaattgacaatgttgagaccagctgggctctgggggccatttttcattacatcgactccctgaacagacagaagagtccagcctcatagtggccgagccatccctgtccccgtcagcagtgtctgtgtgtctgcataaaccctcctgtcctggacgtgacttcatcctgaggagccacagcacaggccgtgctggcactttctgcacactggctctgggacttgcagaaggcctggtgctgccctggcatcagcctcttccagtcacatctggccagagggctgtctggacctgggccctgctcaatgccacctgtctgcctgggctccaagtgggcaggaccaggacagaaccacaggcacacactgagggggcagtgtggctccctgcctgtcccatccccatgccccgtccgcggggctgtggctgctgctgtgcatgtccctgcgatgggagtcttgtctcccagcctgtcagtttcctccccagggcagagctccccttcctgcgagagtctgggaggcggtgcaggctgtcctggctgctctggggaagccgagggacagccataacacccccgggacagtaggtctgggcggcaccactgggaactctggacttgagtgtgtttgcctcttccttgggtatgaatgtgtgagttcacccagaggcctgctctcctcacacattgtgtggtttggggttaatgatggagggagacacctcctcatagacggcaggtgcccacctttcagggagtctcccagcatgggcggatgccgggcatgagctgctgtaaactatttgtggctgtgctgcttgagtgacgtctctgtcgtgtgggtgccaagtgcttgtgtagaaactgtgttctgagcccccttttctggacaccaactgtgtcctgtgaatgtatcgctactgtgagctgttcccgcctagccagggccatgtcttaggtgcagctgtgccacgggtcagctgagccacagtcccagaaccaagctctcggtgtctcgggccaccatccgcccacctcgggctgaccccacctcctccatggacagtgtgagccccgggccgtgcatcctgctcagtgtggcgtcagtgtcggggctgagccccttgagctgcttcagtgaatgtacagtgcccggcacgagctgaacctcatgtgttccactcccaataaaaggttgacagggaaaaaaaaaaaaaaaaaaaaaaaaaaaaaaaaaaaaaaaaaaaaaaaaaaaaaaaaaaaaaagaagagagggggggcgcgcgccgccagaaagatattcccgccgcgagggggggcccgccgcagctcggcacgcgcggcacccacgcatttcttgttgttagacacagaggcggcgcctccaatagaggagggacgcctctcttataataaagccgaggacgcgcgcacggggcgcgccgcgcggtatataacagaacgagcgcgctgcgagagcgcgaggcgacaaaagcgcgtgccgacacgcgggagaccacacttgtggggagggagagagcgaccaccccatctatctgtcgggggggagggagcgacacaaaactatgtgtgggcgggcgaacaacctctctctctccatagaaagagaatttattaagacgcgcctctcgaggggg

SEQ ID NO: 378394 - DNA, 2635 bp, Homo sapiens
acgtgcatggtgcggagcccaggccctagggaatcgtggggtcgtatcccgcgggtggaggccggggtggcgccggccggggcgggggagcccaaaagaccggctgccgcctgctccccggaaaagggcactcgtctccgtgggtgtggcggagcgcgcggtgcatggaatgggctatgtgaatgaaaaaaggtatccgttatgaaacttccagaaaaacgagctacatttttcagcagccgcagcacggtccttggcaaacaaggatgagaaaaatatccaaccacgggagcctgcgggtggcgaaggtggcataccccctggggctgtgtgtgggcgtgttcatctatgttgcctacatcaagtggcaccgggccaccgccacccaggccttcttcagcatcaccagggcagccccgggggcccggtggggtcagcaggcccacagccccctggggacagctgcagacgggcacgaggtcttctacgggatcatgtttgatgcaggaagcactggcacccgagtacacgtcttccagttcacccggccccccagagaaactcccacgttaacccacgaaaccttcaaagcactgaagccaggtctttctgcctatgctgatgatgttgaaaagagcgctcagggaatccgggaactactggatgttgctaaacaggacattccgttcgacttctggaaggccacccctctggtcctcaaggccacagctggcttacgcctgttacctggagaaaaggcccagaagttactgcagaaggtgaaagaagtatttaaagcatcgcctttccttgtaggggatgactgtgtttccatcatgaacggaacagatgaaggcgtttcggcgtggatcaccatcaacttcctgacaggcagcttgaaaactccaggagggagcagcgtgggcatgctggacttgggcggaggatccactcagatcgccttcctgccacgcgtggagggcaccctgcaggcctccccacccggctacctgacggcactgcggatgtttaacaggacctacaagctctattcctacagctacctcgggctcgggctgatgtcggcacgcctggcgatcctgggcggcgtggaggggcagcctgctaaggatggaaaggagttggtcagcccttgcttgtctcccagtttcaaaggagagtgggaacacgcagaagtcacgtacagggtttcagggcagaaagcagcggcaagcctgcacgagctgtgtgctgccagagtgtcagaggtccttcaaaacagagtgcacaggacggaggaagtgaagcatgtggacttctatgctttctcctactattacgaccttgcagctggtgtgggcctcatagatgcggagaagggaggcagcctggtggtgggggacttcgagatcgcagccaagtacgtgtgtcggaccctggagacacagccgcagagcagccccttctcatgcatggacctcacctacgtcagcctgctactccaggagttcggctttcccaggagcaaagtgctgaagctcactcggaaaattgacaatgttgagaccagctgggctctgggggccatttttcattacatcgactccctgaacagacagaagagtccagcctcatagtggccgagccatccctgtccccgtcagcagtgtctgtgtgtctgcataaaccctcctgtcctggacgtgacttcatcctgaggagccacagcacaggccgtgctggcactttctgcacactggctctgggacttgcagaaggcctggtgctgccctggcatcagcctcttccagtcacatctggccagagggctgtctggacctgggccctgctcaatgccacctgtctgcctgggctccaagtgggcaggaccaggacagaaccacaggcacacactgagggggcagtgtggctccctgcctgtcccatccccatgccccgtccgcggggctgtggctgctgctgtgcatgtccctgcgatgggagtcttgtctcccagcctgtcagtttcctccccagggcagagctccccttcctgcgagagtctgggaggcggtgcaggctgtcctggctgctctggggaagccgagggacagccataacacccccgggacagtaggtctgggcggcaccactgggaactctggacttgagtgtgtttgcctcttccttgggtatgaatgtgtgagttcacccagaggcctgctctcctcacacattgtgtggtttggggttaatgatggagggagacacctcctcatagacggcaggtgcccacctttcagggagtctcccagcatgggcggatgccgggcatgagctgctgtaaactatttgtggctgtgctgcttgagtgacgtctctgtcgtgtgggtgccaagtgcttgtgtagaaactgtgttctgagcccccttttctggacaccaactgtgtcctgtgaatgtatcgctactgtgagctgttcccgcctagccagggccatgtcttaggtgcagctgtgccacgggtcagctgagccacagtcggggctgagccccttgagctgcttcagtgaatgtacagtgcccggcacgagctgaacctcatgtgttccactcccaataaaaggttgacaggg

SEQ ID NO: 378395 - DNA, 1527 bp, Homo sapiens
tctcctggagctgttctggtctcagaggcttggttccatttctcacctgaacagatgagtcctgggagagaccctcagagatccgcccagacccctctcctgccctctgcacaccagcagcaggcatgaaccttgggtctgggaaaaagctttaacctgctgggccctgctcaatgccacctgtctgcctgggctccaagtgggcaggaccaggacagaaccacaggcacacactgagggggcagtgtggctccctgcctgtcccatccccatgccccgtccgcggggctgtggctgctgctgtgcatgtccctgcgatgggagtcttgtctcccagcctgtcagtttcctccccagggcagagctccccttcctgcgagagtctgggaggcggtgcaggctgtcctggctgctctggggaagccgagggacagccataacacccccgggacagtaggtctgggcggcaccactgggaactctggacttgagtgtgtttgcctcttccttgggtatgaatgtgtgagttcacccagaggcctgctctcctcacacattgtgtggtttggggttaatgatggagggagacacctcctcatagacggcaggtgcccacctttcagggagtctcccagcatgggcggatgccgggcatgagctgctgtaaactatttgtggctgtgctgcttgagtgacgtctctgtcgtgtgggtgccaagtgcttgtgtagaaactgtgttctgagcccccttttctggacaccaactgtgtcctgtgaatgtatcgctactgtgagctgttcccgcctagccagggccatgtcttaggtgcagctgtgccacgggtcagctgagccacagtcccagaaccaagctctcggtgtctcgggccaccatccgcccacctcgggctgaccccacctcctccatggacagtgtgagccccgggccgtgcatcctgctcagtgtggcgtcagtgtcggggctgagccccttgagctgcttcagtgaatgtacagtgcccggcacgagctgaacctcatgtgttccactcccaataaaaggttgacagggaaaaaaaaaaaaaaaaaaaaaaaaaaaaaaaaaaaaaaaaaaaaaaaaaaaaaaaaaaaaaagaagagagggggggcgcgcgccgccagaaagatattcccgccgcgagggggggcccgccgcagctcggcacgcgcggcacccacgcatttcttgttgttagacacagaggcggcgcctccaatagaggagggacgcctctcttataataaagccgaggacgcgcgcacggggcgcgccgcgcggtatataacagaacgagcgcgctgcgagagcgcgaggcgacaaaagcgcgtgccgacacgcgggagaccacacttgtggggagggagagagcgaccaccccatctatctgtcgggggggagggagcgacacaaaactatgtgtgggcgggcgaacaacctctctctctccatagaaagagaatttattaagacgcgcctctcgaggggg

SEQ ID NO: 378396 - DNA, 1773 bp, Homo sapiens
acgtgcatggtgcggagcccaggccctagggaatcgtggggtcgtatcccgcgggtggaggccggggtggcgccggccggggcgggggagcccaaaagaccggctgccgcctgctccccggaaaagggcactcgtctccgtgggtgtggcggagcgcgcggtgcatggaatgggctatgtgaatgaaaaaaggtatccgttatgaaacttccagaaaaacgagctacatttttcagcagccgcagcacggtccttggcaaacaaggatgagaaaaatatccaaccacgggagcctgcgggtggcgaaggtggcataccccctggggctgtgtgtgggcgtgttcatctatgttgcctacatcaagtggcaccgggccaccgccacccaggccttcttcagcatcaccagggcagccccgggggcccggtggggtcagcaggcccacagccccctggggacagctgcagacgggcacgaggtcttctacgggatcatgtttgatgcaggaagcactggcacccgagtacacgtcttccagttcacccggccccccagagaaactcccacgttaacccacgaaaccttcaaagcactgaagccaggtctttctgcctatgctgatgatgttgaaaagagcgctcagggaatccgggaactactggatgttgctaaacaggacattccgttcgacttctggaaggccacccctctggtcctcaaggccacagctggcttacgcctgttacctggagaaaaggcccagaagttactgcagaaggtgaaagaagtatttaaagcatcgcctttccttgtaggggatgactgtgtttccatcatgaacggaacagatgaaggcgtttcggcgtggatcaccatcaacttcctgacaggcagcttgaaaactccaggagggagcagcgtgggcatgctggacttgggcggaggatccactcagatcgccttcctgccacgcgtggagggcaccctgcaggcctccccacccggctacctgacggcactgcggatgtttaacaggacctacaagctctattcctacagctacctcgggctcgggctgatgtcggcacgcctggcgatcctgggcggcgtggaggggcagcctgctaaggatggaaaggagttggtcagcccttgcttgtctcccagtttcaaaggagagtgggaacacgcagaagtcacgtacagggtttcagggcagaaagcagcggcaagcctgcacgagctgtgtgctgccagagtgtcagaggtccttcaaaacagagtgcacaggacggaggaagtgaagcatgtggacttctatgctttctcctactattacgaccttgcagctggtgtgggcctcatagatgcggagaagggaggcagcctggtggtgggggacttcgagatcgcagccaagtacgtgtgtcggaccctggagacacagccgcagagcagccccttctcatgcatggacctcacctacgtcagcctgctactccaggagttcggctttcccaggagcaaagtgctgaagctcactcggaacaacttgacaatgtttgagacccaaggcttgggggcccttccttgggggggacggggcccacatttcttttccatttcacgatcgagtgcccttgaaacaggacaagacacagttccaagccttcattagtgggccggaggcccatttcccctgtggttacaccccccggggttctcccaacagggcgccaaaggggtctttggggcgtctcatccccctgttg

SEQ ID NO: 378397 - DNA, 2328 bp, Homo sapiens
acgtgcatggtgcggagcccaggccctagggaatcgtggggtcgtatcccgcgggtggaggccggggtggcgccggccggggcgggggagcccaaaagaccggctgccgcctgctccccggaaaagggcactcgtctccgtgggtgtggcggagcgcgcggtgcatggaatgggctatgtgaatgaaaaaaggtatccgttatgaaacttccagaaaaacgagctacatttttcagcagccgcagcacggtccttggcaaacaaggatgagaaaaatatccaaccacgggagcctgcgggtggcgaaggtggcataccccctggggctgtgtgtgggcgtgttcatctatgttgcctacatcaagtggcaccgggccaccgccacccaggccttcttcagcatcaccagggcagccccgggggcccggtggggtcagcaggcccacagccccctggggacagctgcagacgggcacgaggtcttctacgggatcatgtttgatgcaggaagcactggcacccgagtacacgtcttccagttcacccggccccccagagaaactcccacgttaacccacgaaaccttcaaagcactgaagccaggtctttctgcctatgctgatgatgttgaaaagagcgctcagggaatccgggaactactggatgttgctaaacaggacattccgttcgacttctggaaggccacccctctggtcctcaaggccacagctggcttacgcctgttacctggagaaaaggcccagaagttactgcagaaggtgaaagaagtatttaaagcatcgcctttccttgtaggggatgactgtgtttccatcatgaacggaacagatgaaggcgtttcggcgtggatcaccatcaacttcctgacaggcagcttgaaaactccaggagggagcagcgtgggcatgctggacttgggcggaggatccactcagatcgccttcctgccacgcgtggagggcaccctgcaggcctccccacccggctacctgacggcactgcggatgtttaacaggacctacaagctctattcctacagctacctcgggctcgggctgatgtcggcacgcctggcgatcctgggcggcgtggaggggcagcctgctaaggatggaaaggagttggtcagcccttgcttgtctcccagtttcaaaggagagtgggaacacgcagaagtcacgtacagggtttcagggcagaaagcaggtacggggagggttgctgcctgttggtttctgcgggtgagagtggtggcctcctctcccccttgcctttcccacatcccatgggacgttccacgggaggctcctgacctctctttgaagagcctgtacctgccctggaagtgaaggtggtttggctgcaggggcctgtgtctgtgctgagagccagctccttccctctgcctctgttcaacattcccctgactgtcaccagaagcttcctcctgagggctgatttcctaacaggcctgcagggaggaaggactggaccagcttggggctgagatgcagggctgggactgggagcccaggcactctgtgctgtgctgggcgggaatagagggagggtctgcttccacccatcctgctcgaggctatggagcccgctggccctgggcaggctctagtgctctgcacccttgcagtttcttctgagagaaatgttcaaacgccattcccagactgggcactcggcatgaggggtgcatgccttcgcgaaccgttcaggtccttccaagtcaatcacccactggtgcgtgtaccggggggccgcatcaggcacagcaggactgcacagctgtgtcccacaggaggagccagacagttatttcatcgggaaagccttccaagagaaataacacggggcggggatctgagagggcgatcgcagctgtaactaggacagccaaggacggcctcgtggggtaacatgggatctaagacaggaggaggtttcaagaaactgcgcagatctgaagcagcagcaccccaggccgcacaagcagcacacaccggggccctctgtcagctgctgtgtttaatgaacgaggaggaggtggtgtggcttggtgggggacaccaggaggaaatgagccagaaccaagctctcggtgtctcgggccaccatccgcccacctcgggctgaccccacctcctccatggacagtgtgagccccgggccgtgcatcctgctcagtgtggcgtcagtgtcggggctgagccccttgagctgcttcagtgaatgtacagtgcccggcacgagctgaacctcatgtgttccactcccaataaaaggttgacaggg

SEQ ID NO: 378398 - DNA, 1541 bp, Homo sapiens
  misc_feature (1477)..(1477): n is a, c, g, or t
acgtgcatggtgcggagcccaggccctagggaatcgtggggtcgtatcccgcgggtggaggccggggtggcgccggccggggcgggggagcccaaaagaccggctgccgcctgctccccggaaaagggcactcgtctccgtgggtgtggcggagcgcgcggtgcatggaatgggctatgtgaatgaaaaaaggtatccgttatgaaacttccagaaaaacgagctacatttttcagcagccgcagcacggtccttggcaaacaaggatgagaaaaatatccaaccacgggagcctgcgggtggcgaaggtggcataccccctggggctgtgtgtgggcgtgttcatctatgttgcctacatcaagtggcaccgggccaccgccacccaggccttcttcagcatcaccagggcagccccgggggcccggtggggtcagcaggcccacagccccctggggacagctgcagacgggcacgaggtcttctacgggatcatgtttgatgcaggaagcactggcacccgagtacacgtcttccagttcacccggccccccagagaaactcccacgttaacccacgaaaccttcaaagcactgaagccaggtctttctgcctatgctgatgatgttgaaaagagcgctcagggaatccgggaactactggatgttgctaaacaggacattccgttcgacttctggaaggccacccctctggtcctcaaggccacagctggcttacgcctgttacctggagaaaaggcccagaagttactgcagaaggtgaaagaagtatttaaagcatcgcctttccttgtaggggatgactgtgtttccatcatgaacggaacagatgaaggcgtttcggcgtggatcaccatcaacttcctgacaggcagcttgaaaactccaggagggagcagcgtgggcatgctggacttgggcggaggatccactcagatcgccttcctgccacgcgtggagggcaccctgcaggcctccccacccggctacctgacggcactgcggatgtttaacaggacctacaagctctattcctacagctacctcgggctcgggctgatgtcggcacgcctggcgatcctgggcggcgtggaggggcagcctgcggcaagcctgcacgagctgtgtgctgccagagtgtcagaggtccttcaaaacagagtgcacaggacggaggaagtgaagcatgtggacttctatgctttctcctactattacgaccttgcagctggtgtgggcctcatagatgcggagaaggagcagctggtggtgggggccttcgagatcgaaacaagtacgtgtgtcggaccctggaaaacacggcgacaagaagccctttcactctgacctcacttacgtagcctggtctccggatcggttgccagaagcaacgttgagccatcgaaatggaacttggcacctggcttgggcatttatatcatctacagaaagtaccntatggcaccgacaccagattgatgtacactccgacatacgcacacacgtcatcagttacaacgc

SEQ ID NO: 378399 - DNA, 1320 bp, Homo sapiens
acgtgcatggtgcggagcccaggccctagggaatcgtggggtcgtatcccgcgggtggaggccggggtggcgccggccggggcgggggagcccaaaagaccggctgccgcctgctccccggaaaagggcactcgtctccgtgggtgtggcggagcgcgcggtgcatggaatgggctatgtgaatgaaaaaaggtatccgttatgaaacttccagaaaaacgagctacatttttcagcagccgcagcacggtccttggcaaacaaggatgagaaaaatatccaaccacgggagcctgcgggtggcgaaggtggcataccccctggggctgtgtgtgggcgtgttcatctatgttgcctacatcaagtggcaccgggccaccgccacccaggccttcttcagcatcaccagggcagccccgggggcccggtggggtcagcaggcccacagccccctggggacagctgcagacgggcacgaggtcttctacgggatcatgtttgatgcaggaagcactggcacccgagtacacgtcttccagttcacccggccccccagagaaactcccacgttaacccacgaaaccttcaaagcactgaagccaggtctttctgcctatgctgatgatgttgaaaagagcgctcagggaatccgggaactactggatgttgctaaacaggacattccgttcgacttctggaaggccacccctctggtcctcaaggccacagctggcttacgcctgttacctggagaaaaggcccagaagttactgcagaaggtgaaagaagtatttaaagcatcgcctttccttgtaggggatgactgtgtttccatcatgaacggaacagatgaaggcgtttcggcgtggatcaccatcaacttcctgacaggcagcttgaaaactccaggagggagcagcgtgggcatgctggacttgggcggaggatccactcagatcgccttcctgccacgcgtggagggcaccctgcaggcctccccacccggctacctgacggcactgcggatgtttaacaggacctacaagctctattcctacagctacctcgggctcgggctgatgtcggcacgcctggcgatcctgggcggcgtggaggggcagcctgctaaggatggaaaggagttggtcagcccttgcttgtctcccagtttcaaaggagagtgggaacacgcagaagtcacgtacagggtttcagggcagaaagcagggggctgagccccttgagctgcttcagtgaatgtacagtgcccggcacgagctgaacctcatgtgttccactcccaataaaaggttgacaggg

SEQ ID NO: 378400 - DNA, 685 bp, Homo sapiens
acgtgcatggtgcggagcccaggccctagggaatcgtggggtcgtatcccgcgggtggaggccggggtggcgccggccggggcgggggagcccaaaagaccggctgccgcctgctccccggaaaagggcactcgtctccgtgggtgtggcggagcgcgcggtgcatggaatgggctatgtgaatgaaaaaaggtatccgttatgaaacttccagaaaaacgagctacatttttcagcagccgcagcacggtccttggcaaacaaggatgagaaaaatatccaaccacgggagcctgcgggtggcgaaggtggcataccccctggggctgtgtgtgggcgtgttcatctatgttgcctacatcaagtggcaccgggccaccgccacccaggccttcttcagcatcaccagggcagccccgggggcccggtggggtcagcaggcccacagccccctggggacagctgcagacgggcacgaggtcttctacgggatcatgtttgatgcatgagctgctgtaaactatttgtggctgtgctgcttgagtgacgtctctgtcgtgtgggtgccaagtgcttgtgtagaaactgtgttggggctgagccccttgagctgcttcagtgaatgtacagtgcccggcacgagctgaacctcatgtgttccactcccaataaaaggttgacaggg

SEQ ID NO: 378401 - DNA, 293 bp, Homo sapiens
agaagtaatgttctggccaagacattaggtattatactcatcttgttctgatgaacaaagagtcagaatttagacaaggaatagctgaagggcccctgccacttggggattggtctgtgttagtgtctgtctttaaaaagtgtggctagtcatgattgtatgtgttctcctgtgtgtattcatagttgtacccttttcaacatgttttccccttagaaactcccacgttaacccacgaaaccttcaaagcactgaagccaggtctttctgcctatgctgatgatgttgaaaag

SEQ ID NO: 378402 - DNA, 2753 bp, Homo sapiens
acgtgcatggtgcggagcccaggccctagggaatcgtggggtcgtatcccgcgggtggaggccggggtggcgccggccggggcgggggagcccaaaagaccggctgccgcctgctccccggaaaagggcactcgtctccgtgggtgtggcggagcgcgcggtgcatggaatgggctatgtgaatgaaaaaaggtatccgttatgaaacttccagaaaaacgagctacatttttcagcagccgcagcacggtccttggcaaacaaggatgagaaaaatatccaaccacgggagcctgcgggtggcgaaggtggcataccccctggggctgtgtgtgggcgtgttcatctatgttgcctacatcaagtggcaccgggccaccgccacccaggccttcttcagcatcaccagggcagccccgggggcccggtggggtcagcaggcccacagccccctggggacagctgcagacgggcacgaggtcttctacgggatcatgtttgatgcaggaagcactggcacccgagtacacgtcttccagttcacccggccccccagagaaactcccacgttaacccacgaaaccttcaaagcactgaagccaggtctttctgcctatgctgatgatgttgaaaagagcgctcagggaatccgggaactactggatgttgctaaacaggacattccgttcgacttctggaaggccacccctctggtcctcaaggccacagctggcttacgcctgttacctggagaaaaggcccagaagttactgcagaaggtgaaagaagtatttaaagcatcgcctttccttgtaggggatgactgtgtttccatcatgaacggaacagatgaaggcgtttcggcgtggatcaccatcaacttcctgacaggcagcttgaaaactccaggagggagcagcgtgggcatgctggacttgggcggaggatccactcagatcgccttcctgccacgcgtggagggcaccctgcaggcctccccacccggctacctgacggcactgcggatgtttaacaggacctacaagctctattcctacagctacctcgggctcgggctgatgtcggcacgcctggcgatcctgggcggcgtggaggggcagcctgctaaggatggaaaggagttggtcagcccttgcttgtctcccagtttcaaaggagagtgggaacacgcagaagtcacgtacagggtttcagggcagaaagcagcggcaagcctgcacgagctgtgtgctgccagagtgtcagaggtccttcaaaacagagtgcacaggacggaggaagtgaagcatgtggacttctatgctttctcctactattacgaccttgcagctggtgtgggcctcatagatgcggagaagggaggcagcctggtggtgggggacttcgagatcgcagccaagtacgtgtgtcggaccctggagacacagccgcagagcagccccttctcatgcatggacctcacctacgtcagcctgctactccaggagttcggctttcccaggagcaaagtgctgaagctcactcggaaaattgacaatgttgagaccagctgggctctgggggccatttttcattacatcgactccctgaacagacagaagagtccagcctcatagtggccgagccatccctgtccccgtcagcagtgtctgtgtgtctgcataaaccctcctgtcctggacgtgacttcatcctgaggagccacagcacaggccgtgctggcactttctgcacactggctctgggacttgcagaaggcctggtgctgccctggcatcagcctcttccagtcacatctggccagagggctgtctggacctgggccctgctcaatgccacctgtctgcctgggctccaagtgggcaggaccaggacagaaccacaggcacacactgagggggcagtgtggctccctgcctgtcccatccccatgccccgtccgcggggctgtggctgctgctgtgcatgtccctgcgatgggagtcttgtctcccagcctgtcagtttcctccccagggcagagctccccttcctgcgagagtctgggaggcggtgcaggctgtcctggctgctctggggaagccgagggacagccataacacccccgggacagtaggtctgggcggcaccactgggaactctggacttgagtgtgtttgcctcttccttgggtatgaatgtgtgagttcacccagaggcctgctctcctcacacattgtgtggtttggggttaatgatggagggagacacctcctcatagacggcaggtgcccacctttcagggagtctcccagcatgggcggatgccgggcatgagctgctgtaaactatttgtggctgtgctgcttgagtgacgtctctgtcgtgtgggtgccaagtgcttgtgtagaaactgtgttctgagcccccttttctggacaccaactgtgtcctgtgaatgtatcgctactgtgagctgttcccgcctagccagggccatgtcttaggtgcagctgtgccacgggtcagctgagccacagtcccagaaccaagctctcggtgtctcgggccaccatccgcccacctcgggctgaccccacctcctccatggacagtgtgagccccgggccgtgcatcctgctcagtgtggcgtcagtgtcggggctgagccccttgagctgcttcagtgaatgtacagtgcccggcacgagctgaacctcatgtgttccactcccaataaaaggttgacaggg

SEQ ID NO: 378403 - DNA, 337 bp, Homo sapiens
acgtgcatggtgcggagcccaggccctagggaatcgtggggtcgtatcccgcgggtggaggccggggtggcgccggccggggcgggggagcccaaaagaccggctgccgcctgctccccggaaaagggcactcgtctccgtgggtgtggcggagcgcgcggtgcatgaaactcccacgttaacccacgaaaccttcaaagcactgaagccaggtctttctgcctatgctgatgatgttgaaaagggggctgagccccttgagctgcttcagtgaatgtacagtgcccggcacgagctgaacctcatgtgttccactcccaataaaaggttgacaggg

SEQ ID NO: 378404 - DNA, 3250 bp, Homo sapiens
acgtgcatggtgcggagcccaggccctagggaatcgtggggtcgtatcccgcgggtggaggccggggtggcgccggccggggcgggggagcccaaaagaccggctgccgcctgctccccggaaaagggcactcgtctccgtgggtgtggcggagcgcgcggtgcatggaatgggctatgtgaatgaaaaaaggtatccgttatgaaacttccagaaaaacgagctacatttttcagcagccgcagcacggtccttggcaaacaaggatgagaaaaatatccaaccacgggagcctgcgggtggcgaaggtggcataccccctggggctgtgtgtgggcgtgttcatctatgttgcctacatcaagtggcaccgggccaccgccacccaggccttcttcagcatcaccagggcagccccgggggcccggtggggtcagcaggcccacagccccctggggacagctgcagacgggcacgaggtcttctacgggatcatgtttgatgcaggaagcactggcacccgagtacacgtcttccagttcacccggccccccagagaaactcccacgttaacccacgaaaccttcaaagcactgaagccaggtctttctgcctatgctgatgatgttgaaaagagcgctcagggaatccgggaactactggatgttgctaaacaggacattccgttcgacttctggaaggccacccctctggtcctcaaggccacagctggcttacgcctgttacctggagaaaaggcccagaagttactgcagaaggtgaaagaagtatttaaagcatcgcctttccttgtaggggatgactgtgtttccatcatgaacggaacagatgaaggcgtttcggcgtggatcaccatcaacttcctgacaggcagcttgaaaactccaggagggagcagcgtgggcatgctggacttgggcggaggatccactcagatcgccttcctgccacgcgtggagggcaccctgcaggcctccccacccggctacctgacggcactgcggatgtttaacaggacctacaagctctattcctacagctacctcgggctcgggctgatgtcggcacgcctggcgatcctgggcggcgtggaggggcagcctgctaaggatggaaaggagttggtcagcccttgcttgtctcccagtttcaaaggagagtgggaacacgcagaagtcacgtacagggtttcagggcagaaagcagcggcaagcctgcacgagctgtgtgctgccagagtgtcagaggtccttcaaaacagagtgcacaggacggaggaagtgaagcatgtggacttctatgctttctcctactattacgaccttgcagctggtgtgggcctcatagatgcggagaagggaggcagcctggtggtgggggacttcgagatcgcagccaagtacggtgggagtcacctggagcgtgaagggacgtgtctcatccccagtgtgtcggaccctggagacacagccgcagagcagccccttctcatgcatggacctcacctacgtcagcctgctactccaggagttcggctttcccaggagcaaagtgctgaagctcactcggaaaattgacaatgttgagaccagctgggctctgggggccatttttcattacatcgactccctgaacagacagaagagtccagcctcatagtggccgagccatccctgtccccgtcagcagtgtctgtgtgtctgcataaaccctcctgtcctggacgtgacttcatcctgaggagccacagcacaggccgtgctggcactttctgcacactggctctgggacttgcagaaggcctggtgctgccctggcatcagcctcttccagtcacatctggccagagggctgtctggacctgggccctgctcaatgccacctgtctgcctgggctccaagtgggcaggaccaggacagaaccacaggcacacactgagggggcagtgtggctccctgcctgtcccatccccatgccccgtccgcggggctgtggctgctgctgtgcatgtccctgcgatgggagtcttgtctcccagcctgtcagtttcctccccagggcagagctccccttcctgcgagagtctgggaggcggtgcaggctgtcctggctgctctggggaagccgagggacagccataacacccccgggacagtaggtctgggcggcaccactgggaactctggacttgagtgtgtttgcctcttccttgggtatgaatgtgtgagttcacccagaggcctgctctcctcacacattgtgtggtttggggttaatgatggagggagacacctcctcatagacggcaggtgcccacctttcagggagtctcccagcatgggcggatgccgggcatgagctgctgtaaactatttgtggctgtgctgcttgagtgacgtctctgtcgtgtgggtgccaagtgcttgtgtagaaactgtgttctgagcccccttttctggacaccaactgtgtcctgtgaatgtatcgctactgtgagctgttcccgcctagccagggccatgtcttaggtgcagctgtgccacgggtcagctgagccacagtcccagaaccaagctctcggtgtctcgggccaccatccgcccacctcgggctgaccccacctcctccatggacagtgtgagccccgggccgtgcatcctgctcagtgtggcgtcagtgtcggggctgagccccttgagctgcttcagtgaatgtacagtgcccggcacgagctgaacctcatgtgttccactcccaataaaaggttgacagggaaaaaaaaaaaaaaaaaaaaaaaaaaaaaaaaaaaaaaaaaaaaaaaaaaaaaaaaaaaaaagaagagagggggggcgcgcgccgccagaaagatattcccgccgcgagggggggcccgccgcagctcggcacgcgcggcacccacgcatttcttgttgttagacacagaggcggcgcctccaatagaggagggacgcctctcttataataaagccgaggacgcgcgcacggggcgcgccgcgcggtatataacagaacgagcgcgctgcgagagcgcgaggcgacaaaagcgcgtgccgacacgcgggagaccacacttgtggggagggagagagcgaccaccccatctatctgtcgggggggagggagcgacacaaaactatgtgtgggcgggcgaacaacctctctctctccatagaaagagaatttattaagacgcgcctctcgaggggg

SEQ ID NO: 378405 - DNA, 3148 bp, Homo sapiens
acgtgcatggtgcggagcccaggccctagggaatcgtggggtcgtatcccgcgggtggaggccggggtggcgccggccggggcgggggagcccaaaagaccggctgccgcctgctccccggaaaagggcactcgtctccgtgggtgtggcggagcgcgcggtgcatggaatgggctatgtgaatgaaaaaaggtatccgttatgaaacttccagaaaaacgagctacatttttcagcagccgcagcacggtccttggcaaacaaggatgagaaaaatatccaaccacgggagcctgcgggtggcgaaggtggcataccccctggggctgtgtgtgggcgtgttcatctatgttgcctacatcaagtggcaccgggccaccgccacccaggccttcttcagcatcaccagggcagccccgggggcccggtggggtcagcaggcccacagccccctggggacagctgcagacgggcacgaggtcttctacgggatcatgtttgatgcaggaagcactggcacccgagtacacgtcttccagttcacccggccccccagagaaactcccacgttaacccacgaaaccttcaaagcactgaagccaggtctttctgcctatgctgatgatgttgaaaagagcgctcagggaatccgggaactactggatgttgctaaacaggacattccgttcgacttctggaaggccacccctctggtcctcaaggccacagctggcttacgcctgttacctggagaaaaggcccagaagttactgcagaaggtgaaagaagtatttaaagcatcgcctttccttgtaggggatgactgtgtttccatcatgaacggaacagatgaaggcgtttcggcgtggatcaccatcaacttcctgacaggcagcttgaaaactccaggagggagcagcgtgggcatgctggacttgggcggaggatccactcagatcgccttcctgccacgcgtggagggcaccctgcaggcctccccacccggctacctgacggcactgcggatgtttaacaggacctacaagctctattcctacagctacctcgggctcgggctgatgtcggcacgcctggcgatcctgggcggcgtggaggggcagcctgcggcaagcctgcacgagctgtgtgctgccagagtgtcagaggtccttcaaaacagagtgcacaggacggaggaagtgaagcatgtggacttctatgctttctcctactattacgaccttgcagctggtgtgggcctcatagatgcggagaagggaggcagcctggtggtgggggacttcgagatcgcagccaagtacggtgggagtcacctggagcgtgaagggacgtgtctcatccccagtgtgtcggaccctggagacacagccgcagagcagccccttctcatgcatggacctcacctacgtcagcctgctactccaggagttcggctttcccaggagcaaagtgctgaagctcactcggaaaattgacaatgttgagaccagctgggctctgggggccatttttcattacatcgactccctgaacagacagaagagtccagcctcatagtggccgagccatccctgtccccgtcagcagtgtctgtgtgtctgcataaaccctcctgtcctggacgtgacttcatcctgaggagccacagcacaggccgtgctggcactttctgcacactggctctgggacttgcagaaggcctggtgctgccctggcatcagcctcttccagtcacatctggccagagggctgtctggacctgggccctgctcaatgccacctgtctgcctgggctccaagtgggcaggaccaggacagaaccacaggcacacactgagggggcagtgtggctccctgcctgtcccatccccatgccccgtccgcggggctgtggctgctgctgtgcatgtccctgcgatgggagtcttgtctcccagcctgtcagtttcctccccagggcagagctccccttcctgcgagagtctgggaggcggtgcaggctgtcctggctgctctggggaagccgagggacagccataacacccccgggacagtaggtctgggcggcaccactgggaactctggacttgagtgtgtttgcctcttccttgggtatgaatgtgtgagttcacccagaggcctgctctcctcacacattgtgtggtttggggttaatgatggagggagacacctcctcatagacggcaggtgcccacctttcagggagtctcccagcatgggcggatgccgggcatgagctgctgtaaactatttgtggctgtgctgcttgagtgacgtctctgtcgtgtgggtgccaagtgcttgtgtagaaactgtgttctgagcccccttttctggacaccaactgtgtcctgtgaatgtatcgctactgtgagctgttcccgcctagccagggccatgtcttaggtgcagctgtgccacgggtcagctgagccacagtcccagaaccaagctctcggtgtctcgggccaccatccgcccacctcgggctgaccccacctcctccatggacagtgtgagccccgggccgtgcatcctgctcagtgtggcgtcagtgtcggggctgagccccttgagctgcttcagtgaatgtacagtgcccggcacgagctgaacctcatgtgttccactcccaataaaaggttgacagggaaaaaaaaaaaaaaaaaaaaaaaaaaaaaaaaaaaaaaaaaaaaaaaaaaaaaaaaaaaaaagaagagagggggggcgcgcgccgccagaaagatattcccgccgcgagggggggcccgccgcagctcggcacgcgcggcacccacgcatttcttgttgttagacacagaggcggcgcctccaatagaggagggacgcctctcttataataaagccgaggacgcgcgcacggggcgcgccgcgcggtatataacagaacgagcgcgctgcgagagcgcgaggcgacaaaagcgcgtgccgacacgcgggagaccacacttgtggggagggagagagcgaccaccccatctatctgtcgggggggagggagcgacacaaaactatgtgtgggcgggcgaacaacctctctctctccatagaaagagaatttattaagacgcgcctctcgaggggg

SEQ ID NO: 378406 - DNA, 3151 bp, Homo sapiens
atggctttactggttagattactggtcaggtcggtcgtacacggtctgaaccgcctgctccccggaaaagggcactcgtctccgtgggtgtggcggagcgcgcggtgcatggaatgggctatgtgaatgaaaaaaggtatccgttatgaaacttccagaaaaacgagctacatttttcagcagccgcagcacggtccttggcaaacaaggatgagaaaaatatccaaccacgggagcctgcgggtggcgaaggtggcataccccctggggctgtgtgtgggcgtgttcatctatgttgcctacatcaagtggcaccgggccaccgccacccaggccttcttcagcatcaccagggcagccccgggggcccggtggggtcagcaggcccacagccccctggggacagctgcagacgggcacgaggtcttctacgggatcatgtttgatgcaggaagcactggcacccgagtacacgtcttccagttcacccggccccccagagaaactcccacgttaacccacgaaaccttcaaagcactgaagccaggtctttctgcctatgctgatgatgttgaaaagagcgctcagggaatccgggaactactggatgttgctaaacaggacattccgttcgacttctggaaggccacccctctggtcctcaaggccacagctggcttacgcctgttacctggagaaaaggcccagaagttactgcagaaggtgaaagaagtatttaaagcatcgcctttccttgtaggggatgactgtgtttccatcatgaacggaacagatgaaggcgtttcggcgtggatcaccatcaacttcctgacaggcagcttgaaaactccaggagggagcagcgtgggcatgctggacttgggcggaggatccactcagatcgccttcctgccacgcgtggagggcaccctgcaggcctccccacccggctacctgacggcactgcggatgtttaacaggacctacaagctctattcctacagctacctcgggctcgggctgatgtcggcacgcctggcgatcctgggcggcgtggaggggcagcctgctaaggatggaaaggagttggtcagcccttgcttgtctcccagtttcaaaggagagtgggaacacgcagaagtcacgtacagggtttcagggcagaaagcagcggcaagcctgcacgagctgtgtgctgccagagtgtcagaggtccttcaaaacagagtgcacaggacggaggaagtgaagcatgtggacttctatgctttctcctactattacgaccttgcagctggtgtgggcctcatagatgcggagaagggaggcagcctggtggtgggggacttcgagatcgcagccaagtacgtgtgtcggaccctggagacacagccgcagagcagccccttctcatgcatggacctcacctacgtcagcctgctactccaggagttcggctttcccaggagcaaagtgctgaagctcactcggaaaattgacaatgttgagaccagctgggctctgggggccatttttcattacatcgactccctgaacagacagaagagtccagcctcatagtggccgagccatccctgtccccgtcagcagtgtctgtgtgtctgcataaaccctcctgtcctggacgtgacttcatcctgaggagccacagcacaggccgtgctggcactttctgcacactggctctgggacttgcagaaggcctggtgctgccctggcatcagcctcttccagtcacatctggccagagggctgtctggacctgggccctgctcaatgccacctgtctgcctgggctccaagtgggcaggaccaggacagaaccacaggcacacactgagggggcagtgtggctccctgcctgtcccatccccatgccccgtccgcggggctgtggctgctgctgtgcatgtccctgcgatgggagtcttgtctcccagcctgtcagtttcctccccagggcagagctccccttcctgcgagagtctgggaggcggtgcaggctgtcctggctgctctggggaagccgagggacagccataacacccccgggacagtaggtctgggcggcaccactgggaactctggacttgagtgtgtttgcctcttccttgggtatgaatgtgtgagttcacccagaggcctgctctcctcacacattgtgtggtttggggttaatgatggagggagacacctcctcatagacggcaggtgcccacctttcagggagtctcccagcatgggcggatgccgggcatgagctgctgtaaactatttgtggctgtgctgcttgagtgacgtctctgtcgtgtgggtgccaagtgcttgtgtagaaactgtgttctgagcccccttttctggacaccaactgtgtcctgtgaatgtatcgctactgtgagctgttcccgcctagccagggccatgtcttaggtgcagctgtgccacgggtcagctgagccacagtcccagaaccaagctctcggtgtctcgggccaccatccgcccacctcgggctgaccccacctcctccatggacagtgtgagccccgggccgtgcatcctgctcagtgtggcgtcagtgtcggggctgagccccttgagctgcttcagtgaatgtacagtgcccggcacgagctgaacctcatgtgttccactcccaataaaaggttgacagggaaaaaaaaaaaaaaaaaaaaaaaaaaaaaaaaaaaaaaaaaaaaaaaaaaaaaaaaaaaaaagaagagagggggggcgcgcgccgccagaaagatattcccgccgcgagggggggcccgccgcagctcggcacgcgcggcacccacgcatttcttgttgttagacacagaggcggcgcctccaatagaggagggacgcctctcttataataaagccgaggacgcgcgcacggggcgcgccgcgcggtatataacagaacgagcgcgctgcgagagcgcgaggcgacaaaagcgcgtgccgacacgcgggagaccacacttgtggggagggagagagcgaccaccccatctatctgtcgggggggagggagcgacacaaaactatgtgtgggcgggcgaacaacctctctctctccatagaaagagaatttattaagacgcgcctctcgaggggg

SEQ ID NO: 378407 - DNA, 2672 bp, Homo sapiens
acgtgcatggtgcggagcccaggccctagggaatcgtggggtcgtatcccgcgggtggaggccggggtggcgccggccggggcgggggagcccaaaagaccggctgccgcctgctccccggaaaagggcactcgtctccgtgggtgtggcggagcgcgcggtgcatgaaactcccacgttaacccacgaaaccttcaaagcactgaagccaggtctttctgcctatgctgatgatgttgaaaaggtgaaagaagtatttaaagcatcgcctttccttgtaggggatgactgtgtttccatcatgaacggaacagatgaaggcgtttcggcgtggatcaccatcaacttcctgacaggcagcttgaaaactccaggagggagcagcgtgggcatgctggacttgggcggaggatccactcagatcgccttcctgccacgcgtggagggcaccctgcaggcctccccacccggctacctgacggcactgcggatgtttaacaggacctacaagctctattcctacagctacctcgggctcgggctgatgtcggcacgcctggcgatcctgggcggcgtggaggggcagcctgctaaggatggaaaggagttggtcagcccttgcttgtctcccagtttcaaaggagagtgggaacacgcagaagtcacgtacagggtttcagggcagaaagcagcggcaagcctgcacgagctgtgtgctgccagagtgtcagaggtccttcaaaacagagtgcacaggacggaggaagtgaagcatgtggacttctatgctttctcctactattacgaccttgcagctggtgtgggcctcatagatgcggagaagggaggcagcctggtggtgggggacttcgagatcgcagccaagtacgtgtgtcggaccctggagacacagccgcagagcagccccttctcatgcatggacctcacctacgtcagcctgctactccaggagttcggctttcccaggagcaaagtgctgaagctcactcggaaaattgacaatgttgagaccagctgggctctgggggccatttttcattacatcgactccctgaacagacagaagagtccagcctcatagtggccgagccatccctgtccccgtcagcagtgtctgtgtgtctgcataaaccctcctgtcctggacgtgacttcatcctgaggagccacagcacaggccgtgctggcactttctgcacactggctctgggacttgcagaaggcctggtgctgccctggcatcagcctcttccagtcacatctggccagagggctgtctggacctgggccctgctcaatgccacctgtctgcctgggctccaagtgggcaggaccaggacagaaccacaggcacacactgagggggcagtgtggctccctgcctgtcccatccccatgccccgtccgcggggctgtggctgctgctgtgcatgtccctgcgatgggagtcttgtctcccagcctgtcagtttcctccccagggcagagctccccttcctgcgagagtctgggaggcggtgcaggctgtcctggctgctctggggaagccgagggacagccataacacccccgggacagtaggtctgggcggcaccactgggaactctggacttgagtgtgtttgcctcttccttgggtatgaatgtgtgagttcacccagaggcctgctctcctcacacattgtgtggtttggggttaatgatggagggagacacctcctcatagacggcaggtgcccacctttcagggagtctcccagcatgggcggatgccgggcatgagctgctgtaaactatttgtggctgtgctgcttgagtgacgtctctgtcgtgtgggtgccaagtgcttgtgtagaaactgtgttctgagcccccttttctggacaccaactgtgtcctgtgaatgtatcgctactgtgagctgttcccgcctagccagggccatgtcttaggtgcagctgtgccacgggtcagctgagccacagtcccagaaccaagctctcggtgtctcgggccaccatccgcccacctcgggctgaccccacctcctccatggacagtgtgagccccgggccgtgcatcctgctcagtgtggcgtcagtgtcggggctgagccccttgagctgcttcagtgaatgtacagtgcccggcacgagctgaacctcatgtgttccactcccaataaaaggttgacagggaaaaaaaaaaaaaaaaaaaaaaaaaaaaaaaaaaaaaaaaaaaaaaaaaaaaaaaaaaaaaagaagagagggggggcgcgcgccgccagaaagatattcccgccgcgagggggggcccgccgcagctcggcacgcgcggcacccacgcatttcttgttgttagacacagaggcggcgcctccaatagaggagggacgcctctcttataataaagccgaggacgcgcgcacggggcgcgccgcgcggtatataacagaacgagcgcgctgcgagagcgcgaggcgacaaaagcgcgtgccgacacgcgggagaccacacttgtggggagggagagagcgaccaccccatctatctgtcgggggggagggagcgacacaaaactatgtgtgggcgggcgaacaacctctctctctccatagaaagagaatttattaagacgcgcctctcgaggggg

SEQ ID NO: 378408 - DNA, 2051 bp, Homo sapiens
acgtgcatggtgcggagcccaggccctagggaatcgtggggtcgtatcccgcgggtggaggccggggtggcgccggccggggcgggggagcccaaaagaccggctgccgcctgctccccggaaaagggcactcgtctccgtgggtgtggcggagcgcgcggtgcatgcaacctcacagtgctcctgcagactgggtgttgtgtctcccacagatgcggagaagggaggcagcctggtggtgggggacttcgagatcgcagccaagtacgtgtgtcggaccctggagacacagccgcagagcagccccttctcatgcatggacctcacctacgtcagcctgctactccaggagttcggctttcccaggagcaaagtgctgaagctcactcggaaaattgacaatgttgagaccagctgggctctgggggccatttttcattacatcgactccctgaacagacagaagagtccagcctcatagtggccgagccatccctgtccccgtcagcagtgtctgtgtgtctgcataaaccctcctgtcctggacgtgacttcatcctgaggagccacagcacaggccgtgctggcactttctgcacactggctctgggacttgcagaaggcctggtgctgccctggcatcagcctcttccagtcacatctggccagagggctgtctggacctgggccctgctcaatgccacctgtctgcctgggctccaagtgggcaggaccaggacagaaccacaggcacacactgagggggcagtgtggctccctgcctgtcccatccccatgccccgtccgcggggctgtggctgctgctgtgcatgtccctgcgatgggagtcttgtctcccagcctgtcagtttcctccccagggcagagctccccttcctgcgagagtctgggaggcggtgcaggctgtcctggctgctctggggaagccgagggacagccataacacccccgggacagtaggtctgggcggcaccactgggaactctggacttgagtgtgtttgcctcttccttgggtatgaatgtgtgagttcacccagaggcctgctctcctcacacattgtgtggtttggggttaatgatggagggagacacctcctcatagacggcaggtgcccacctttcagggagtctcccagcatgggcggatgccgggcatgagctgctgtaaactatttgtggctgtgctgcttgagtgacgtctctgtcgtgtgggtgccaagtgcttgtgtagaaactgtgttctgagcccccttttctggacaccaactgtgtcctgtgaatgtatcgctactgtgagctgttcccgcctagccagggccatgtcttaggtgcagctgtgccacgggtcagctgagccacagtcccagaaccaagctctcggtgtctcgggccaccatccgcccacctcgggctgaccccacctcctccatggacagtgtgagccccgggccgtgcatcctgctcagtgtggcgtcagtgtcggggctgagccccttgagctgcttcagtgaatgtacagtgcccggcacgagctgaacctcatgtgttccactcccaataaaaggttgacagggaaaaaaaaaaaaaaaaaaaaaaaaaaaaaaaaaaaaaaaaaaaaaaaaaaaaaaaaaaaaaagaagagagggggggcgcgcgccgccagaaagatattcccgccgcgagggggggcccgccgcagctcggcacgcgcggcacccacgcatttcttgttgttagacacagaggcggcgcctccaatagaggagggacgcctctcttataataaagccgaggacgcgcgcacggggcgcgccgcgcggtatataacagaacgagcgcgctgcgagagcgcgaggcgacaaaagcgcgtgccgacacgcgggagaccacacttgtggggagggagagagcgaccaccccatctatctgtcgggggggagggagcgacacaaaactatgtgtgggcgggcgaacaacctctctctctccatagaaagagaatttattaagacgcgcctctcgaggggg

SEQ ID NO: 378409 - DNA, 2664 bp, Homo sapiens
acgtgcatggtgcggagcccaggccctagggaatcgtggggtcgtatcccgcgggtggaggccggggtggcgccggccggggcgggggagcccaaaagaccggctgccgcctgctccccggaaaagggcactcgtctccgtgggtgtggcggagcgcgcggtgcatggaatgggctatgtgaatgaaaaaaggtatccgttatgaaacttccagaaaaacgagctacatttttcagcagccgcagcacggtccttggcaaacaaggatgagaaaaatatccaaccacgggagcctgcgggtggcgaaggtggcataccccctggggctgtgtgtgggcgtgttcatctatgttgcctacatcaagtggcaccgggccaccgccacccaggccttcttcagcatcaccagggcagccccgggggcccggtggggtcagcaggcccacagccccctggggacagctgcagacgggcacgaggtcttctacgggatcatgtttgatgcaggaagcactggcacccgagtacacgtcttccagttcacccggccccccagagaaactcccacgttaacccacgaaaccttcaaagcactgaagccaggtctttctgcctatgctgatgatgttgaaaagagcgctcagggaatccgggaactactggatgttgctaaacaggacattccgttcgacttctggaaggccacccctctggtcctcaaggccacagctggcttacgcctgttacctggagaaaaggcccagaagttactgcagaaggtgaaagaagtatttaaagcatcgcctttccttgtaggggatgactgtgtttccatcatgaacggaacagatgaaggcgtttcggcgtggatcaccatcaacttcctgacaggcagcttgaaaactccaggagggagcagcgtgggcatgctggacttgggcggaggatccactcagatcgccttcctgccacgcgtggagggcaccctgcaggcctccccacccggctacctgacggcactgcggatgtttaacaggacctacaagctctattcctacagctacctcgggctcgggctgatgtcggcacgcctggcgatcctgggcggcgtggaggggcagcctgctaaggatggaaaggagttggtcagcccttgcttgtctcccagtttcaaaggagagtgggaacacgcagaagtcacgtacagggtttcagggcagaaagcagcggcaagcctgcacgagctgtgtgctgccagagtgtcagaggtccttcaaaacagagtgcacaggacggaggaagtgaagcatgtggacttctatgctttctcctactattacgaccttgcagctggtgtgggcctcatagatgcggagaagggaggcagcctggtggtgggggacttcgagatcgcagccaagtacgtgtgtcggaccctggagacacagccgcagagcagccccttctcatgcatggacctcacctacgtcagcctgctactccaggagttcggctttcccaggagcaaagtgctgaagctcactcggaaaattgacaatgttgagaccagctgggctctgggggccatttttcattacatcgactccctgaacagacagaagagtccagcctcatagtggccgagccatccctgtccccgtcagcagtgtctgtgtgtctgcataaaccctcctgtcctggacgtgacttcatcctgaggagccacagcacaggccgtgctggcactttctgcacactggctctgggacttgcagaaggcctggtgctgccctggcatcagcctcttccagtcacatctggccagagggctgtctggacctgggccctgctcaatgccacctgtctgcctgggctccaagtgggcaggaccaggacagaaccacaggcacacactgagggggcagtgtggctccctgcctgtcccatccccatgccccgtccgcggggctgtggctgctgctgtgcatgtccctgcgatgggagtcttgtctcccagcctgtcagtttcctccccagggcagagctccccttcctgcgagagtctgggaggcggtgcaggctgtcctggctgctctggggaagccgagggacagccataacacccccgggacagtaggtctgggcggcaccactgggaactctggacttgagtgtgtttgcctcttccttgggtatgaatgtgtgagttcacccagaggcctgctctcctcacacattgtgtggtttggggttaatgatggagggagacacctcctcatagacggcaggtgcccacctttcagggagtctcccagcatgggcggatgccgggcatgagctgctgtaaactatttgtggctgtgctgcttgagtgacgtctctgtcgtgtgggtgccaagtgcttgtgtagaaactgtgttctgagcccccttttctggacaccaactgtgtcctgtgaatgtatcgctactgtgagctgttcccgcctagccagggccatgtcttaggtgcagctgtgccacgggtcagctgagccacagtcccagaaccaagctctcggtgtctcgggcactgtacattcactgaagcagcttcaaggctcagccccgacactgacgccacactgagcaggatgcacggcccggggctcacactgtccatgtc

SEQ ID NO: 378410 - DNA, 1498 bp, Homo sapiens
acgtgcatggtgcggagcccaggccctagggaatcgtggggtcgtatcccgcgggtggaggccggggtggcgccggccggggcgggggagcccaaaagaccggctgccgcctgctccccggaaaagggcactcgtctccgtgggtgtggcggagcgcgcggtgcatggaatgggctatgtgaatgaaaaaaggtatccgttatgaaacttccagaaaaacgagctacatttttcagcagccgcagcacggtccttggcaaacaaggatgagaaaaatatccaaccacgggagcctgcgggtggcgaaggtggcataccccctggggctgtgtgtgggcgtgttcatctatgttgcctacatcaagtggcaccgggccaccgccacccaggccttcttcagcatcaccagggcagccccgggggcccggtggggtcagcaggcccacagccccctggggacagctgcagacgggcacgaggtcttctacgggatcatgtttgatgcaggaagcactggcacccgagtacacgtcttccagttcacccggccccccagagacacctcctcatagacggcaggtgcccacctttcagggagtctcccagcatgggcggatgccgggcatgagctgctgtaaactatttgtggctgtgctgcttgagtgacgtctctgtcgtgtgggtgccaagtgcttgtgtagaaactgtgttctgagcccccttttctggacaccaactgtgtcctgtgaatgtatcgctactgtgagctgttcccgcctagccagggccatgtcttaggtgcagctgtgccacgggtcagctgagccacagtcccagaaccaagctctcggtgtctcgggccaccatccgcccacctcgggctgaccccacctcctccatggacagtgtgagccccgggccgtgcatcctgctcagtgtggcgtcagtgtcggggctgagccccttgagctgcttcagtgaatgtacagtgcccggcacgagctgaacctcatgtgttccactcccaataaaaggttgacagggaaaaaaaaaaaaaaaaaaaaaaaaaaaaaaaaaaaaaaaaaaaaaaaaaaaaaaaaaaaaaagaagagagggggggcgcgcgccgccagaaagatattcccgccgcgagggggggcccgccgcagctcggcacgcgcggcacccacgcatttcttgttgttagacacagaggcggcgcctccaatagaggagggacgcctctcttataataaagccgaggacgcgcgcacggggcgcgccgcgcggtatataacagaacgagcgcgctgcgagagcgcgaggcgacaaaagcgcgtgccgacacgcgggagaccacacttgtggggagggagagagcgaccaccccatctatctgtcgggggggagggagcgacacaaaactatgtgtgggcgggcgaacaacctctctctctccatagaaagagaatttattaagacgcgcctctcgaggggg

SEQ ID NO: 378411 - DNA, 2863 bp, Homo sapiens
acgtgcatggtgcggagcccaggccctagggaatcgtggggtcgtatcccgcgggtggaggccggggtggcgccggccggggcgggggagcccaaaagaccggctgccgcctgctccccggaaaagggcactcgtctccgtgggtgtggcggagcgcgcggtgcatggaatgggctatgtgaatgaaaaaaggtatccgttatgaaacttccagaaaaacgagctacatttttcagcagccgcagcacggtccttggcaaacaaggatgagaaaaatatccaaccacgggagcctgcgggtggcgaaggtggcataccccctggggctgtgtgtgggcgtgttcatctatgttgcctacatcaagtggcaccgggccaccgccacccaggccttcttcagcatcaccagggcagccccgggggcccggtggggtcagcaggcccacagccccctggggacagctgcagacgggcacgaggtcttctacgggatcatgtttgatgcaggaagcactggcacccgagtacacgtcttccagttcacccggccccccagagaaactcccacgttaacccacgaaaccttcaaagcactgaagccaggtctttctgcctatgctgatgatgttgaaaagagcgctcagggaatccgggaactactggatgttgctaaacaggacattccgttcgacttctggaaggccacccctctggtcctcaaggccacagctggcttacgcctgttacctggagaaaaggcccagaagttactgcagaaggtgaaagaagtatttaaagcatcgcctttccttgtaggggatgactgtgtttccatcatgaacggaacagatgaaggcgtttcggcgtggatcaccatcaacttcctgacaggcagcttgaaaactccaggagggagcagcgtgggcatgctggacttgggcggaggatccactcagatcgccttcctgccacgcgtggagggcaccctgcaggcctccccacccggctacctgacggcactgcggatgtttaacaggacctacaagctctattcctacagctacctcgggctcgggctgatgtcggcacgcctggcgatcctgggcggcgtggaggggcagcctgctaaggatggaaaggagttggtcagcccttgcttgtctcccagtttcaaaggagagtgggaacacgcagaagtcacgtacagggtttcagggcagaaagcaggtacggggagggttgctgcctgttggtttctgcgggtgagagtggtggcctcctctcccccttgcctttcccacatcccatgggacgttccacgggaggctcctgacctctctttgaagagcctgtacctgccctggaagtgaaggtggtttggctgcaggggcctgtgtctgtgctgagagccagctccttccctctgcctctgttcaacattcccctgactgtcaccagaagcttcctcctgagggctgatttcctaacaggcctgcagggaggaaggactggaccagcttggggctgagatgcagggctgggactgggagcccaggcactctgtgctgtgctgggcgggaatagagggagggtctgcttccacccatcctgctcgaggctatggagcccgctggccctgggcaggctctagtgctctgcacccttgcagtttcttctgagagaaatgttcaaacgccattcccagactgggcactcggcatgaggggtgcatgccttcgcgaaccgttcaggtccttccaagtcaatcacccactggtgcgtgtaccggggggccgcatcaggcacagcaggactgcacagctgtgtcccacaggaggagccagacagttatttcatcgggaaagccttccaagagaaataacacggggcggggatctgagagggcgatcgcagctgtaactaggacagccaaggacggcctcgtggggtaacatgggatctaagacaggaggaggtttcaagaaactgcgcagatctgaagcagcagcaccccaggccgcacaagcagcacacaccggggccctctgtcagctgctgtgtttaatgaacgaggaggaggtggtgtggcttggtgggggacaccaggaggaaatgagccagaaccaagctctcggtgtctcgggccaccatccgcccacctcgggctgaccccacctcctccatggacagtgtgagccccgggccgtgcatcctgctcagtgtggcgtcagtgtcggggctgagccccttgagctgcttcagtgaatgtacagtgcccggcacgagctgaacctcatgtgttccactcccaataaaaggttgacagggaaaaaaaaaaaaaaaaaaaaaaaaaaaaaaaaaaaaaaaaaaaaaaaaaaaaaaaaaaaaaaaaaaaaaaaaaaaaaaaaaaaaaaaaaaaaaaaaaaaaaaaaaaaaaaaaaaaaaaaaaaaaaaaaaaaaaaaaaaaaaaaaaaaaaaaaattttcttggaaaaaaacttttggggatttttttttaatggcccaggggaaaacttttttttaacccccttttttttttgcccccaaatttttttaaaaaaaaattttttttccccccccatttttttttaagggggccccccctttttttttttccccccttttttttaaacacccgttctaaataaaattttaaacctttaaattttccaatttttttaaaaaaatattcccccgggggggtcttcaaaaatttccctatgtgttttaaaaaaaaactctccaaaaaattttggggggaaaacatttaacccctttttaagagaaaattgccttatttgtgaaacacggtgttttctccactggggaaaaaggggcccctt

SEQ ID NO: 378412 - DNA, 2142 bp, Homo sapiens
acgtgcatggtgcggagcccaggccctagggaatcgtggggtcgtatcccgcgggtggaggccggggtggcgccggccggggcgggggagcccaaaagaccggctgccgcctgctccccggaaaagggcactcgtctccgtgggtgtggcggagcgcgcggtgcatggaatgggctatgtgaatgaaaaaaggtatccgttatgaaacttccagaaaaacgagctacatttttcagcagccgcagcacggtccttggcaaacaaggatgagaaaaatatccaaccacgggagcctgcgggtggcgaaggtggcataccccctggggctgtgtgtgggcgtgttcatctatgttgcctacatcaagtggcaccgggccaccgccacccaggccttcttcagcatcaccagggcagccccgggggcccggtggggtcagcaggcccacagccccctggggacagctgcagacgggcacgaggtcttctacgggatcatgtttgatgcaggaagcactggcacccgagtacacgtcttccagttcacccggccccccagagaaactcccacgttaacccacgaaaccttcaaagcactgaagccaggtctttctgcctatgctgatgatgttgaaaagagcgctcagggaatccgggaactactggatgttgctaaacaggacattccgttcgacttctggaaggccacccctctggtcctcaaggccacagctggcttacgcctgttacctggagaaaaggcccagaagttactgcagaaggtgaaagaagtatttaaagcatcgcctttccttgtaggggatgactgtgtttccatcatgaacggaacagatgaaggcgtttcggcgtggatcaccatcaacttcctgacaggcagcttgaaaactccaggagggagcagcgtgggcatgctggacttgggcggaggatccactcagatcgccttcctgccacgcgtggagggcaccctgcaggcctccccacccggctacctgacggcactgcggatgtttaacaggacctacaagctctattcctacagctacctcgggctcgggctgatgtcggcacgcctggcgatcctgggcggcgtggaggggcagcctgctaaggatggaaaggagttggtcagcccttgcttgtctcccagtttcaaaggagagtgggaacacgcagaagtcacgtacagggtttcagggcagaaagcaggtacggggagggttgctgcctgttggtttctgcgggtgagagtggtggcctcctctcccccttgcctttcccacatcccatgggacgttccacgggaggctcctgacctctctttgaagagcctgtacctgccctggaagtgaaggtggtttggctgcaggggcctgtgtctgtgctgagagccagctccttccctctgcctctgttcaacattcccctgactgtcaccagaagcttcctcctgagggctgatttcctaacaggcctgcagggaggaaggactggaccagcttggggctgagatgcagggctgggactgggagcccaggcactctgtgctgtgctgggcgggaatagagggagggtctgcttccacccatcctgctcgaggctatggagcccgctggccctgggcaggctctagtgctctgcacccttgcagtttcttctgagagaaatgttcaaacgccattcccagactgggcactcggcatgaggggtgcatgccttcgcgaaccgttcaggtccttccaagtcaatcacccactggtgcgtgtaccggggggccgcatcaggcacagcaggactgcacagctgtgtcccacaggaggagccagacagttatttcatcgggaaagccttccaagagaaataacacggggcggggatctgagagggcgatcgcagctgtaactaggacagccaaggacggcctcgtggggtaacatgggatctaagacaggaggaggtttcaagaaactgcgcagatctgaagcagcagcaccccgggccgtgcatcctgctcagtgtggcgtcagtgtcggggctgagccccttgagctgcttcagtgaatgtacagtgcccggcacgagctgaacctcatgtgttccactcccaataaaaggttgacaggg

SEQ ID NO: 378413 - DNA, 1205 bp, Homo sapiens
acgtgcatggtgcggagcccaggccctagggaatcgtggggtcgtatcccgcgggtggaggccggggtggcgccggccggggcgggggagcccaaaagaccggctgccgcctgctccccggaaaagggcactcgtctccgtgggtgtggcggagcgcgcggtgcatggaatgggctatgtgaatgaaaaaaggtatccgttatgaaacttccagaaaaacgagctacatttttcagcagccgcagcacggtccttggcaaacaaggatgagaaaaatatccaaccacgggagcctgcgggtggcgaaggtggcataccccctggggctgtgtgtgggcgtgttcatctatgttgcctacatcaagtggcaccgggccaccgccacccaggccttcttcagcatcaccagggcagccccgggggcccggtggggtcagcaggcccacagccccctggggacagctgcagacgggcacgaggtcttctacgggatcatgtttgatgcaggaagcactggcacccgagtacacgtcttccagttcacccggccccccagagaaactcccacgttaacccacgaaaccttcaaagcactgaagccaggtctttctgcctatgctgatgatgttgaaaagagcgctcagggaatccgggaactactggatgttgctaaacaggacattccgttcgacttctggaaggccacccctctggtcctcaaggccacagctggcttacgcctgttacctggagaaaaggcccagaagttactgcagaaggtgaaagaagtatttaaagcatcgcctttccttgtaggggatgactgtgtttccatcatgaacggaacagatgaaggcgtttcggcgtggatcaccatcaacttcctgacaggcagcttgaaaactccaggagggagcagcgtgggcatgctggacttgggcggaggatccactcagatcgccttcctgccacgcgtggagggcaccctgcaggcctccccacccggctacctgacggcactgcggatgtttaacaggacctacaagctctattcctacagctacctcgggctcgggctgatgtcggcacgcctggcgatcctgggtgacagagcaagactgagactccatctcaaaaaatcaaggatgatgagagaaatgaggcagttccaggaaggagctctcaggagtgtgcaggtcgcagcc

SEQ ID NO: 378414 - DNA, 445 bp, Homo sapiens
tgcctatgctgatgatgttgaaaaggtaaggatcctctcccgtgtctccctgttcaactgcagaatgtgttcaagccagttcttttcctttgaatgtggtaggctgtcttcacaaaggaagggggctttgacagtgctgcctgggcatttcatgccatttgggatggtcagaagagagaaggtgtgcagcgcgcgagcccagaggagaacgcgcccccacccggccccatcctctgactccaccgtgccagcgctcacttctccaacgtgggggtcccgaggtcttggtacaggtcagaagcacaaatcctgcaaacttacaaaaatcattatttgatagtttgcttattcaaatttttacgctaatttagtcttgtgaattttgcataatacatttttaattttttgttgtggtttctgatcgaagatagcaaacattgactga

SEQ ID NO: 378415 - DNA, 408 bp, Homo sapiens
caacgaattgcagtgcttacgtgcatggcggtttgagagaaaacctttccaatcttctgttccctgccctgtcacttagcaagtgatttcttctcggcaagctctcctacctgatctcctgctgtgttgggatcatcctctgcaatgtccctgcactaagaggagaaggtgaaaatcagcctgcaggttcaaattaattgcacttctcagttatgctgtgagttagccagtgctttaaataatgacattctaaacttctagtttaaacataattggaaagagaaagttgacattaaagtaataagtgagagtaaacttaagtgaaggagaacagtgtaaaacattcatatgcaaatactcaaatactcttgataaaattattcataggcagttgactattttattaaa

SEQ ID NO: 378416 - DNA, 3470 bp, Homo sapiens
  misc_feature (3079)..(3079): n is a, c, g, or t
acggagagactgcgggtctgagggactggcgggcgggcgggccgagcggcgccgccgaggccgggctgggccgagcccaggagcgcccgggatgtagcgggccaccctgccgatgccacagcgcccggccgcgggcggagccggagccggagcctggggaggcggcgggggcccccccccgccggacaggccgttgcccgccccgccgcccgggcccccggcatgcagccccggctgcggaggtgacactcacggaccttagccaccgccgccgccatcgccaccatggacgaacaggaggcattgaactcaatcatgaacgatctggtggccctccagatgaaccgacgtcaccggatgcctggatatgagaccatgaagaacaaagacacaggtcactcaaataggcagagtgacgtcagaatcaagttcgagcacaacggggagaggcgaattatagcgttcagccggcctgtgaaatatgaagatgtggagcacaaggtgacaacagtatttggacaacctcttgatctacattacatgaacaatgagctctccatcctgctgaaaaaccaagatgatcttgataaagcaattgacattttagatagaagctcaagcatgaaaagccttaggatattgctgttgtcccaggacagaaaccataacagttcctctccccactctggggtgtccagacaggtgcggatcaaggcttcccagtccgcaggggatataaatactatctaccagccccccgagcccagaagcaggcacctctctgtcagctcccagaaccctggccgaagctcacctccccctggctatgttcctgagcggcagcagcacattgcccggcaggggtcctacaccagcatcaacagtgagggggagttcatcccagagaccagcgagcagtgcatgctggatcccctgagcagtgcagaaaattccttgtctggaagctgccaatccttggacaggtcagcagacagcccatccttccggaaatcacgaatgtcccgtgcccagagcttccctgacaacagacaggaatactcagatcgggaaactcagctttatgacaaaggggtcaaaggtggaacctacccccggcgctaccacgtgtctgtgcaccacaaggactacagtgatggcagaagaacatttccccgaatacggcgtcatcaaggcaacttgttcaccctggtgccctccagccgctccctgagcacaaatggcgagaacatgggtctggctgtgcaatacctggacccccgtgggcgcctgcggagtgcggacagcgagaatgccctctctgtgcaggagaggaatgtgccaaccaagtctcccagtgcccccatcaactggcgccggggaaagctcctgggccagggtgccttcggcagggtctatttgtgctatgacgtggacacgggacgtgaacttgcttccaagcaggtccaatttgatccagacagtcctgagacaagcaaggaggtgagtgctctggagtgcgagatccagttgctaaagaacttgcagcatgagcgcatcgtgcagtactatggctgtctgcgggaccgcgctgagaagaccctgaccatcttcatggagtacatgccagggggctcggtgaaagaccagttgaaggcttacggtgctctgacagagagcgtgacccgaaagtacacgcggcagatcctggagggcatgtcctacctgcacagcaacatgattgttcaccgggacattaagggagccaacatcctccgagactctgctgggaatgtaaagctgggggactttggggccagcaaacgcctgcagacgatctgtatgtcggggacgggcatgcgctccgtcactggcacaccctactggatgagccctgaggtgatcagcggcgagggctatggaaggaaagcagacgtgtggagcctgggctgcactgtggtggagatgctgacagagaaaccaccgtgggcagagtatgaagctatggccgccatcttcaagattgccacccagcccaccaatcctcagctgccctcccacatctctgaacatggccgggacttcctgaggcgcatttttgtggaggctcgccagagaccttcagctgaggagctgctcacacaccactttgcacagctcatgtactgagctctcacggccacacagctgccggtcgccctttgctgcatggcagggggctgctgctgggctcagtgaagttgctgcttctcccaggcaaggctgtggaccatggagtggcagcccagccagcgtcggtctgtgccccttccgccactggggctcagagccggggtggggtggctgcagcctcaggactgggagcccccagcctgtcagatccaggagctccagtgtcctgagctcagcgtggaggggtaggggctgggaacagtgtgcaaggcagccgtgggccccaccctcggggatgtgtcctgacactgcaattggcaccgaagcccagagggtctgggggcacaagactgacgccagggtatgaagagtgttattttcattcaaagtgttattttgtttttccttccaatgtctggagaccaccagggcatctctgggctggatgagctcccacaagcctgagggaaaggccagcactcgctagcagtggcaggcagaggcccaggctgccgtcccctagagtcccaggttggctctgccagtcctgtcctttaccaaagatgaatgaagcaaatgtcatgctgccttattcagggaaggaggagcctgtcctgcctgtggccatgaccctgcctctcccaggcaggggcccgcgatgtggaactgctgccactgaggggggatccagttttgtcaatgcagttgtctctgttttacaagttggagtcactcttatgctgtacccagtttctaaactggagactgtgtgtgccctctgggctctgagtacccctgctttgggcttgggcctaggctgcattgaaaagagctgaaggttgtggcctttgcgctcctggcccagcctttgttccccactggagcagaaggggagatggacgacacggtnggggcatctggcctggccagtgccctgatcccagagagcccgaggaggtgtctcaggctgcctgagtcgtgacctgctaggccagagcccactccatctggtagaagggaaagcccatatgctaccaccagctgtgtccaaaaccgccagctctgttcttcctcagccagcctcgcccatccccttgaggtctcagcccctttcccttgtagctcctcccctggagggggaatggcagcaggggttggggaaacagcatctccaagcagcttagagttggccatatttacctcagcctgggcgctggtcctttcttccggcccctcccctccaaaatgtgcctattgctagagctcctccctctcaacacccagtttccttgggagttgtc

SEQ ID NO: 378417 - DNA, 3292 bp, Homo sapiens
  misc_feature (2901)..(2901): n is a, c, g, or t
acggagagactgcgggtctgagggactggcgggcgggcgggccgagcggcgccgccgaggccgggctgggccgagcccaggagcgcccgggatgtagcgggccaccctgccgatgccacagcgcccggccgcgggcggagccggagccggagcctggggaggcggcgggggcccccccccgccggacaggccgttgcccgccccgccgcccgggcccccggcatgcagccccggctgcggaggtgacactcacggaccttagccaccgccgccgccatcgccaccatggacgaacaggaggcattgaactcaatcatgaacgatctggtggccctccagatgaaccgacgtcaccggatgcctggatatgagaccatgaagaacaaagacacaggtcactcaaataggcagagtgacgtcagaatcaagttcgagcacaacggggagaggcgaattatagcgttcagccggcctgtgaaatatgaagatgtggagcacaaggtgacaacagtatttggacaacctcttgatctacattacatgaacaatgagctctccatcctgctgaaaaaccaagatgatcttgataaagcaattgacattttagatagaagctcaagcatgaaaagccttaggatattgctgttgtcccaggacagaaaccataacagttcctctccccactctggggtgtccagacaggtgcggatcaaggcttcccagtccgcaggggatataaatactatctaccagccccccgagcccagaagcaggcacctctctgtcagctcccagaaccctggccgaagctcacctccccctggctatgttcctgagcggcagcagcacattgcccggcaggggtcctacaccagcatcaacagtgagggggagttcatcccagagaccagcgagcagtgcatgctggatcccctgagcagtgcagaaaattccttgtctggaagctgccaatccttggacaggtcagcagacagcccatccttccggaaatcacgaatgtcccgtgcccagagcttccctgacaacagacaggaatactcagatcgggaaactcagctttatgacaaaggggtcaaaggtggaacctacccccggcgctaccacgtgtctgtgcaccacaaggactacagtgatggcagaagaacatttccccgaatacggcgtcatcaaggcaacttgttcaccctggtgccctccagccgctccctgagcacaaatggcgagaacatgggtctggctgtgcaatacctggacccccgtgggcgcctgcggagtgcggacagcgagaatgccctctctgtgcaggagaggaatgtgccaaccaagtctcccagtgcccccatcaactggcgccggggaaagctcctgggccagggtgccttcggcagggtctatttgtgctatgacgtggacacgggacgtgaacttgcttccaagcaggtccaatttgatccagacagtcctgagacaagcaaggaggtgagtgctctggagtgcgagatccagttgctaaagaacttgcagcatgagcgcatcgtgcagtactatggctgtctgcgggaccgcgctgagaagaccctgaccatcttcatggagtacatgccagggggctcggtgaaagaccagttgaaggcttacggtgctctgacagagagcgtgacccgaaagtacacgcggcagatcctggagggcatgtcctacctgcacagcaacatgattgttcaccgggacattaagggagcctgggctgcactgtggtggagatgctgacagagaaaccaccgtgggcagagtatgaagctatggccgccatcttcaagattgccacccagcccaccaatcctcagctgccctcccacatctctgaacatggccgggacttcctgaggcgcatttttgtggaggctcgccagagaccttcagctgaggagctgctcacacaccactttgcacagctcatgtactgagctctcacggccacacagctgccggtcgccctttgctgcatggcagggggctgctgctgggctcagtgaagttgctgcttctcccaggcaaggctgtggaccatggagtggcagcccagccagcgtcggtctgtgccccttccgccactggggctcagagccggggtggggtggctgcagcctcaggactgggagcccccagcctgtcagatccaggagctccagtgtcctgagctcagcgtggaggggtaggggctgggaacagtgtgcaaggcagccgtgggccccaccctcggggatgtgtcctgacactgcaattggcaccgaagcccagagggtctgggggcacaagactgacgccagggtatgaagagtgttattttcattcaaagtgttattttgtttttccttccaatgtctggagaccaccagggcatctctgggctggatgagctcccacaagcctgagggaaaggccagcactcgctagcagtggcaggcagaggcccaggctgccgtcccctagagtcccaggttggctctgccagtcctgtcctttaccaaagatgaatgaagcaaatgtcatgctgccttattcagggaaggaggagcctgtcctgcctgtggccatgaccctgcctctcccaggcaggggcccgcgatgtggaactgctgccactgaggggggatccagttttgtcaatgcagttgtctctgttttacaagttggagtcactcttatgctgtacccagtttctaaactggagactgtgtgtgccctctgggctctgagtacccctgctttgggcttgggcctaggctgcattgaaaagagctgaaggttgtggcctttgcgctcctggcccagcctttgttccccactggagcagaaggggagatggacgacacggtnggggcatctggcctggccagtgccctgatcccagagagcccgaggaggtgtctcaggctgcctgagtcgtgacctgctaggccagagcccactccatctggtagaagggaaagcccatatgctaccaccagctgtgtccaaaaccgccagctctgttcttcctcagccagcctcgcccatccccttgaggtctcagcccctttcccttgtagctcctcccctggagggggaatggcagcaggggttggggaaacagcatctccaagcagcttagagttggccatatttacctcagcctgggcgctggtcctttcttccggcccctcccctccaaaatgtgcctattgctagagctcctccctctcaacacccagtttccttgggagttgtc

SEQ ID NO: 378418 - DNA, 2630 bp, Homo sapiens
acggagagactgcgggtctgagggactggcgggcgggcgggccgagcggcgccgccgaggccgggctgggccgagcccaggagcgcccgggatgtagcgggccaccctgccgatgccacagcgcccggccgcgggcggagccggagccggagcctggggaggcggcgggggcccccccccgccggacaggccgttgcccgccccgccgcccgggcccccggcatgcagccccggctgcggaggtgacactcacggaccttagccaccgccgccgccatcgccaccatggacgaacaggaggcattgaactcaatcatgaacgatctggtggccctccagatgaaccgacgtcaccggatgcctggatatgagaccatgaagaacaaagacacaggtcactcaaataggcagagtgacgtcagaatcaagttcgagcacaacggggagaggcgaattatagcgttcagccggcctgtgaaatatgaagatgtggagcacaaggtgacaacagtatttggacaacctcttgatctacattacatgaacaatgagctctccatcctgctgaaaaaccaagatgatcttgataaagcaattgacattttagatagaagctcaagcatgaaaagccttaggatattgctgttgtcccaggacagaaaccataacagttcctctccccactctggggtgtccagacaggtgcggatcaaggcttcccagtccgcaggggatataaatactatctaccagccccccgagcccagaagcaggcacctctctgtcagctcccagaaccctggccgaagctcacctccccctggctatgttcctgagcggcagcagcacattgcccggcaggggtcctacaccagcatcaacagtgagggggagttcatcccagagaccagcgagcagtgcatgctggatcccctgagcagtgcagaaaattccttgtctggaagctgccaatccttggacaggtcagcagacagcccatccttccggaaatcacgaatgtcccgtgcccagagcttccctgacaacagacaggaatactcagatcgggaaactcagctttatgacaaaggggtcaaaggtggaacctacccccggcgctaccacgtgtctgtgcaccacaaggactacagtgatggcagaagaacatttccccgaatacggcgtcatcaaggcaacttgttcaccctggtgccctccagccgctccctgagcacaaatggcgagaacatgggtctggctgtgcaatacctggacccccgtgggcgcctgcggagtgcggacagcgagaatgccctctctgtgcaggagaggaatgtgccaaccaagtctcccagtgcccccatcaactggcgccggggaaagctcctgggccagggtgccttcggcagggtctatttgtgctatgacgtggacacgggacgtgaacttgcttccaagcaggtccaatttgatccagacagtcctgagacaagcaaggaggtgagtgctctggagtgcgagatccagttgctaaagaacttgcagcatgagcgcatcgtgcagtactatggctgtctgcgggaccgcgctgagaagaccctgaccatcttcatggagtacatgccagggggctcggtgaaagaccagttgaaggcttacggtgctctgacagagagcgtgacccgaaagtacacgcggcagatcctggagggcatgtcctacctgcacagcaacatgattgttcaccgggacattaagggagccaacatcctccgagactctgctgggaatgtaaagctgggggactttggggccagcaaacgcctgcagacgatctgtatgtcggggacgggcatgcgctccgtcactggcacaccctactggatgagccctgaggtgatcagcggcgagggctatggaaggaaagcagacgtgtggagcctgggctgcactgtggtggagatgctgacagagaaaccaccgtgggcagagtatgaagctatggccgccatcttcaagattgccacccagcccaccaatcctcagctgccctcccacatctctgaacatggccgggacttcctgaggcgcatttttgtggaggctcgccagagaccttcagctgaggagctgctcacacaccactttgcacagctcatgtactgagctctcacggccacacagctgccggtcgccctttgctgcatggcagggggctgctgctgggctcagtgaagttgctgcttctcccaggcaaggctgtggaccatggagtggcagcccagccagcgtcggtctgtgccccttccgccactggggctcagagccggggtggggtggctgcagcctcaggactgggagcccccagcctgtcagatccaggagctccagtgtcctgagctcagcgtggaggggtaggggctgggaacagtgtgcaaggcagccgtgggccccaccctcggggatgtgtcctgacactgcaattggcaccgaagcccagagggtctggggccaacttgccccggttgagacggtttctccggttttggtcctccgctggggcgcgggttctggggggggcccaacgggaggccctcccggggccgggcctaccgtgccccccaagaagt

SEQ ID NO: 378419 - DNA, 665 bp, Homo sapiens
gcgagaacatgggtctggctgtgcaatacctggacccccgtgggcgcctgcggagtgcggacagcgagaatgccctctctgtgcaggagaggaatgtgccaaccaagtgtgaggagctgtccctggctaggaggagactgcccaggtggtctcagacaagctacgggggcaaacagctgggcccctgggacccttaggctcagcaggtggtggctttggcccaaatgcaccacatgggataagccttggagtgtctgaagcctggctccactattgtgtgacaagcctcttctcctctctgatctttagtttttccatgtttaaactagggaagagcacacccttcatccctgccatattaagatatttaggggctttggaaggaaatgcatttgatcaatgcagaagagcatttaaccatgacttcagccaatcctctgcttcttaggactctgacttcaggtccgagtgactagggcactgggcttgctccagattgtggtggagatgctctactaagagatgatgggtgctgggtgagggggagcctgagccagagaccctgttcctggagaatgaatgggatattcataaataatgtacacaaagtaactctttccttctgctctcctgtagctcccagtgcccccatcaactggcgccgg

SEQ ID NO: 378420 - DNA, 168 bp, Homo sapiens
aagctcaagcatgaaaagccttaggatattgctgttgtcccaggacagaaaccatgtaagtagcccttgtcatggtctggcagctgaagacaaagcttgctttccttcaggaacttgtctcgcctccttgacagacattttcgttcctcagccactgccaaattgaga

SEQ ID NO: 378421 - DNA, 3563 bp, Homo sapiens
  misc_feature (3172)..(3172): n is a, c, g, or t
acggagagactgcgggtctgagggactggcgggcgggcgggccgagcggcgccgccgaggccgggctgggccgagcccaggagcgcccgggatgtagcgggccaccctgccgatgccacagcgcccggccgcgggcggagccggagccggagcctggggaggcggcgggggcccccccccgccggacaggccgttgcccgccccgccgcccgggcccccggcatgcagccccggctgcggaggtgacactcacggaccttagccaccgccgccgccatcgccaccatggacgaacaggaggcattgaactcaatcatgaacgatctggtggccctccagatgaaccgacgtcaccggatgcctggatatgagaccatgaagaacaaagacacaggtcactcaaataggcagaaaaaacacaacagcagcagctcagcccttctgaacagccccacagtaacaacaagctcatgtgcaggggccagtgagaaaaagaaatttttgagtgacgtcagaatcaagttcgagcacaacggggagaggcgaattatagcgttcagccggcctgtgaaatatgaagatgtggagcacaaggtgacaacagtatttggacaacctcttgatctacattacatgaacaatgagctctccatcctgctgaaaaaccaagatgatcttgataaagcaattgacattttagatagaagctcaagcatgaaaagccttaggatattgctgttgtcccaggacagaaaccataacagttcctctccccactctggggtgtccagacaggtgcggatcaaggcttcccagtccgcaggggatataaatactatctaccagccccccgagcccagaagcaggcacctctctgtcagctcccagaaccctggccgaagctcacctccccctggctatgttcctgagcggcagcagcacattgcccggcaggggtcctacaccagcatcaacagtgagggggagttcatcccagagaccagcgagcagtgcatgctggatcccctgagcagtgcagaaaattccttgtctggaagctgccaatccttggacaggtcagcagacagcccatccttccggaaatcacgaatgtcccgtgcccagagcttccctgacaacagacaggaatactcagatcgggaaactcagctttatgacaaaggggtcaaaggtggaacctacccccggcgctaccacgtgtctgtgcaccacaaggactacagtgatggcagaagaacatttccccgaatacggcgtcatcaaggcaacttgttcaccctggtgccctccagccgctccctgagcacaaatggcgagaacatgggtctggctgtgcaatacctggacccccgtgggcgcctgcggagtgcggacagcgagaatgccctctctgtgcaggagaggaatgtgccaaccaagtctcccagtgcccccatcaactggcgccggggaaagctcctgggccagggtgccttcggcagggtctatttgtgctatgacgtggacacgggacgtgaacttgcttccaagcaggtccaatttgatccagacagtcctgagacaagcaaggaggtgagtgctctggagtgcgagatccagttgctaaagaacttgcagcatgagcgcatcgtgcagtactatggctgtctgcgggaccgcgctgagaagaccctgaccatcttcatggagtacatgccagggggctcggtgaaagaccagttgaaggcttacggtgctctgacagagagcgtgacccgaaagtacacgcggcagatcctggagggcatgtcctacctgcacagcaacatgattgttcaccgggacattaagggagccaacatcctccgagactctgctgggaatgtaaagctgggggactttggggccagcaaacgcctgcagacgatctgtatgtcggggacgggcatgcgctccgtcactggcacaccctactggatgagccctgaggtgatcagcggcgagggctatggaaggaaagcagacgtgtggagcctgggctgcactgtggtggagatgctgacagagaaaccaccgtgggcagagtatgaagctatggccgccatcttcaagattgccacccagcccaccaatcctcagctgccctcccacatctctgaacatggccgggacttcctgaggcgcatttttgtggaggctcgccagagaccttcagctgaggagctgctcacacaccactttgcacagctcatgtactgagctctcacggccacacagctgccggtcgccctttgctgcatggcagggggctgctgctgggctcagtgaagttgctgcttctcccaggcaaggctgtggaccatggagtggcagcccagccagcgtcggtctgtgccccttccgccactggggctcagagccggggtggggtggctgcagcctcaggactgggagcccccagcctgtcagatccaggagctccagtgtcctgagctcagcgtggaggggtaggggctgggaacagtgtgcaaggcagccgtgggccccaccctcggggatgtgtcctgacactgcaattggcaccgaagcccagagggtctgggggcacaagactgacgccagggtatgaagagtgttattttcattcaaagtgttattttgtttttccttccaatgtctggagaccaccagggcatctctgggctggatgagctcccacaagcctgagggaaaggccagcactcgctagcagtggcaggcagaggcccaggctgccgtcccctagagtcccaggttggctctgccagtcctgtcctttaccaaagatgaatgaagcaaatgtcatgctgccttattcagggaaggaggagcctgtcctgcctgtggccatgaccctgcctctcccaggcaggggcccgcgatgtggaactgctgccactgaggggggatccagttttgtcaatgcagttgtctctgttttacaagttggagtcactcttatgctgtacccagtttctaaactggagactgtgtgtgccctctgggctctgagtacccctgctttgggcttgggcctaggctgcattgaaaagagctgaaggttgtggcctttgcgctcctggcccagcctttgttccccactggagcagaaggggagatggacgacacggtnggggcatctggcctggccagtgccctgatcccagagagcccgaggaggtgtctcaggctgcctgagtcgtgacctgctaggccagagcccactccatctggtagaagggaaagcccatatgctaccaccagctgtgtccaaaaccgccagctctgttcttcctcagccagcctcgcccatccccttgaggtctcagcccctttcccttgtagctcctcccctggagggggaatggcagcaggggttggggaaacagcatctccaagcagcttagagttggccatatttacctcagcctgggcgctggtcctttcttccggcccctcccctccaaaatgtgcctattgctagagctcctccctctcaacacccagtttccttgggagttgtc

SEQ ID NO: 378422 - DNA, 2460 bp, Homo sapiens
  misc_feature (2069)..(2069): n is a, c, g, or t
aagtggctcacattgacctacccagaagccagtgattcccctgtcttactcagatcgggaaactcagctttatgacaaaggggtcaaaggtggaacctacccccggcgctaccacgtgtctgtgcaccacaaggactacagtgatggcagaagaacatttccccgaatacggcgtcatcaaggcaacttgttcaccctggtgccctccagccgctccctgagcacaaatggcgagaacatgggtctggctgtgcaatacctggacccccgtgggcgcctgcggagtgcggacagcgagaatgccctctctgtgcaggagaggaatgtgccaaccaagtctcccagtgcccccatcaactggcgccggggaaagctcctgggccagggtgccttcggcagggtctatttgtgctatgacgtggacacgggacgtgaacttgcttccaagcaggtccaatttgatccagacagtcctgagacaagcaaggaggtgagtgctctggagtgcgagatccagttgctaaagaacttgcagcatgagcgcatcgtgcagtactatggctgtctgcgggaccgcgctgagaagaccctgaccatcttcatggagtacatgccagggggctcggtgaaagaccagttgaaggcttacggtgctctgacagagagcgtgacccgaaagtacacgcggcagatcctggagggcatgtcctacctgcacagcaacatgattgttcaccgggacattaagggagccaacatcctccgagactctgctgggaatgtaaagctgggggactttggggccagcaaacgcctgcagacgatctgtatgtcggggacgggcatgcgctccgtcactggcacaccctactggatgagccctgaggtgatcagcggcgagggctatggaaggaaagcagacgtgtggagcctgggctgcactgtggtggagatgctgacagagaaaccaccgtgggcagagtatgaagctatggccgccatcttcaagattgccacccagcccaccaatcctcagctgccctcccacatctctgaacatggccgggacttcctgaggcgcatttttgtggaggctcgccagagaccttcagctgaggagctgctcacacaccactttgcacagctcatgtactgagctctcacggccacacagctgccggtcgccctttgctgcatggcagggggctgctgctgggctcagtgaagttgctgcttctcccaggcaaggctgtggaccatggagtggcagcccagccagcgtcggtctgtgccccttccgccactggggctcagagccggggtggggtggctgcagcctcaggactgggagcccccagcctgtcagatccaggagctccagtgtcctgagctcagcgtggaggggtaggggctgggaacagtgtgcaaggcagccgtgggccccaccctcggggatgtgtcctgacactgcaattggcaccgaagcccagagggtctgggggcacaagactgacgccagggtatgaagagtgttattttcattcaaagtgttattttgtttttccttccaatgtctggagaccaccagggcatctctgggctggatgagctcccacaagcctgagggaaaggccagcactcgctagcagtggcaggcagaggcccaggctgccgtcccctagagtcccaggttggctctgccagtcctgtcctttaccaaagatgaatgaagcaaatgtcatgctgccttattcagggaaggaggagcctgtcctgcctgtggccatgaccctgcctctcccaggcaggggcccgcgatgtggaactgctgccactgaggggggatccagttttgtcaatgcagttgtctctgttttacaagttggagtcactcttatgctgtacccagtttctaaactggagactgtgtgtgccctctgggctctgagtacccctgctttgggcttgggcctaggctgcattgaaaagagctgaaggttgtggcctttgcgctcctggcccagcctttgttccccactggagcagaaggggagatggacgacacggtnggggcatctggcctggccagtgccctgatcccagagagcccgaggaggtgtctcaggctgcctgagtcgtgacctgctaggccagagcccactccatctggtagaagggaaagcccatatgctaccaccagctgtgtccaaaaccgccagctctgttcttcctcagccagcctcgcccatccccttgaggtctcagcccctttcccttgtagctcctcccctggagggggaatggcagcaggggttggggaaacagcatctccaagcagcttagagttggccatatttacctcagcctgggcgctggtcctttcttccggcccctcccctccaaaatgtgcctattgctagagctcctccctctcaacacccagtttccttgggagttgtc

SEQ ID NO: 378423 - DNA, 1947 bp, Homo sapiens
gcctgagtaccatcctggatgaatctagaaggtatggggtagagcttgacagggttcctgtgtacccactgggtatccgttagaggtaagggagaggagaggattgatagagtgttgcaaaagtatagattattcattgagataaaggatttggtttccctgccatgagtattaaaaaaatttaagttttcccaagcttgcatctctgaccaaatttcacataaaacattggaaggaggctgggtgcggtggctcatgcttgtaatcccagcactgggaagctaaggcgggtggatcacttgaggtcaggagttcgagaccagcctggccaacatggtgaaaccccgtctccacgaaaaagataaaaataagctgggcgtggtggcaggcgcctataatcccagctactcgggaggctgaggcaggagaataacttaaacccgggaggcggaggttacagtgagctgagatcgtgccactgcactccagcctgggtgacagagtgagaccctatttcaaaaaaataaaaattggaagaagagcttaaaaaagataagattttaaagagtcccaagttatttaagttgagtgtaattgtcatttaaggaaggcaaatgagtttatcatccttcttaaagagcatctcttttaactgttggacaaaaccataactttgtcattttacaaggaagaacctcttaagaagtcctcagaaccagaagcaatgtgaactctcagcgctggtcctggtgggtttgctgaccatgactgggcaagccgttctttttgctgccatcttcctcatcataaagtgtggaacataggcaattgctttgagattcttggatagaagaggacaacattctgcacctgcccccttttttaaatctttggggaaagatgagtaactttccccactactctgccttcctgttcagtaactcttacttttgcctgaagtaacagcatcttctacttctccatctagagatttttgtgtgtgtgccatcaaggttagcaaactttatacgtagcctaacacttaaaaaatgcactcattatcttaaacctaataaattccagagtttattttggttctcctctgttgcccttcctaaaaaatgagctgaagatgacagtatttttctttacatgcttggttatgacttttaaagttttatttaaataaatgttgaagctcaagtttaaagaagcgttgcagaggcccacggtctcctgggtcccggccacctgtccatattccacatttgctgactgtgctccctgcactccactcaagttgagagttcaaatagtcttgaaggggaatcagcttcaggatggaaggacccaggagaggccccgaggtgggagggttctgtaaatacagactactgcgagtgtccagagctctctgccatgatacttccttgggactgacttggctgagaacgtgttctgtcagaggatttgttagaactctgcccttttgtctgaaactcaaggccaaggagaatgataggagacttaggacagagctgacccttgcaccaggctgggaggctgcagcccttttagatgccacttactgtaagtggccagaataccagagaggtgggttccatggtcaaatgcacagtaggtgtttacctttacatttggatcaccttgtagtctttaaattcttggtccctgaggccaagtccacaacttgccttctagtcacttgcctgcccgcagtggtggtggatgtgttagctggtagatttggaatcagtcaccagtctttctgtactgtcttggttagctctatataagtaggggcagcttagccctgaggcccagagacctgctgtcctttttctccttgagggaggaaataaaactgcggaatacaatgtccttccatagcatgggaagaagaaaataaacatctcctttccaaca

SEQ ID NO: 378424 - DNA, 903 bp, Homo sapiens
gcctgagtaccatcctggatgaatctagaaggtatggggtagagcttgacagggttcctgtgtacccactgggtatccgttagaggtaagggagaggagaggattgatagagtgttgcaaaagtatagattattcattgagataaaggatttggtttccctgccatgagtattaaaaaaatttaagttttcccaagcttgcatctctgaccaaatttcacataaaacattggaaggaggctgggtgcggtggctcatgcttgtaatcccagcactgggaagctaaggcgggtggatcacttgaggtcaggagttcgagaccagcctggccaacatggtgaaaccccgtctccacgaaaaagataaaaataagctgggcgtggtggcaggcgcctataatcccagctactcgggaggctgaggcaggagaataacttaaacccgggaggcggaggttacagtgagctgagatcgtgccactgcactccagcctgggtgacagagtgagaccctatttcaaaaaaataaaaattggaagaagagcttaaaaaagataagattttaaagagtcccaagttatttaagttgagtgtaattgtcatttaaggaaggcaaatgagtttatcatccttcttaaagagcatctcttttaactgttggacaaaaccataactttgtcattttacaaggaagaacctcttaagaagtcctcagaaccagaagcaatgtgaactctcagcgctggtcctggtgggtttgctgaccatgactgggcaagccgttctttttgctgccatcttcctcatcataaagtgtggaacataggcaattgctttgagattcttggatagaagaggacaacattctgcaccttctattcagttttcgggatcctctagacagc

SEQ ID NO: 378425 - DNA, 1450 bp, Homo sapiens
aggaaggcaaatgacaattacactcaacttaaataacttgggactctttaaaatcttatcattttaaagagtcccaagttatttaagttgagtgtaattgtcatttaaggaaggcaaatgagtttatcatccttcttaaagagcatctcttttaactgttggacaaaaccataactttgtcattttacaaggaagaacctcttaagaagtcctcagaaccagaagcaatgtgaactctcagcgctggtcctggtgggtttgctgaccatgactgggcaagccgttctttttgctgccatcttcctcatcataaagtgtggaacataggcaattgctttgagattcttggatagaagaggacaacattctgcacctgcccccttttttaaatctttggggaaagatgagtaactttccccactactctgccttcctgttcagtaactcttacttttgcctgaagtaacagcatcttctacttctccatctagagatttttgtgtgtgtgccatcaaggttagcaaactttatacgtagcctaacacttaaaaaatgcactcattatcttaaacctaataaattccagagtttattttggttctcctctgttgcccttcctaaaaaatgagctgaagatgacagtatttttctttacatgcttggttatgacttttaaagttttatttaaataaatgttgaagctcaagtttaaagaagcgttgcagaggcccacggtctcctgggtcccggccacctgtccatattccacatttgctgactgtgctccctgcactccactcaagttgagagttcaaatagtcttgaaggggaatcagcttcaggatggaaggacccaggagaggccccgaggtgggagggttctgtaaatacagactactgcgagtgtccagagctctctgccatgatacttccttgggactgacttggctgagaacgtgttctgtcagaggatttgttagaactctgcccttttgtctgaaactcaaggccaaggagaatgataggagacttaggacagagctgacccttgcaccaggctgggaggctgcagcccttttagatgccacttactgtaagtggccagaataccagagaggtgggttccatggtcaaatgcacagtaggtgtttacctttacatttggatcaccttgtagtctttaaattcttggtccctgaggccaagtccacaacttgccttctagtcacttgcctgcccgcagtggtggtggatgtgttagctggtagatttggaatcagtcaccagtctttctgtactgtcttggttagctctatataagtaggggcagcttagccctgaggcccagagacctgctgtcctttttctccttgagggaggaaataaaactgcggaatacaatgtccttccatagcatgggaagaagaaaataaacatctcctttccaaca

SEQ ID NO: 378426 - DNA, 4459 bp, Homo sapiens
ggcccggcgaccgctggagctgcgcagcgcgcctcggagctgcctgcgggcgcacgccgtcttccccgccagtctgccccggaggattgggggtcccagcctgcgtcccgtcagtcccttcttggcccggagtgcgcggagctgggagtggcttcgccatggctgtgagaagggactccgtgtggaagtactgctggggtgttttgatggttttatgcagaactgcgatttccaaatcgatagttttagagcctatctattggaattcctcgaactccaaatttctacctggacaaggactggtactatacccacagataggagacaaattggatattatttgccccaaagtggactctaaaactgttggccagtatgaatattataaagtttatatggttgataaagaccaagcagacagatgcactattaagaaggaaaatacccctctcctcaactgtgccaaaccagaccaagatatcaaattcaccatcaagtttcaagaattcagccctaacctctggggtctagaatttcagaagaacaaagattattacattatatctacatcaaatgggtctttggagggcctggataaccaggagggaggggtgtgccagacaagagccatgaagatcctcatgaaagttggacaagatgcaagttctgctggatcaaccaggaataaagatccaacaagacgtccagaactagaagctggtacaaatggaagaagttcgacaacaagtccctttgtaaaaccaaatccaggttctagcacagacggcaacagcgccggacattcggggaacaacatcctcggttccgaagtggccttatttgcagggattgcttcaggatgcatcatcttcatcgtcatcatcatcacgctggtggtcctcttgctgaagtaccggaggagacacaggaagcactcgccgcagcacacgaccacgctgtcgctcagcacactggccacacccaagcgcagcggcaacaacaacggctcagagcccagtgacattatcatcccgctaaggactgcggacagcgtcttctgccctcactacgagaaggtcagcggggactacgggcacccggtgtacatcgtccaggagatgcccccgcagagcccggcgaacatttactacaaggtctgagagggaccctggtggtacctgtgctttcccagaggacacctaatgtcccgatgcctcccttgagggtttgagagcccgcgtgctggagaattgactgaagcacagcaccgggggagagggacactcctcctcggaagagcccgtcgcgctggacagcttacctagtcttgtagcattcggccttggtgaacacacacgctccctggaagctggaagactgtgcagaagacgcccattcggactgctgtgccgcgtcccacgtctcctcctcgaagccatgtgctgcggtcactcaggcctctgcagaagccaagggaagacagtggtttgtggacgagagggctgtgagcatcctggcaggtgccccaggatgccacgcctggaagggccggcttctgcctggggtgcatttcccccgcagtgcataccggacttgtcacacggacctcgggctagttaaggtgtgcaaagatctctagagtttagtccttactgtctcactcgttctgttacccagggctctgcagcacctcacctgagacctccactccacatctgcatcactcatggaacactcatgtctggagtcccctcctccagccgctggcaacaacagcttcagtccatgggtaatccgttcatagaaattgtgtttgctaacaaggtgccctttagccagatgctaggctgtctgcgaagaaggctaggagttcatagaagggagtggggctggggaaagggctggctgcaattgcagctcactgctgctgcctctgaaacagaaagttggaaaggaaaaaagaaaaaagcaattaggtagcacagcactttggttttgctgagatcgaagaggccagtaggagacacgacagcacacacagtggattccagtgcatggggaggcactcgctgttatcaaatagcgatgtgcaggaagaaaagcccctcttcattccggggaacaaagacgggtattgttgggaaaggaacaggcttggagggaagggagaaagtaggccgctgatgatatattcgggcaggactgttgtggtactggcaataagatacacagctccgagctgtaggagagtcggtctgctttggatgattttttaagcagactcagctgctatacttatcacattttattaaacacagggaaagcatttaggagaatagcagagagccaaatctgacctaaaagttgaaaagccaaaggtcaaacaggctgtaattccatcatcatcgttgttattaaagaatccttatctataaaaggtaggtcagatccccctccccccaggttcctccttcccctcccgattgagccttacgacactttggtttatgcggtgctgtccgggtgccagggctgcagggtcggtactgatggaggctgcagcgcccggtgctctgtgtcaaggtgaagcacatacggcagacctcttagagtccttaagacggaagtaaattatgatgtccagggggagaaggaagataggacgtatttataataggtatatagaacacaagggatataaaatgaaagatttttactaatatatattttaaggttgcacacagtacacaccagaagatgtgaaattcatttgtggcaattaagtggtcccaatgctcagcgcttaaaaaaacaaattggacagctacttctgggaaaaacaacatcattccaaaaagaacaataatgagagcaaatgcaaaaataaccaagtcctccgaaggcatctcacggaaccgtagactaggaagtacgagccccacagagcaggaagccgatgtgactgcatcatatatttaacaatgacaagatgttccggcgtttatttctgcgttgggttttcccttgccttatgggctgaagtgttctctagaatccagcaggtcacactgggggcttcaggtgacgatttagctgtggctccctcctcctgtcctcccccgcaccccctcccttctgggaaacaagaagagtaaacaggaaacctacttttttatgtgctatgcaaaatagacatctttaacatagtcctgttactatggtaacactttgctttctgaattggaagggaaaaaaatgtagcgacagattttttaaggttctcagacctccagtgagtacctgcaaaaatgagttgtcacagaaattatgatcctctatttcctgaacctggaaatgatgttggtccaaagtgcgtgtgtgtatgtgtgagtgggtgcgtggtatacatgtgtacatatatgtataatatatatctacaatatatattatatatatctatatcatatttctgtggagggttgccatggtaaccagccacagtacatatgtaattctttccatcaccccaacctctcctttctgtgcattcatgcaagagtttcttgtaagccatcagaagttacttttaggatgggggagaggggcgagaaggggaaaaatgggaaatagtctgattttaatgaaatcaaatgtatgtatcatcagttggctacgttttggttctatgctaaactgtgaaaaatcagatgaattgataaaagagttccctgcaaccaattgaaaagtgttctgtgcgtctgttttgtgtctggtgcagaatatgacaatctaccaactgtccctttgtttgaagttggtttagctttggaaagttactgtaaatgccttgcttgtatgatcgtccctggtcacccgactttggaatttgcaccatcatgtttcagtgaagatgctgtaaataggttcagattttactgtctatggatttggggtgttacagtagccttattcacctttttaataaaaatacacatgaaaacaagaaagaaatggcttttcttacccagattgtgtacatagagcaatgttggttttttataaagtctaagcaagatgttttgtataaaatctgaattttgcaatgtatttagctacagcttgtttaacggcagtgtcattcccctttgcactgtaatgaggaaaaaatggtataaaaggttgccaaattgctgcatatttgtgccgtaattatgtaccatgaatatttatttaaaatttcgttgtccaatttgtaagtaacacagtattatgcctgagttataaatatttttttctttctttgttttattttaatagcctgtcataggttttaaatctgctttagtttcacattgcagttagccccagaaaatgaaatccgtgaagtcacattccacatctgtttcaaactgaatttgttcttaaaaaaataaaatatttttttcctatggaaaaaaag

SEQ ID NO: 378427 - DNA, 4320 bp, Homo sapiens
ggcccggcgaccgctggagctgcgcagcgcgcctcggagctgcctgcgggcgcacgccgtcttccccgccagtctgccccggaggattgggggtcccagcctgcgtcccgtcagtcccttcttggcccggagtgcgcggagctgggagtggcttcgccatggctgtgagaagggactccgtgtggaagtactgctggggtgttttgatggttttatgcagaactgcgatttccaaatcgatagttttagagcctatctattggaattcctcgaactccaaatttctacctggacaaggactggtactatacccacagataggagacaaattggatattatttgccccaaagtggactctaaaactgttggccagtatgaatattataaagtttatatggttgataaagaccaagcagacagatgcactattaagaaggaaaatacccctctcctcaactgtgccaaaccagaccaagatatcaaattcaccatcaagtttcaagaattcagccctaacctctggggtctagaatttcagaagaacaaagattattacattatatctacatcaaatgggtctttggagggcctggataaccaggagggaggggtgtgccagacaagagccatgaagatcctcatgaaagttggacaagatgcaagttctgctggatcaaccaggaataaagatccaacaagacgtccagaactagaagctggtacaaatggaagaagttcgacaacaagtccctttgtaaaaccaaatccaggttctagcacagacggcaacagcgccggacattcggggaacaacatcctcggttccgaagtggccttatttgcagggattgcttcaggatgcatcatcttcatcgtcatcatcatcacgctggtggtcctcttgctgaagtaccggaggagacacaggaagcactcgccgcagcacacgaccacgctgtcgctcagcacactggccacacccaagcgcagcggcaacaacaacggctcagagcccagtgacattatcatcccgctaaggactgcggacagcgtcttctgccctcactacgagaaggtcagcggggactacgggcacccggtgtacatcgtccaggagatgcccccgcagagcccggcgaacatttactacaaggtctgagagggaccctggtggtacctgtgctttcccagaggacacctaatgtcccgatgcctcccttgagggtttgagagcccgcgtgctggagaattgactgaagcacagcaccgggggagagggacactcctcctcgaagccatgtgctgcggtcactcaggcctctgcagaagccaagggaagacagtggtttgtggacgagagggctgtgagcatcctggcaggtgccccaggatgccacgcctggaagggccggcttctgcctggggtgcatttcccccgcagtgcataccggacttgtcacacggacctcgggctagttaaggtgtgcaaagatctctagagtttagtccttactgtctcactcgttctgttacccagggctctgcagcacctcacctgagacctccactccacatctgcatcactcatggaacactcatgtctggagtcccctcctccagccgctggcaacaacagcttcagtccatgggtaatccgttcatagaaattgtgtttgctaacaaggtgccctttagccagatgctaggctgtctgcgaagaaggctaggagttcatagaagggagtggggctggggaaagggctggctgcaattgcagctcactgctgctgcctctgaaacagaaagttggaaaggaaaaaagaaaaaagcaattaggtagcacagcactttggttttgctgagatcgaagaggccagtaggagacacgacagcacacacagtggattccagtgcatggggaggcactcgctgttatcaaatagcgatgtgcaggaagaaaagcccctcttcattccggggaacaaagacgggtattgttgggaaaggaacaggcttggagggaagggagaaagtaggccgctgatgatatattcgggcaggactgttgtggtactggcaataagatacacagctccgagctgtaggagagtcggtctgctttggatgattttttaagcagactcagctgctatacttatcacattttattaaacacagggaaagcatttaggagaatagcagagagccaaatctgacctaaaagttgaaaagccaaaggtcaaacaggctgtaattccatcatcatcgttgttattaaagaatccttatctataaaaggtaggtcagatccccctccccccaggttcctccttcccctcccgattgagccttacgacactttggtttatgcggtgctgtccgggtgccagggctgcagggtcggtactgatggaggctgcagcgcccggtgctctgtgtcaaggtgaagcacatacggcagacctcttagagtccttaagacggaagtaaattatgatgtccagggggagaaggaagataggacgtatttataataggtatatagaacacaagggatataaaatgaaagatttttactaatatatattttaaggttgcacacagtacacaccagaagatgtgaaattcatttgtggcaattaagtggtcccaatgctcagcgcttaaaaaaacaaattggacagctacttctgggaaaaacaacatcattccaaaaagaacaataatgagagcaaatgcaaaaataaccaagtcctccgaaggcatctcacggaaccgtagactaggaagtacgagccccacagagcaggaagccgatgtgactgcatcatatatttaacaatgacaagatgttccggcgtttatttctgcgttgggttttcccttgccttatgggctgaagtgttctctagaatccagcaggtcacactgggggcttcaggtgacgatttagctgtggctccctcctcctgtcctcccccgcaccccctcccttctgggaaacaagaagagtaaacaggaaacctacttttttatgtgctatgcaaaatagacatctttaacatagtcctgttactatggtaacactttgctttctgaattggaagggaaaaaaatgtagcgacagattttttaaggttctcagacctccagtgagtacctgcaaaaatgagttgtcacagaaattatgatcctctatttcctgaacctggaaatgatgttggtccaaagtgcgtgtgtgtatgtgtgagtgggtgcgtggtatacatgtgtacatatatgtataatatatatctacaatatatattatatatatctatatcatatttctgtggagggttgccatggtaaccagccacagtacatatgtaattctttccatcaccccaacctctcctttctgtgcattcatgcaagagtttcttgtaagccatcagaagttacttttaggatgggggagaggggcgagaaggggaaaaatgggaaatagtctgattttaatgaaatcaaatgtatgtatcatcagttggctacgttttggttctatgctaaactgtgaaaaatcagatgaattgataaaagagttccctgcaaccaattgaaaagtgttctgtgcgtctgttttgtgtctggtgcagaatatgacaatctaccaactgtccctttgtttgaagttggtttagctttggaaagttactgtaaatgccttgcttgtatgatcgtccctggtcacccgactttggaatttgcaccatcatgtttcagtgaagatgctgtaaataggttcagattttactgtctatggatttggggtgttacagtagccttattcacctttttaataaaaatacacatgaaaacaagaaagaaatggcttttcttacccagattgtgtacatagagcaatgttggttttttataaagtctaagcaagatgttttgtataaaatctgaattttgcaatgtatttagctacagcttgtttaacggcagtgtcattcccctttgcactgtaatgaggaaaaaatggtataaaaggttgccaaattgctgcatatttgtgccgtaattatgtaccatgaatatttatttaaaatttcgttgtccaatttgtaagtaacacagtattatgcctgagttataaatatttttttctttctttgttttattttaatagcctgtcataggttttaaatctgctttagtttcacattgcagttagccccagaaaatgaaatccgtgaagtcacattccacatctgtttcaaactgaatttgttcttaaaaaaataaaatatttttttcctatggaaaaaaag

SEQ ID NO: 378428 - DNA, 3207 bp, Homo sapiens
  misc_feature (17)..(17): n is a, c, g, or t
  misc_feature (126)..(126): n is a, c, g, or t
  misc_feature (173)..(173): n is a, c, g, or t
  misc_feature (201)..(201): n is a, c, g, or t
  misc_feature (216)..(216): n is a, c, g, or t
  misc_feature (221)..(221): n is a, c, g, or t
  misc_feature (245)..(245): n is a, c, g, or t
  misc_feature (287)..(287): n is a, c, g, or t
  misc_feature (302)..(302): n is a, c, g, or t
gcatcgggaaataggtntcctctgggaaacacaggacccaccaggtccctctcaagaccttgtagaaaatgtcgccggggccctcgggcatctcctggacgatgtacaccggtgcccgtatccccnctgaccttctcgtagtgagggcagaagacgctgtccccagtccttancgggatgataatgtcactgggctctganccgttgtttgttccncttcncttgggtgtggccagtgttctgancgacagcgtggtcgtgttctgcggcgagtgcttcctgtttcncccccggtacttcancaagaggaccaccagcgtgatgatgatgacgatgaagatgatgcatcctgaagcaatccctgcaaataaggccacttcggaaccgaggatgttgttccccgaatgtccggcgctgttgcccagggctctgcagcacctcacctgagacctccactccacatctgcatcactcatggaacactcatgtctggagtcccctcctccagccgctggcaacaacagcttcagtccatgggtaatccgttcatagaaattgtgtttgctaacaaggtgccctttagccagatgctaggctgtctgcgaagaaggctaggagttcatagaagggagtggggctggggaaagggctggctgcaattgcagctcactgctgctgcctctgaaacagaaagttggaaaggaaaaaagaaaaaagcaattaggtagcacagcactttggttttgctgagatcgaagaggccagtaggagacacgacagcacacacagtggattccagtgcatggggaggcactcgctgttatcaaatagcgatgtgcaggaagaaaagcccctcttcattccggggaacaaagacgggtattgttgggaaaggaacaggcttggagggaagggagaaagtaggccgctgatgatatattcgggcaggactgttgtggtactggcaataagatacacagctccgagctgtaggagagtcggtctgctttggatgattttttaagcagactcagctgctatacttatcacattttattaaacacagggaaagcatttaggagaatagcagagagccaaatctgacctaaaagttgaaaagccaaaggtcaaacaggctgtaattccatcatcatcgttgttattaaagaatccttatctataaaaggtaggtcagatccccctccccccaggttcctccttcccctcccgattgagccttacgacactttggtttatgcggtgctgtccgggtgccagggctgcagggtcggtactgatggaggctgcagcgcccggtgctctgtgtcaaggtgaagcacatacggcagacctcttagagtccttaagacggaagtaaattatgatgtccagggggagaaggaagataggacgtatttataataggtatatagaacacaagggatataaaatgaaagatttttactaatatatattttaaggttgcacacagtacacaccagaagatgtgaaattcatttgtggcaattaagtggtcccaatgctcagcgcttaaaaaaacaaattggacagctacttctgggaaaaacaacatcattccaaaaagaacaataatgagagcaaatgcaaaaataaccaagtcctccgaaggcatctcacggaaccgtagactaggaagtacgagccccacagagcaggaagccgatgtgactgcatcatatatttaacaatgacaagatgttccggcgtttatttctgcgttgggttttcccttgccttatgggctgaagtgttctctagaatccagcaggtcacactgggggcttcaggtgacgatttagctgtggctccctcctcctgtcctcccccgcaccccctcccttctgggaaacaagaagagtaaacaggaaacctacttttttatgtgctatgcaaaatagacatctttaacatagtcctgttactatggtaacactttgctttctgaattggaagggaaaaaaatgtagcgacagattttttaaggttctcagacctccagtgagtacctgcaaaaatgagttgtcacagaaattatgatcctctatttcctgaacctggaaatgatgttggtccaaagtgcgtgtgtgtatgtgtgagtgggtgcgtggtatacatgtgtacatatatgtataatatatatctacaatatatattatatatatctatatcatatttctgtggagggttgccatggtaaccagccacagtacatatgtaattctttccatcaccccaacctctcctttctgtgcattcatgcaagagtttcttgtaagccatcagaagttacttttaggatgggggagaggggcgagaaggggaaaaatgggaaatagtctgattttaatgaaatcaaatgtatgtatcatcagttggctacgttttggttctatgctaaactgtgaaaaatcagatgaattgataaaagagttccctgcaaccaattgaaaagtgttctgtgcgtctgttttgtgtctggtgcagaatatgacaatctaccaactgtccctttgtttgaagttggtttagctttggaaagttactgtaaatgccttgcttgtatgatcgtccctggtcacccgactttggaatttgcaccatcatgtttcagtgaagatgctgtaaataggttcagattttactgtctatggatttggggtgttacagtagccttattcacctttttaataaaaatacacatgaaaacaagaaagaaatggcttttcttacccagattgtgtacatagagcaatgttggttttttataaagtctaagcaagatgttttgtataaaatctgaattttgcaatgtatttagctacagcttgtttaacggcagtgtcattcccctttgcactgtaatgaggaaaaaatggtataaaaggttgccaaattgctgcatatttgtgccgtaattatgtaccatgaatatttatttaaaatttcgttgtccaatttgtaagtaacacagtattatgcctgagttataaatatttttttctttctttgttttattttaatagcctgtcataggttttaaatctgctttagtttcacattgcagttagccccagaaaatgaaatccgtgaagtcacattccacatctgtttcaaactgaatttgttcttaaaaaaataaaatatttttttcctatggaaaaaaag

SEQ ID NO: 378429 - DNA, 2476 bp, Homo sapiens
  misc_feature (5)..(5): n is a, c, g, or t
tgatnagctgggtccaaagccgacatacagccagtaggagacacgacagcacacacagtggattccagtgcatggggaggcactcgctgttatcaaatagcgatgtgcaggaagaaaagcccctcttcattccggggaacaaagacgggtattgttgggaaaggaacaggcttggagggaagggagaaagtaggccgctgatgatatattcgggcaggactgttgtggtactggcaataagatacacagctccgagctgtaggagagtcggtctgctttggatgattttttaagcagactcagctgctatacttatcacattttattaaacacagggaaagcatttaggagaatagcagagagccaaatctgacctaaaagttgaaaagccaaaggtcaaacaggctgtaattccatcatcatcgttgttattaaagaatccttatctataaaaggtaggtcagatccccctccccccaggttcctccttcccctcccgattgagccttacgacactttggtttatgcggtgctgtccgggtgccagggctgcagggtcggtactgatggaggctgcagcgcccggtgctctgtgtcaaggtgaagcacatacggcagacctcttagagtccttaagacggaagtaaattatgatgtccagggggagaaggaagataggacgtatttataataggtatatagaacacaagggatataaaatgaaagatttttactaatatatattttaaggttgcacacagtacacaccagaagatgtgaaattcatttgtggcaattaagtggtcccaatgctcagcgcttaaaaaaacaaattggacagctacttctgggaaaaacaacatcattccaaaaagaacaataatgagagcaaatgcaaaaataaccaagtcctccgaaggcatctcacggaaccgtagactaggaagtacgagccccacagagcaggaagccgatgtgactgcatcatatatttaacaatgacaagatgttccggcgtttatttctgcgttgggttttcccttgccttatgggctgaagtgttctctagaatccagcaggtcacactgggggcttcaggtgacgatttagctgtggctccctcctcctgtcctcccccgcaccccctcccttctgggaaacaagaagagtaaacaggaaacctacttttttatgtgctatgcaaaatagacatctttaacatagtcctgttactatggtaacactttgctttctgaattggaagggaaaaaaatgtagcgacagattttttaaggttctcagacctccagtgagtacctgcaaaaatgagttgtcacagaaattatgatcctctatttcctgaacctggaaatgatgttggtccaaagtgcgtgtgtgtatgtgtgagtgggtgcgtggtatacatgtgtacatatatgtataatatatatctacaatatatattatatatatctatatcatatttctgtggagggttgccatggtaaccagccacagtacatatgtaattctttccatcaccccaacctctcctttctgtgcattcatgcaagagtttcttgtaagccatcagaagttacttttaggatgggggagaggggcgagaaggggaaaaatgggaaatagtctgattttaatgaaatcaaatgtatgtatcatcagttggctacgttttggttctatgctaaactgtgaaaaatcagatgaattgataaaagagttccctgcaaccaattgaaaagtgttctgtgcgtctgttttgtgtctggtgcagaatatgacaatctaccaactgtccctttgtttgaagttggtttagctttggaaagttactgtaaatgccttgcttgtatgatcgtccctggtcacccgactttggaatttgcaccatcatgtttcagtgaagatgctgtaaataggttcagattttactgtctatggatttggggtgttacagtagccttattcacctttttaataaaaatacacatgaaaacaagaaagaaatggcttttcttacccagattgtgtacatagagcaatgttggttttttataaagtctaagcaagatgttttgtataaaatctgaattttgcaatgtatttagctacagcttgtttaacggcagtgtcattcccctttgcactgtaatgaggaaaaaatggtataaaaggttgccaaattgctgcatatttgtgccgtaattatgtaccatgaatatttatttaaaatttcgttgtccaatttgtaagtaacacagtattatgcctgagttataaatatttttttctttctttgttttattttaatagcctgtcataggttttaaatctgctttagtttcacattgcagttagccccagaaaatgaaatccgtgaagtcacattccacatctgtttcaaactgaatttgttcttaaaaaaataaaatatttttttcctatggaaaaaaag

SEQ ID NO: 378430 - DNA, 759 bp, Homo sapiens
gccatcccttttatttatagactaacattaaatcagtcatttgtgaaggaaggagaaagtgcctaaataaatttggagtcagatagcatacgtgcggcagtgtttccgatatccatttctctttatttctttttctttttctttttggctttcagcatccccatactttcagaaaacttgtgactaagagtgaattcttatttttcaaattgttttcagacatttcatgttcatgtaaacttggcttattgatttcctgatttttctttatttttttgttttgtccattttatttttaatcagctacatcaaatgggtctttggagggcctggataaccaggagggaggggtgtgccagacaagagccatgaagatcctcatgaaagttggacaaggtaaagaccatctgctgcttcatgacgccactgtgacctggtgtagcccccagctagtatggtgctaatgttgccgatgcccaccttcattcgctcttctttttagttttcaaagcaaacccttctgcactttgagccactgacagatttcctcaagtcaatgtactaagcttttattggagatctaagagttaagatcagcaaggtagaatgtctattgccatagatagatagatagatagatagataatagatagatagatagatagatagatatttctttttaaaaagcaaaacactttggttcaaaatcaaaatatccagaatgaaaactaaaagcttgtgcagttttgctcatttctg

SEQ ID NO: 378431 - DNA, 4461 bp, Homo sapiens
ggcccggcgaccgctggagctgcgcagcgcgcctcggagctgcctgcgggcgcacgccgtcttccccgccagtctgccccggaggattgggggtcccagcctgcgtcccgtcagtcccttcttggcccggagtgcgcggagctgggagtggcttcgccatggctgtgagaagggactccgtgtggaagtactgctggggtgttttgatggttttatgcagaactgcgatttccaaatcgatagttttagagcctatctattggaattcctcgaactccaaatttctacctggacaaggactggtactatacccacagataggagacaaattggatattatttgccccaaagtggactctaaaactgttggccagtatgaatattataaagtttatatggttgataaagaccaagcagacagatgcactattaagaaggaaaatacccctctcctcaactgtgccaaaccagaccaagatatcaaattcaccatcaagtttcaagaattcagccctaacctctggggtctagaatttcagaagaacaaagattattacattatatctacatcaaatgggtctttggagggcctggataaccaggagggaggggtgtgccagacaagagccatgaagatcctcatgaaagttggacaagatgcaagttctgctggatcaaccaggaataaagatccaacaagacgtccagaactagaagctggtacaaatggaagaagttcgacaacaagtccctttgtaaaaccaaatccaggttctagcacagacggcaacagcgccggacattcggggaacaacatcctcggttccgaagtggccttatttgcagggattgcttcaggatgcatcatcttcatcgtcatcatcatcacgctggtggtcctcttgctgaagtaccggaggagacacaggaagcactcgccgcagcacacgaccacgctgtcgctcagcacactggccacacccaagcgcagcggcaacaacaacggctcagagcccagtgacattatcatcccgctaaggactgcggacagcgtcttctgccctcactacgagaaggtcagcggggactacgggcacccggtgtacatcgtccaggagatgcccccgcagagcccggcgaacatttactacaaggtctgagagggaccctggtggtacctgtgctttcccagaggacacctaatgtcccgatgcctcccttgagggtttgagagcccgcgtgctggagaattgactgaagcacagcaccgggggagagggacactcctcctcggaagagcccgtcgcgctggacagcttacctagtcttgtagcattcggccttggtgaacacacacgctccctggaagctggaagactgtgcagaagacgcccattcggactgctgtgccgcgtcccacgtctcctcctcgaagccatgtgctgcggtcactcaggcctctgcagaagccaagggaagacagtggtttgtggacgagagggctgtgagcatcctggcaggtgccccaggatgccacgcctggaagggccggcttctgcctggggtgcatttcccccgcagtgcataccggacttgtcacacggacctcgggctagttaaggtgtgcaaagatctctagagtttagtccttactgtctcactcgttctgttacccagggctctgcagcacctcacctgagacctccactccacatctgcatcactcatggaacactcatgtctggagtcccctcctccagccgctggcaacaacagcttcagtccatgggtaatccgttcatagaaattgtgtttgctaacaaggtgccctttagccagatgctaggctgtctgcgaagaaggctaggagttcatagaagggagtggggctggggaaagggctggctgcaattgcagctcactgctgctgcctctgaaacagaaagttggaaaggaaaaaagaaaaaagcaattaggtagcacagcactttggttttgctgagatcgaagaggccagtaggagacacgacagcacacacagtggattccagtgcatggggaggcactcgctgttatcaaatagcgatgtgcaggaagaaaagcccctcttcattccggggaacaaagacgggtattgttgggaaaggaacaggcttggagggaagggagaaagtaggccgctgatgatatattcgggcaggactgttgtggtactggcaataagatacacagctccgagctgtaggagagtcggtctgctttggatgattttttaagcagactcagctgctatacttatcacattttattaaacacagggaaagcatttaggagaatagcagagagccaaatctgacctaaaagttgaaaagccaaaggtcaaacaggctgtaattccatcatcatcgttgttattaaagaatccttatctataaaaggtaggtcagatccccctccccccaggttcctccttcccctcccgattgagccttacgacactttggtttatgcggtgctgtccgggtgccagggctgcagggtcggtactgatggaggctgcagcgcccggtgctctgtgtcaaggtgaagcacatacggcagacctcttagagtccttaagacggaagtaaattatgatgtccagggggagaaggaagataggacgtatttataataggtatatagaacacaagggatataaaatgaaagatttttactaatatatattttaaggttgcacacagtacacaccagaagatgtgaaattcatttgtggcaattaagtggtcccaatgctcagcgcttaaaaaaacaaattggacagctacttctgggaaaaacaacatcattccaaaaagaacaataatgagagcaaatgcaaaaataaccaagtcctccgaaggcatctcacggaaccgtagactaggaagtacgagccccacagagcaggaagccgatgtgactgcatcatatatttaacaatgacaagatgttccggcgtttatttctgcgttgggttttcccttgccttatgggctgaagtgttctctagaatccagcaggtcacactgggggcttcaggtgacgatttagctgtggctccctcctcctgtcctcccccgcaccccctcccttctgggaaacaagaagagtaaacaggaaacctacttttttatgtgctatgcaaaatagacatctttaacatagtcctgttactatggtaacactttgctttctgaattggaagggaaaaaaatgtagcgacagattttttaaggttctcagacctccagtgagtacctgcaaaaatgagttgtcacagaaattatgatcctctatttcctgaacctggaaatgatgttggtccaaagtgcgtgtgtgtatgtgtgagtgggtgcgtggtatacatgtgtacatatatgtataatatatatctacaatatatattatatatatctatatcatatttctgtggagggttgccatggtaaccagccacagtacatatgtaattctttccatcaccccaacctctcctttctgtgcattcatgcaagagtttcttgtaagccatcagaagttacttttaggatgggggagaggggcgagaaggggaaaaatgggaaatagtctgattttaatgaaatcaaatgtatgtatcatcagttggctacgttttggttctatgctaaactgtgaaaaatcagatgaattgataaaagagttccctgcaaccaattgaaaagtgttctgtgcgtctgttttgtgtctggtgcagaatatgacaatctaccaactgtccctttgtttgaagttggtttagctttggaaagttactgtaaatgccttgcttgtatgatcgtccctggtcacccgactttggaatttgcaccatcatgtttcagtgaagatgctgtaaataggttcagattttactgtctatggatttggggtgttacagtagccttattcacctttttaataaaaatacacatgaaaacaagaaagaaatggcttttcttacccagattgtgtacatagagcaatgttggttttttataaagtctaagcaagatgttttgtataaaatctgaattttgcaatgtatttagctacagcttgtttaacggcagtgtcattcccctttgcactgtaatgaggaaaaaatggtataaaaggttgccaaattgctgcatatttgtgccgtaattatgtaccatgaatatttatttaaaatttcgttgtccaatttgtaagtaacacagtattatgcctgagttataaatatttttttctttctttgttttattttaatagcctgtcataggttttaaatctgctttagtttcacattgcagttagccccagaaaatgaaatccgtgaagtcacattccacatctgtacgtacagagtgaatgtcagggtggagaatggacagctctaagagttttgcttctaaa

SEQ ID NO: 378432 - DNA, 3379 bp, Homo sapiens
actctagagcatccgctttaactagcccgacagcggaagccagcacacaatgagcccagttcctatcctagttgggtgagactggtggggagggctgtggccagagctgacccctccccaaggacatccctcggggccacctttcctcctcctgctccccccggcctcctggaaaactgctcagaagtcagcagagcctgggcagcgtgtggcctgtggggcagccaagcactggagggggacgacagcctaactcctatgagagcagagggaggggtggtggcacagcgaggagggcggtggtgtgggcagcgctgaggcactattctttagttgagaagcaaggggcagtcatgggtgtggggagggcagttggcccatgcaaccctaggcagcatctacgagaaattcttgaagatgtccaggtcgaaggccgtgtccaggaggcgctcgagcttccgtccaggtgggtctgtgtcctggtgtagatttcccccgcagtgcataccggacttgtcacacggacctcgggctagttaaggtgtgcaaagatctctagagtttagtccttactgtctcactcgttctgttacccagggctctgcagcacctcacctgagacctccactccacatctgcatcactcatggaacactcatgtctggagtcccctcctccagccgctggcaacaacagcttcagtccatgggtaatccgttcatagaaattgtgtttgctaacaaggtgccctttagccagatgctaggctgtctgcgaagaaggctaggagttcatagaagggagtggggctggggaaagggctggctgcaattgcagctcactgctgctgcctctgaaacagaaagttggaaaggaaaaaagaaaaaagcaattaggtagcacagcactttggttttgctgagatcgaagaggccagtaggagacacgacagcacacacagtggattccagtgcatggggaggcactcgctgttatcaaatagcgatgtgcaggaagaaaagcccctcttcattccggggaacaaagacgggtattgttgggaaaggaacaggcttggagggaagggagaaagtaggccgctgatgatatattcgggcaggactgttgtggtactggcaataagatacacagctccgagctgtaggagagtcggtctgctttggatgattttttaagcagactcagctgctatacttatcacattttattaaacacagggaaagcatttaggagaatagcagagagccaaatctgacctaaaagttgaaaagccaaaggtcaaacaggctgtaattccatcatcatcgttgttattaaagaatccttatctataaaaggtaggtcagatccccctccccccaggttcctccttcccctcccgattgagccttacgacactttggtttatgcggtgctgtccgggtgccagggctgcagggtcggtactgatggaggctgcagcgcccggtgctctgtgtcaaggtgaagcacatacggcagacctcttagagtccttaagacggaagtaaattatgatgtccagggggagaaggaagataggacgtatttataataggtatatagaacacaagggatataaaatgaaagatttttactaatatatattttaaggttgcacacagtacacaccagaagatgtgaaattcatttgtggcaattaagtggtcccaatgctcagcgcttaaaaaaacaaattggacagctacttctgggaaaaacaacatcattccaaaaagaacaataatgagagcaaatgcaaaaataaccaagtcctccgaaggcatctcacggaaccgtagactaggaagtacgagccccacagagcaggaagccgatgtgactgcatcatatatttaacaatgacaagatgttccggcgtttatttctgcgttgggttttcccttgccttatgggctgaagtgttctctagaatccagcaggtcacactgggggcttcaggtgacgatttagctgtggctccctcctcctgtcctcccccgcaccccctcccttctgggaaacaagaagagtaaacaggaaacctacttttttatgtgctatgcaaaatagacatctttaacatagtcctgttactatggtaacactttgctttctgaattggaagggaaaaaaatgtagcgacagattttttaaggttctcagacctccagtgagtacctgcaaaaatgagttgtcacagaaattatgatcctctatttcctgaacctggaaatgatgttggtccaaagtgcgtgtgtgtatgtgtgagtgggtgcgtggtatacatgtgtacatatatgtataatatatatctacaatatatattatatatatctatatcatatttctgtggagggttgccatggtaaccagccacagtacatatgtaattctttccatcaccccaacctctcctttctgtgcattcatgcaagagtttcttgtaagccatcagaagttacttttaggatgggggagaggggcgagaaggggaaaaatgggaaatagtctgattttaatgaaatcaaatgtatgtatcatcagttggctacgttttggttctatgctaaactgtgaaaaatcagatgaattgataaaagagttccctgcaaccaattgaaaagtgttctgtgcgtctgttttgtgtctggtgcagaatatgacaatctaccaactgtccctttgtttgaagttggtttagctttggaaagttactgtaaatgccttgcttgtatgatcgtccctggtcacccgactttggaatttgcaccatcatgtttcagtgaagatgctgtaaataggttcagattttactgtctatggatttggggtgttacagtagccttattcacctttttaataaaaatacacatgaaaacaagaaagaaatggcttttcttacccagattgtgtacatagagcaatgttggttttttataaagtctaagcaagatgttttgtataaaatctgaattttgcaatgtatttagctacagcttgtttaacggcagtgtcattcccctttgcactgtaatgaggaaaaaatggtataaaaggttgccaaattgctgcatatttgtgccgtaattatgtaccatgaatatttatttaaaatttcgttgtccaatttgtaagtaacacagtattatgcctgagttataaatatttttttctttctttgttttattttaatagcctgtcataggttttaaatctgctttagtttcacattgcagttagccccagaaaatgaaatccgtgaagtcacattccacatctgtttcaaactgaatttgttcttaaaaaaataaaatatttttttcctatggaaaaaaag

SEQ ID NO: 378433 - DNA, 1756 bp, Homo sapiens
cggtgacgtcacccccagcggggataaagcgcccccgcccgggtcggggccaggacgccgcccggcgcggagtggctgccctgcgcggggacactcagagcccggtgggcgggaggaaggcggcatgccccagacggtgatcctcccgggccctgcgccctggggcttcaggctctcagggggcatagacttcaaccagcctttggtcatcaccaggattacaccaggaagcaaggcggcagctgccaacctgtgtcctggagatgtcatcctggctattgacggctttgggacagagtccatgactcatgctgatgcgcaggacaggattaaagcagcagctcaccagctgtgtctcaaaattgacaggggagaaactcacttatggtctccacaagtatctgaagatgggaaagcccatcctttcaaaatcaacttagaatcagaaccacaggacgggaactactttgaacacaagcataatattcggcccaaacctttcgtgatcccgggccgaagcagtggatgcagcactccctccgggattgactgtggcagtggacgcagcaccccttcttctgtcagtactgttagtaccatttgcccaggtgacttgaaagttgcggctaagctggcccctaacattcctttggaaatggaacttcctggtgtgaagattgtacatgctcagtttaatacacctatgcagttgtactcagatgacaatattatggaaacactccagggtcaggtttcaacagccctaggggaaacacctttgatgagcgagcccacagcctcggtgccccccgagtcggacgtgtaccggatgctccacgacaatcggaatgagcccacacagcctcgccagtcgggctccttcagagtgctccagggaatggtggacgatggctctgatgaccgtccggctggaacgcggagtgtgagagctccggtgacgaaagtccatggcggttcaggcggggcacagaggatgccgctctgtgacaaatgtgggagtggcatagttggtgctgtggtgaaggcgcgggataagtaccggcaccctgagtgcttcgtgtgtgccgactgcaacctcaacctcaagcaaaagggctacttcttcatagaaggggagctgtactgcgaaacccacgcaagagcccgcacaaagcccccagagggctatgacacggtcactctgtatcccaaagcttaagtctctgcaggcgtggcacgcacgcacgcacccacccacgcgcacttacacgagaagacattcatggctttgggcagaaggattgtgcagattgtcaactccaaatctaaagtcaaggctttagacctttatcctattgtttattgaggaaaaggaatgggaggcaaatgcctgctatgtgaaaaaaacatacacttagctatgttttgcaactctttttggggctagcaataatgatatttaaagcaataattttttgtatgtcatactccacaatttacatgtatattacagccatcaaacacataaacatcaagatatttgaaggactctaattgtctttccttgacaagttgattttgcaattgtggtaaatagcaaataacaatcttgtattctaacataatctgcagttgtctgtatgtgttttaactattacagtgcatgttagggagaaattccctgaatttctttagttttgtattcaaacaattatgccactcgatgcaacaaacataataaatacataaaagattt

SEQ ID NO: 378434 - DNA, 768 bp, Homo sapiens
  misc_feature (23)..(23): n is a, c, g, or t
gaggcagtgaatcgaactcgtgnacctgattggagtgttgttggtgctgtggtgaaggcgcgggataagtaccggcaccctgagtgcttcgtgtgtgccgactgcaacctcaacctcaagcaaaagggctacttcttcatagaaggggagctgtactgcgaaacccacgcaagagcccgcacaaagcccccagagggctatgacacggtcactctgtatcccaaagcttaagtctctgcaggcgtggcacgcacgcacgcacccacccacgcgcacttacacgagaagacattcatggctttgggcagaaggattgtgcagattgtcaactccaaatctaaagtcaaggctttagacctttatcctattgtttattgaggaaaaggaatgggaggcaaatgcctgctatgtgaaaaaaacatacacttagctatgttttgcaactctttttggggctagcaataatgatatttaaagcaataattttttgtatgtcatactccacaatttacatgtatattacagccatcaaacacataaacatcaagatatttgaaggactctaattgtctttccttgacaagttgattttgcaattgtggtaaatagcaaataacaatcttgtattctaacataatctgcagttgtctgtatgtgttttaactattacagtgcatgttagggagaaattccctgaatttctttagttttgtattcaaacaattatgccactcgatgcaacaaacataataaatacataaaagattt

SEQ ID NO: 378435 - DNA, 1612 bp, Homo sapiens
cggtgacgtcacccccagcggggataaagcgcccccgcccgggtcggggccaggacgccgcccggcgcggagtggctgccctgcgcggggacactcagagcccggtgggcgggaggaaggcggcatgccccagacggtgatcctcccgggccctgcgccctggggcttcaggctctcagggggcatagacttcaaccagcctttggtcatcaccaggattacaccaggaagcaaggcggcagctgccaacctgtgtcctggagatgtcatcctggctattgacggctttgggacagagtccatgactcatgctgatgcgcaggacaggattaaagcagcagctcaccagctgtgtctcaaaattgacaggggagaaactcacttatggtctccacaagtatctgaagatgggaaagcccatcctttcaaaatcaacttagaatcagaaccacaggaattcaaacccattggtaccgcgcacaacagaagggcccagccttttgttgcagctgcaaacattgatgacaaaagacaggtagtgagcgcttcctataactcgccaattgggctctattcaactagcaatatacaagatgcgcttcacggacagctgcggggtctcattcctagctcacctcaaaacgagcccacagcctcggtgccccccgagtcggacgtgtaccggatgctccacgacaatcggaatgagcccacacagcctcgccagtcgggctccttcagagtgctccagggaatggtggacgatggctctgatgaccgtccggctggaacgcggagtgtgagagctccggtgacgaaagtccatggcggttcaggcggggcacagaggatgccgctctgtgacaaatgtgggagtggcatagttggtgctgtggtgaaggcgcgggataagtaccggcaccctgagtgcttcgtgtgtgccgactgcaacctcaacctcaagcaaaagggctacttcttcatagaaggggagctgtactgcgaaacccacgcaagagcccgcacaaagcccccagagggctatgacacggtcactctgtatcccaaagcttaagtctctgcaggcgtggcacgcacgcacgcacccacccacgcgcacttacacgagaagacattcatggctttgggcagaaggattgtgcagattgtcaactccaaatctaaagtcaaggctttagacctttatcctattgtttattgaggaaaaggaatgggaggcaaatgcctgctatgtgaaaaaaacatacacttagctatgttttgcaactctttttggggctagcaataatgatatttaaagcaataattttttgtatgtcatactccacaatttacatgtatattacagccatcaaacacataaacatcaagatatttgaaggactctaattgtctttccttgacaagttgattttgcaattgtggtaaatagcaaataacaatcttgtattctaacataatctgcagttgtctgtatgtgttttaactattacagtgcatgttagggagaaattccctgaatttctttagttttgtattcaaacaattatgccactcgatgcaacaaacataataaatacataaaagattt

SEQ ID NO: 378436 - DNA, 2309 bp, Homo sapiens
cggtgacgtcacccccagcggggataaagcgcccccgcccgggtcggggccaggacgccgcccggcgcggagtggctgccctgcgcggggacactcagagcccggtgggcgggaggaaggcggcatgccccagacggtgatcctcccgggccctgcgccctggggcttcaggctctcagggggcatagacttcaaccagcctttggtcatcaccaggattacaccaggaagcaaggcggcagctgccaacctgtgtcctggagatgtcatcctggctattgacggctttgggacagagtccatgactcatgctgatgcgcaggacaggattaaagcagcagctcaccagctgtgtctcaaaattgacaggggagaaactcacttatggtctccacaagtatctgaagatgggaaagcccatcctttcaaaatcaacttagaatcagaaccacaggaattcaaacccattggtaccgcgcacaacagaagggcccagccttttgttgcagctgcaaacattgatgacaaaagacaggtagtgagcgcttcctataactcgccaattgggctctattcaactagcaatatacaagatgcgcttcacggacagctgcggggtctcattcctagctcacctcaaaagtaagtatccggctctgttctggccacagtgtacctaacagtgatagcatggtttcttttcttttcaaaagtccagctcttgctgttttatttttactttcctgaaggcactatcagatttctcttttaaagacaagcatctaaaacatgttctaattgttgtggggtccaatccgccagtgcctgaccgtttagcggatagatggttggaaagaagacatcgtcctggtcccgtcatcgcctttcttagttatgacagtagttggtggtaaatgatcctccctgtacaactatcgttcgtttaatcttatctgcaacagtgtccgccttccactgagggcctttttaacgctttgttttcacaggacgggaactactttgaacacaagcataatattcggcccaaacctttcgtgatcccgggccgaagcagtggatgcagcactccctccgggattgactgtggcagtggacgcagcaccccttcttctgtcagtactgttagtaccatttgcccaggtgacttgaaagttgcggctaagctggcccctaacattcctttggaaatggaacttcctggtgtgaagattgtacatgctcagtttaatacacctatgcagttgtactcagatgacaatattatggaaacactccagggtcaggtttcaacagccctaggggaaacacctttgatgagcgagcccacagcctcggtgccccccgagtcggacgtgtaccggatgctccacgacaatcggaatgagcccacacagcctcgccagtcgggctccttcagagtgctccagggaatggtggacgatggctctgatgaccgtccggctggaacgcggagtgtgagagctccggtgacgaaagtccatggcggttcaggcggggcacagaggatgccgctctgtgacaaatgtgggagtggcatagttggtgctgtggtgaaggcgcgggataagtaccggcaccctgagtgcttcgtgtgtgccgactgcaacctcaacctcaagcaaaagggctacttcttcatagaaggggagctgtactgcgaaacccacgcaagagcccgcacaaagcccccagagggctatgacacggtcactctgtatcccaaagcttaagtctctgcaggcgtggcacgcacgcacgcacccacccacgcgcacttacacgagaagacattcatggctttgggcagaaggattgtgcagattgtcaactccaaatctaaagtcaaggctttagacctttatcctattgtttattgaggaaaaggaatgggaggcaaatgcctgctatgtgaaaaaaacatacacttagctatgttttgcaactctttttggggctagcaataatgatatttaaagcaataattttttgtatgtcatactccacaatttacatgtatattacagccatcaaacacataaacatcaagatatttgaaggactctaattgtctttccttgacaagttgattttgcaattgtggtaaatagcaaataacaatcttgtattctaacataatctgcagttgtctgtatgtgttttaactattacagtgcatgttagggagaaattccctgaatttctttagttttgtattcaaacaattatgccactcgatgcaacaaacataataaatacataaaagattt

SEQ ID NO: 378437 - DNA, 3593 bp, Homo sapiens
cggtgacgtcacccccagcggggataaagcgcccccgcccgggtcggggccaggacgccgcccggcgcggagtggctgccctgcgcggggacactcagagcccggtgggcgggaggaaggcggcatgccccagacggtgatcctcccgggccctgcgccctggggcttcaggctctcagggggcatagacttcaaccagcctttggtcatcaccaggattacaccaggaagcaaggcggcagctgccaacctgtgtcctggagatgtcatcctggctattgacggctttgggacagagtccatgactcatgctgatgcgcaggacaggattaaagcagcagctcaccagctgtgtctcaaaattgacaggggagaaactcacttatggtctccacaagtatctgaagatgggaaagcccatcctttcaaaatcaacttagaatcagaaccacaggaattcaaacccattggtaccgcgcacaacagaagggcccagccttttgttgcagctgcaaacattgatgacaaaagacaggtagtgagcgcttcctataactcgccaattgggctctattcaactagcaatatacaagatgcgcttcacggacagctgcggggtctcattcctagctcacctcaaaagtaagtatccggctctgttctggccacagtgtacctaacagtgatagcatggtttcttttcttttcaaaagtccagctcttgctgttttatttttactttcctgaaggcactatcagatttctcttttaaagacaagcatctaaaacatgttctaattgttgtggggtccaatccgccagtgcctgaccgtttagcggatagatggttggaaagaagacatcgtcctggtcccgtcatcgcctttcttagttatgacagtagttggtggtaaatgatcctccctgtacaactatcgttcgtttaatcttatctgcaacagtgtccgccttccactgagggcctttttaacgctttgttttcacaggacgggaactactttgaacacaagcataatattcggcccaaacctttcgtgatcccgggccgaagcaggtcataagcgctgagactgtggagtttgcagtgcatgcttcttaaatcagttcttactaatcatcaagaaaagtaactggtagatgtttggagtggcttttctcattgcgaagcttatttcaaaagcaaaaagaaacaaactcacttggcagagaacagaagccaaataacttgcatttccaagagtaaatattgacaagatgacagagctgtgaaattgtatgcaatcaccacgtgtatttatagcgaacacccctgaggctctggggatcccatccagaacactgtgacctttgagtcgggcagtcagtatgtctatcccaggtcaggaaagccctgccagcaggagcgagcatggaaaccagccccggttaggaggaaggaatcaggtgaacaagccagaatgataaggagcaagctcttccttctcgtctctcagtagagaaactgatcatcttcagatcatccttttcaaatatcttctctagaaattgaactccaacctaaggggaaagaaaataatgccctgtattgccaaatcaggaaacagtgacttcaggaaacctctgttccatccttctgacctcagctaagccagtcagcccacaggaaggaagctggtggttagaccggattgattccgacaggaacattgaatatgatttaccgcagctgttgcaaactgatggcccataggtggatttatttcacaggcatgttttatttaattcttttgtttaaaaaaaaaaaaagaatttaagtgcctttagacagaacatttaaactcaccatcttgtcaaaatgcacatcactcttaagtgtgtgagacacggcccattttcatacatgtgtgacctcctggcccctctagacacccgagcttatgactcctgtcataagctgcggatagcaggtcatcccttatgtatgatttccatgtccagacctttcaggaagctacaggcagagccaggtgattgtctcaaaatatgccagacaattcttgtgatatcagatccagaaaggagccctggaccagaggagcaggagaaaggcgttaagaaggcaaccatgagcaaacacatcttcccccccctagaacgtgagctcagtgtctgcaggggcctggtctgactggctcaacattatacccccagcacctagaaatgagacagaataaatgctcaataagcgaccatctacaaacagacaaaataaatgcccaataaatgctcactggataaaggaatcaaatcctgagggtgcacaacatttcccaagcaagtggcaagaagagtccagagccgtctcgctcccgatgctggcagctctgtgtcctctcctgcttctctctatgtgttccctcgttcatactctgttctcatctgcatcttttccgtttctccactttcaacaggcttccccaacccaaaccaaccccaataacaaaacactggatttaaagttaacaaggatatgatattttactgttgaatatatacaacttcccaaagaagcatagtaaaattaatcacttgcattcttttcaggttagtgtgactgagtccacccacacaagctctggggcttcagaaggcttgaataaagtgatacgttagagtaacacatatcctgcctttactaaaaacctataacatttaattttataaaaagtcaggaaagtcagagaatcctaggtatataatcaccttttaaaaaaatttttcattttaacttaaacatagggataatggcaagccactcataatgttgtcatttgaagatcacaccttttaatgtagctgaatttggaagagagaaggagagaaacagaaatgagaaggtttgcttaaaaaacagatgccagtgcacaaatcttaaagaattataaggcctggtgcgatggctcacacctgtaatcccagcactttgggagacagaggtgggcgaatcacaaggtcaggagttcgagaccatcctggccaacatggtgtaaccccatgtctaccaaaaatacaaaaaattagctgggcatggtggcgggcacctgtaatcccagctactggggaggctgaggcaggagaatcgcctgagcctgggaggcggaggttgtagtgagctgagatcatgcccctgccaacaagcgtgagactccatctcaaaaaaaaaaaaaaaagaattataagagtgcccccaacatcctccttctcttcctgtccctcctcactatttgctgtaacttctgaattttttgttcccaccaaactattcttcatcaacggtggaattgtgagtggctgcataccagcctaccactatgatttgtttttaacttttaaaacaaatgtagtttttttcgggtgcattctacttgtacatgtttatggggtacgtgtgctgttttgatatatgcatacaatatgtaatgatcaaatcagggtaattgggggtatccatcacctcgagcagtaactttctttgtgctttggaacattccacatccactcctctagttatt

SEQ ID NO: 378438 - DNA, 1679 bp, Homo sapiens
  misc_feature (1679)..(1679): n is a, c, g, or t
cggtgacgtcacccccagcggggataaagcgcccccgcccgggtcggggccaggacgccgcccggcgcggagtggctgccctgcgcggggacactcagagcccggtgggcgggaggaaggcggcatgccccagacggtgatcctcccgggccctgcgccctggggcttcaggctctcagggggcatagacttcaaccagcctttggtcatcaccaggattacaccaggaagcaaggcggcagctgccaacctgtgtcctggagatgtcatcctggctattgacggctttgggacagagtccatgactcatgctgatgcgcaggacaggattaaagcagcagctcaccagctgtgtctcaaaattgacaggggagaaactcacttatggtctccacaagtatctgaagatgggaaagcccatcctttcaaaatcaacttagaatcagaaccacaggaattcaaacccattggtaccgcgcacaacagaagggcccagccttttgttgcagctgcaaacattgatgacaaaagacaggtagtgagcgcttcctataactcgccaattgggctctattcaactagcaatatacaagatgcgcttcacggacagctgcggggtctcattcctagctcacctcaaaagtaagtatccggctctgttctggccacagtgtacctaacagtgatagcatggtttcttttcttttcaaaagtccagctcttgctgttttatttttactttcctgaaggcactatcagatttctcttttaaagacaagcatctaaaacatgttctaattgttgtggggtccaatccgccagtgcctgaccgtttagcggatagatggttggaaagaagacatcgtcctggtcccgtcatcgcctttcttagttatgacagtagttggtggtaaatgatcctccctgtacaactatcgttcgtttaatcttatctgcaacagtgtccgccttccactgagggcctttttaacgctttgttttcacaggacgggaactactttgaacacaagcataatattcggcccaaacctttcgtgatcccgggccgaagcaggtcataagcgctgagactgtggagtttgcagtgcatgcttcttaaatcagttcttactaatcatcaagaaaagtaactggtagatgtttggagtggcttttctcattgcgaagcttatttcaaaagcaaaaagaaacaaactcacttggcagagaacagaagccaaataacttgcatttccaagagtaaatattgacaagatgacagagctgtgaaattgtatgcaatcaccacgtgtatttatagcgaacacccctgaggctctggggatcccatccagaacactgtgacctttgagtcgggcagtcagtatgtctatcccaggtcaggaaagccctgccagcaggagcgagcatggaaaccagccccggttaggaggaaggaatcaggtgaacaagccagaatgataaggagcaagctcttccttctcgtctctcagtagagaaactgatcatcttcagatcatccttttcaaatatcttctctagaaattgaactccaactattgttagggtggccgtactcctaatttgaggcacagattcatagttgtctctctcatatcctcggccgagtacccacgctgcctcgcacctagcgatgn

SEQ ID NO: 378439 - DNA, 416 bp, Homo sapiens
  misc_feature (13)..(13): n is a, c, g, or t
aaagaaagaggcnttttattacattgttacagggaatgggaggcaaatgcctgctatgtgaaaaaaacatacacttagctatgttttgcaactctttttggggctagcaataatgatatttaaagcaataattttttgtatgtcatactccacaatttacatgtatattacagccatcaaacacataaacatcaagatatttgaaggactctaattgtctttccttgacaagttgattttgcaattgtggtaaatagcaaataacaatcttgtattctaacataatctgcagttgtctgtatgtgttttaactattacagtgcatgttagggagaaattccctgaatttctttagttttgtattcaaacaattatgccactcgatgcaacaaacataataaatacataaaagattt

SEQ ID NO: 378440 - DNA, 3228 bp, Homo sapiens
cggtgacgtcacccccagcggggataaagcgcccccgcccgggtcggggccaggacgccgcccggcgcggagtggctgccctgcgcggggacactcagagcccggtgggcgggaggaaggcggcatgccccagacggtgatcctcccgggccctgcgccctggggcttcaggctctcagggggcatagacttcaaccagcctttggtcatcaccaggattacaccaggaagcaaggcggcagctgccaacctgtgtcctggagatgtcatcctggctattgacggctttgggacagagtccatgactcatgctgatgcgcaggacaggattaaagcagcagctcaccagctgtgtctcaaaattgacaggggagaaactcacttatggtctccacaagtatctgaagatgggaaagcccatcctttcaaaatcaacttagaatcagaaccacaggaattcaaacccattggtaccgcgcacaacagaagggcccagccttttgttgcagctgcaaacattgatgacaaaagacaggtagtgagcgcttcctataactcgccaattgggctctattcaactagcaatatacaagatgcgcttcacggacagctgcggggtctcattcctagctcacctcaaaagacgggaactactttgaacacaagcataatattcggcccaaacctttcgtgatcccgggccgaagcaggtcataagcgctgagactgtggagtttgcagtgcatgcttcttaaatcagttcttactaatcatcaagaaaagtaactggtagatgtttggagtggcttttctcattgcgaagcttatttcaaaagcaaaaagaaacaaactcacttggcagagaacagaagccaaataacttgcatttccaagagtaaatattgacaagatgacagagctgtgaaattgtatgcaatcaccacgtgtatttatagcgaacacccctgaggctctggggatcccatccagaacactgtgacctttgagtcgggcagtcagtatgtctatcccaggtcaggaaagccctgccagcaggagcgagcatggaaaccagccccggttaggaggaaggaatcaggtgaacaagccagaatgataaggagcaagctcttccttctcgtctctcagtagagaaactgatcatcttcagatcatccttttcaaatatcttctctagaaattgaactccaacctaaggggaaagaaaataatgccctgtattgccaaatcaggaaacagtgacttcaggaaacctctgttccatccttctgacctcagctaagccagtcagcccacaggaaggaagctggtggttagaccggattgattccgacaggaacattgaatatgatttaccgcagctgttgcaaactgatggcccataggtggatttatttcacaggcatgttttatttaattcttttgtttaaaaaaaaaaaaagaatttaagtgcctttagacagaacatttaaactcaccatcttgtcaaaatgcacatcactcttaagtgtgtgagacacggcccattttcatacatgtgtgacctcctggcccctctagacacccgagcttatgactcctgtcataagctgcggatagcaggtcatcccttatgtatgatttccatgtccagacctttcaggaagctacaggcagagccaggtgattgtctcaaaatatgccagacaattcttgtgatatcagatccagaaaggagccctggaccagaggagcaggagaaaggcgttaagaaggcaaccatgagcaaacacatcttcccccccctagaacgtgagctcagtgtctgcaggggcctggtctgactggctcaacattatacccccagcacctagaaatgagacagaataaatgctcaataagcgaccatctacaaacagacaaaataaatgcccaataaatgctcactggataaaggaatcaaatcctgagggtgcacaacatttcccaagcaagtggcaagaagagtccagagccgtctcgctcccgatgctggcagctctgtgtcctctcctgcttctctctatgtgttccctcgttcatactctgttctcatctgcatcttttccgtttctccactttcaacaggcttccccaacccaaaccaaccccaataacaaaacactggatttaaagttaacaaggatatgatattttactgttgaatatatacaacttcccaaagaagcatagtaaaattaatcacttgcattcttttcaggttagtgtgactgagtccacccacacaagctctggggcttcagaaggcttgaataaagtgatacgttagagtaacacatatcctgcctttactaaaaacctataacatttaattttataaaaagtcaggaaagtcagagaatcctaggtatataatcaccttttaaaaaaatttttcattttaacttaaacatagggataatggcaagccactcataatgttgtcatttgaagatcacaccttttaatgtagctgaatttggaagagagaaggagagaaacagaaatgagaaggtttgcttaaaaaacagatgccagtgcacaaatcttaaagaattataaggcctggtgcgatggctcacacctgtaatcccagcactttgggagacagaggtgggcgaatcacaaggtcaggagttcgagaccatcctggccaacatggtgtaaccccatgtctaccaaaaatacaaaaaattagctgggcatggtggcgggcacctgtaatcccagctactggggaggctgaggcaggagaatcgcctgagcctgggaggcggaggttgtagtgagctgagatcatgcccctgccaacaagcgtgagactccatctcaaaaaaaaaaaaaaaagaattataagagtgcccccaacatcctccttctcttcctgtccctcctcactatttgctgtaacttctgaattttttgttcccaccaaactattcttcatcaacggtggaattgtgagtggctgcataccagcctaccactatgatttgtttttaacttttaaaacaaatgtagtttttttcgggtgcattctacttgtacatgtttatggggtacgtgtgctgttttgatatatgcatacaatatgtaatgatcaaatcagggtaattgggggtatccatcacctcgagcagtaactttctttgtgctttggaacattccacatccactcctctagttatt

SEQ ID NO: 378441 - DNA, 1681 bp, Homo sapiens
cggtgacgtcacccccagcggggataaagcgcccccgcccgggtcggggccaggacgccgcccggcgcggagtggctgccctgcgcggggacactcagagcccggtgggcgggaggaaggcggcatgccccagacggtgatcctcccgggccctgcgccctggggcttcaggctctcagggggcatagacttcaaccagcctttggtcatcaccaggattacaccaggaagcaaggcggcagctgccaacctgtgtcctggagatgtcatcctggctattgacggctttgggacagagtccatgactcatgctgatgcgcaggacaggattaaagcagcagctcaccagctgtgtctcaaaattgacaggggagaaactcacttatggtctccacaagtatctgaagatgggaaagcccatcctttcaaaatcaacttagaatcagaaccacaggaattcaaacccattggtaccgcgcacaacagaagggcccagccttttgttgcagctgcaaacattgatgacaaaagacaggtagtgagcgcttcctataactcgccaattgggctctattcaactagcaatatacaagatgcgcttcacggacagctgcggggtctcattcctagctcacctcaaaacgagcccacagcctcggtgccccccgagtcggacgtgtaccggatgctccacgacaatcggaatgagcccacacagcctcgccagtcgggctccttcagagtgctccagggaatggtggacgatggctctgatgaccgtccggctggaacgcggagtgtgagagctccggtgacgaaagtccatggcggttcaggcggggcacagaggatgccgctctgtgacaaatgtgggagtggcatagttggtgctgtggtgaaggcgcgggataagtaccggcaccctgagtgcttcgtgtgtgccgactgcaacctcaacctcaagcaaaagggctacttcttcatagaaggggagctgtactgcgaaacccacgcaagagcccgcacaaagcccccagagggctatgacacggtcactctgtatcccaaagcttaagtctctgcaggcgtggcacgcacgcacgcacccacccacgcgcacttacacgagaagacattcatggctttgggcagaaggattgtgcagattgtcaactccaaatctaaagtcaaggctttagacctttatcctattgtttattgaggaaaaggaatgggaggcaaatgcctgctatgtgaaaaaaacatacacttagctatgttttgcaactctttttggggctagcaataatgatatttaaagcaataattttttgtatgtcatactccacaatttacatgtatattacagccatcaaacacataaacatcaagatatttgaaggactctaattgtctttccttgacaagttgattttgcaattgtggtaaatagcaaataacaatcttgtattctaacataatctgcagttgtctgtatgtgttttaactattacagtgcatgttagggagaaattccctgaatttctttagttttgtattcaaacaattatgccactcgatgcaacaaacataataaatacataaaagatttaaaaaatacctaatgaagtggcattcattgaattcaaataaaatcaacatttcaatgagagaacccaat

SEQ ID NO: 378442 - DNA, 1492 bp, Homo sapiens
cggtgacgtcacccccagcggggataaagcgcccccgcccgggtcggggccaggacgccgcccggcgcggagtggctgccctgcgcggggacactcagagcccggtgggcgggaggaaggcggcatgccccagacggtgatcctcccgggccctgcgccctggggcttcaggctctcagggggcatagacttcaaccagcctttggtcatcaccaggattacaccaggaagcaaggcggcagctgccaacctgtgtcctggagatgtcatcctggctattgacggctttgggacagagtccatgactcatgctgatgcgcaggacaggattaaagcagcagctcaccagctgtgtctcaaaattgacaggggagaaactcacttatggtctccacaagtatctgaagatgggaaagcccatcctttcaaaatcaacttagaatcagaaccacaggacgggaactactttgaacacaagcataatattcggcccaaacctttcgtgatcccgggccgaagcagcgagcccacagcctcggtgccccccgagtcggacgtgtaccggatgctccacgacaatcggaatgagcccacacagcctcgccagtcgggctccttcagagtgctccagggaatggtggacgatggctctgatgaccgtccggctggaacgcggagtgtgagagctccggtgacgaaagtccatggcggttcaggcggggcacagaggatgccgctctgtgacaaatgtgggagtggcatagttggtgctgtggtgaaggcgcgggataagtaccggcaccctgagtgcttcgtgtgtgccgactgcaacctcaacctcaagcaaaagggctacttcttcatagaaggggagctgtactgcgaaacccacgcaagagcccgcacaaagcccccagagggctatgacacggtcactctgtatcccaaagcttaagtctctgcaggcgtggcacgcacgcacgcacccacccacgcgcacttacacgagaagacattcatggctttgggcagaaggattgtgcagattgtcaactccaaatctaaagtcaaggctttagacctttatcctattgtttattgaggaaaaggaatgggaggcaaatgcctgctatgtgaaaaaaacatacacttagctatgttttgcaactctttttggggctagcaataatgatatttaaagcaataattttttgtatgtcatactccacaatttacatgtatattacagccatcaaacacataaacatcaagatatttgaaggactctaattgtctttccttgacaagttgattttgcaattgtggtaaatagcaaataacaatcttgtattctaacataatctgcagttgtctgtatgtgttttaactattacagtgcatgttagggagaaattccctgaatttctttagttttgtattcaaacaattatgccactcgatgcaacaaacataataaatacataaaagattt

SEQ ID NO: 378443 - DNA, 2135 bp, Homo sapiens
cggtgacgtcacccccagcggggataaagcgcccccgcccgggtcggggccaggacgccgcccggcgcggagtggctgccctgcgcggggacactcagagcccggtgggcgggaggaaggcggcatgccccagacggtgatcctcccgggccctgcgccctggggcttcaggctctcagggggcatagacttcaaccagcctttggtcatcaccaggattacaccaggaagcaaggcggcagctgccaacctgtgtcctggagatgtcatcctggctattgacggctttgggacagagtccatgactcatgctgatgcgcaggacaggattaaagcagcagctcaccagctgtgtctcaaaattgacaggggagaaactcacttatggtctccacaagtatctgaagatgggaaagcccatcctttcaaaatcaacttagaatcagaaccacaggaattcaaacccattggtaccgcgcacaacagaagggcccagccttttgttgcagctgcaaacattgatgacaaaagacaggtagtgagcgcttcctataactcgccaattgggctctattcaactagcaatatacaagatgcgcttcacggacagctgcggggtctcattcctagctcacctcaaaagtaagtatccggctctgttctggccacagtgtacctaacagtgatagcatggtttcttttcttttcaaaagtccagctcttgctgttttatttttactttcctgaaggcactatcagatttctcttttaaagacaagcatctaaaacatgttctaattgttgtggggtccaatccgccagtgcctgaccgtttagcggatagatggttggaaagaagacatcgtcctggtcccgtcatcgcctttcttagttatgacagtagttggtggtaaatgatcctccctgtacaactatcgttcgtttaatcttatctgcaacagtgtccgccttccactgagggcctttttaacgctttgttttcacaggacgggaactactttgaacacaagcataatattcggcccaaacctttcgtgatcccgggccgaagcagtggatgcagcactccctccgggattgactgtggcagtggacgcagcaccccttcttctgtcagtactgttagtaccatttgcccaggtgacttgaaagttgcggctaagctggcccctaacattcctttggaaatggaacttcctggtgtgaagattgtacatgctcagtttaatacacctatgcagttgtactcagatgacaatattatggaaacactccagggtcaggtttcaacagccctaggggaaacacctttgatgaggtaatatgagtctctttgaaccatgggcatattaactaaacacgtgggcaatgtcagctttactggtgtcttttaacattgtcttaatggaaagaaagctatgtgaaaagcttttttaaaatactaaggatttactgcaaatatctaggcttggaaagaaagctatgtgaaaagcttttttaaaatactaaggatttattgcaaatatctaggcttggtgataaaggtgatttgaggaattatctgtagagctttatgtgtcagatagcaataaaatgaaatcaggtaaggaccaaatgtatatgtctctcgaaagctacaatgtactttacaaatatctggtgtaatacttctcaaagttatttataatctagtataccctatgtctgtcctttggggatcaaaaattaggaaggaggtgggaggtttagaggaattttatgagatgattcttctctcttctgatagcagcttgtggagaggtcattatttactcatttacaatgtttattgtgcataaaggtttttaggtgaataccctcaggctgttaatgtagatatttaatttttgctggtctctttttgactaattttttctttgttataactatttgttcacagtacttttgccataaagattttgattaaaaagatttattataggataaaatcttactgcttctttcactattacagaatcactatttataaattaaattattataatgcttcagagtgttaaatagtgatatcccaaagctatctcttgggatgaacacattgaactaatagtagt

SEQ ID NO: 378444 - DNA, 438 bp, Homo sapiens
cactcatcactttggcaaaaagtaaaatttttttagacggagtcttgctctgtgtaagtttcgatctcaactcactgcaaccttcaccttccaggttcacgcaattcttctgcctcagcctcccgagtagctgggactacaggcgcctgccatcacgccgggctaatttttttttgtatttttagtagagacagggtttcaccatgttcaccaggatggtctctttatctcttgacctcgtgatctgcccacctcagcctcccaacgtgctgggattacaggtgtgagccaccatgcccggcccactttggtaaaatttaaggagtacaatgtaccgttgatgaggatgtggagaagcaggaactcacaccatgctagtgggaccatgatttgctctatccctttggcaaagtaatctggcaatgtttattaaagggc

SEQ ID NO: 378445 - DNA, 289 bp, Homo sapiens
caaaaataaaatgtcatttatatttgagacagtgacatataaacaaaaatgtaactcttttcgtttttcagaattatggctaaatagagaaaataattgatctatggtgggtcccaggcaagttgactctgatttagagcaagatcctattgaggccaaggtcatgggtaaatttcttaagagggccagttaatttggttctggaacatagcaagaagttgtactcctgacctcagcttgccaactcacttcatggttgcaaaaggatagaagatggatgattcagttt

SEQ ID NO: 378446 - DNA, 846 bp, Homo sapiens
tcccagtagagctggggtgtgacgccccctcagtgcgtggatgagctcttgttcagctctccagaagctctggagccctgtccttttgggcattttatggaggtttcattggacaggcctgattgaagcttggacgactgtgttgaaatgtgattggacagaaaggatgtgatctaaacccagcaaggcctttctgttcagatccttcttggcctctttgtgcagcattccttcccccagaggatgaggcaggaccctctctgattcgaacaagagtcttatgacccataatcagattagagtcctaccctggtaaggtaaaaggaagacaggagaaggttagagattctgttgactgcaacaagggatatgaaagttatgagccaggaattgtgaatgaaaactgatgtataatatatgtcataatctcacattgctgcttgagagatcaaggtgaagactgcaaggtctttgcaagctggaggctaatgcttagtgaacagtctggatagagtgataacagtagaagcccattcagagggtactcgagtgaatgcaggctgggcgtggtggctcacgcctttaatcccagcactttgggaggccaaggcaggtggatcacttgaggtcaggagtttgagaccagcctggccaacatggcgaaactccatctctactaaaaatacaaaaataagccaggcatagtggtgcaggcctgtaatcccagctactcgggaggctgaggaatcacttcaacctgggaggcggaggttgcagtgagccaagatcgcaccactgcactccagcctgggtgacagagcaccgctctgtctcaaaaaaaaaaaa

SEQ ID NO: 378447 - DNA, 406 bp, Homo sapiens
tcccagtagagctggggtgtgacgccccctcagtgcgtggatgagctcttgttcagctctccagaagctctggagccctgtccttttgggcattttatggaggtttcattggacaggcctgattgaagcttggacgactgtgttgaaatgtgattggacagaaaggatgtgatctaaacccagcaaggcctttctgttcagatccttcttggcctctttgtgcagcattccttcccccagaggatgaggcaggaccctctctgattcgaacaagagtcttatgacccataatcagattagagtcctaccctggtaaggtaaaaggaagacaggagaaggttagagattctgttgactgcaacaagggatatgcactgatagggtatgctctatcgggtcctctgat

SEQ ID NO: 378448 - DNA, 426 bp, Homo sapiens
tttttttttccaagggtgtagggtgtaatctggatgggaagtagaaataattttgaaaaactctcacaagtgctatttaaattcttatcataaattaaaaagtttaattaagtaccttggtaaaggcccgggttctatgattaactacgacaaaataatagttatgatgactgatcaagtgaggaactttatagctctgaactttgtctttaaagctattattaattttaattgaaatagctaagagactccataatgggagaaagaaagaaacatgaaggatattttgttcatatacagaggagtttaaaaatgaatagatacgccggtaactattttaaaaaaattgatgcaaacaagtttactttcagaggccttgtcataaatctatttcaaaatgttgattattgtggtcatcctacatca

SEQ ID NO: 378449 - DNA, 1982 bp, Homo sapiens
agcggagtctgggtctggagcctgagccctgcggaacctcggcgctcggccccaccccgcccgtacctgcacttatttattgttgttatttcttaccgcggagccccgcagtcgggtcctcccgcccgctcccgcgcagcgctagcattctccagtccctcagtcccttcccgcgcggtgcgccgcagccgaggcgatgcgcctcattcagaacatgtgcaccatcgccgagtaccccgcgccgggcaacgccgcggcctccgactgctgtgtgggcgccgccggccgccgcctggtcaagatcgccgtggtgggcgccagcggcgtgggcaagaccgcactggtggtccggttcctcaccaaacgattcatcggtgactatgaaagaaatgcaggtaatctctatactagacaagttcagatagaaggtgaaaccctggctcttcaggttcaagacactccaggtattcaggtccatgagaacagcctgagctgcagtgaacagctgaataggtgcattcgctgggcagatgctgtggtgatcgttttctccatcactgactacaagagctatgaactcatcagccagctccaccagcacgtgcagcagctacacctgggcacccggctgcctgtggtggtcgtggccaacaaagctgacctgttgcacatcaaacaggttgaccctcagcttggactgcagctagccagcatgctaggctgctcattctatgaagtgtctgtcagtgaaaattataatgatgtctacagcgccttccacgtcctctgtaaagaggtcagtcacaaacagcagcctagcagtacacccgagaagcgaagaacctccctcattcccaggcccaagtcacccaacatgcaggacctgaagaggaggtttaagcaagccctctctgccaaagtgaggactgtcacctccgtctgaagcaggaggagcactcaagggggtttggtcttcccaggaagagggcctgaggttctcctagtgcaggaacgttgaatattggcaatgattcctggttccagaaagggctggagcagaagggccaagagggcctgtggaactgctacagaaaaggaagtgttgttctgagcagggggacaggattgatgaggcttgaaagagcccactgagccactctctgaatatgtgaaatgtactctgtgtcttttcctttagagtggggagggggcataatcgtttcggtttctgcattcaactaccttgtaaatggtggtccgttgcagtttcaccaaatgtattgatgtgatttacagtgggaatgaaagaacagattaagcattgataggctttcttttttcccccttttttcttttttctcttttcttctttcttttcctctttttccccaagaggaagaattgcttttctcttaccagtatgatttgtaactctggaacactattcttacagaatgcctttctaacctgaaggatacccagatttctttctttatgtacaagatggaaaatcccctacccctcaaaaacaggttgagtttatgggccagaatattttgtataccagacattggtaagctctcatggtttacaggaaggctctggttccccctcacaggatgagcatgctcagttgggcgtgtgtggaggagctgtgaacttcacgctcttcaaccccagactttgactgtatagttttttgtttttttaactgttccatcaggaaaaaaatgtgtcagttgattttggtgtgacttgtgtaaatggttcatggcaatgacgttgggttgcttcctaggcctggctgagttgtgcctaagggtggctgaaatactaaaacacttatcttacagcaagtgaacaggggctacctgccacatcccctccacagatgcactttaaaaagccactcatgctttggcttaaactgtaattaatttattttatgtacaataaatcgcatttgaaaaagaaaaagatgt

SEQ ID NO: 378450 - DNA, 2600 bp, Homo sapiens
agcggagtctgggtctggagcctgagccctgcggaacctcggcgctcggccccaccccgcccgtacctgcacttatttattgttgttatttcttaccgcggagccccgcagtcgggtcctcccgcccgctcccgcgcagcgctagcattctccagtccctcagtcccttcccgcgcggtgcgccgcagccgaggcgatgcgcctcattcagaacatgtgcaccatcgccgagtaccccgcgccgggcaacgccgcggcctccgactgctgtgtgggcgccgccggccgccgcctggtcaagatcgccgtggtgggcgccagcggcgtgggcaagaccggtgagtcgtcgcgcttagccctgggtctggtcttggacgacccctgacgggagttgaggctgaacaaggcgtggggagcggtgggagctgcagcccgaccgctctccgtccccgcgcagggagccgctgccccttgggagtgggcttagccgttgtctacgccacccgcctgcttccacagacgggggaaacaaggatcaagaatggccaggcagctttctggggaccaccggcaccgccgccatcagaactttggggtgtttgagcctctggcaatgcctggcacagaaaggggagttagtgaagctagcccccctgggaggtcttgaaggttaggaagacatgggtctactggaaggcttaggtgtggctcagccgggctcagaggagggggtgggcccagtgagccttccagctgcacagagccataattcacgatgccttctagccccctcctttttgtctggaaagaagggtcaaggagctacagggtaggaatttcacttggtggccatctatggctttctttgggagaactgttttccaggcagggggtggggtggagaacaatctaacttccaaggttaacactttgacgttcttttttctgacgtgcagcactggtggtccggttcctcaccaaacgattcatcggtgactatgaaagaaatgcaggtaatctctatactagacaagttcagatagaaggtgaaaccctggctcttcaggttcaagacactccaggtattcaggtccatgagaacagcctgagctgcagtgaacagctgaataggtgcattcgctgggcagatgctgtggtgatcgttttctccatcactgactacaagagctatgaactcatcagccagctccaccagcacgtgcagcagctacacctgggcacccggctgcctgtggtggtcgtggccaacaaagctgacctgttgcacatcaaacaggttgaccctcagcttggactgcagctagccagcatgctaggctgctcattctatgaagtgtctgtcagtgaaaattataatgatgtctacagcgccttccacgtcctctgtaaagaggtcagtcacaaacagcagcctagcagtacacccgagaagcgaagaacctccctcattcccaggcccaagtcacccaacatgcaggacctgaagaggaggtttaagcaagccctctctgccaaagtgaggactgtcacctccgtctgaagcaggaggagcactcaagggggtttggtcttcccaggaagagggcctgaggttctcctagtgcaggaacgttgaatattggcaatgattcctggttccagaaagggctggagcagaagggccaagagggcctgtggaactgctacagaaaaggaagtgttgttctgagcagggggacaggattgatgaggcttgaaagagcccactgagccactctctgaatatgtgaaatgtactctgtgtcttttcctttagagtggggagggggcataatcgtttcggtttctgcattcaactaccttgtaaatggtggtccgttgcagtttcaccaaatgtattgatgtgatttacagtgggaatgaaagaacagattaagcattgataggctttcttttttcccccttttttcttttttctcttttcttctttcttttcctctttttccccaagaggaagaattgcttttctcttaccagtatgatttgtaactctggaacactattcttacagaatgcctttctaacctgaaggatacccagatttctttctttatgtacaagatggaaaatcccctacccctcaaaaacaggttgagtttatgggccagaatattttgtataccagacattggtaagctctcatggtttacaggaaggctctggttccccctcacaggatgagcatgctcagttgggcgtgtgtggaggagctgtgaacttcacgctcttcaaccccagactttgactgtatagttttttgtttttttaactgttccatcaggaaaaaaatgtgtcagttgattttggtgtgacttgtgtaaatggttcatggcaatgacgttgggttgcttcctaggcctggctgagttgtgcctaagggtggctgaaatactaaaacacttatcttacagcaagtgaacaggggctacctgccacatcccctccacagatgcactttaaaaagccactcatgctttggcttaaactgtaattaatttattttatgtacaataaatcgcatttgaaaaagaaaaagatgt

SEQ ID NO: 378451 - DNA, 1335 bp, Homo sapiens
agcggagtctgggtctggagcctgagccctgcggaacctcggcgctcggccccaccccgcccgtacctgcacttatttattgttgttatttcttaccgcggagccccgcagtcgggtcctcccgcccgctcccgcgcagcgctagcattctccagtccctcagtcccttcccgcgcggtgcgccgcagccgaggcgatgcgcctcattcagaacatgtgcaccatcgccgagtaccccgcgccgggcaacgccgcggcctccgactgctgtgtgggcgccgccggccgccgcctggtcaagatcgccgtggtgggcgccagcggcgtgggcaagaccggtgagtcgtcgcgcttagccctgggtctggtcttggacgacccctgacgggagttgaggctgaacaaggcgtggggagcggtgggagctgcagcccgaccgctctccgtccccgcgcagggagccgctgccccttgggagtgggcttagccgttgtctacgccacccgcctgcttccacagacgggggaaacaaggatcaagaatggccaggcagctttctggggaccaccggcaccgccgccatcagaactttggggtgtttgagcctctggcaatgcctggcacagaaaggggagttagtgaagctagcccccctgggaggtcttgaaggttaggaagacatgggtctactggaaggcttaggtgtggctcagccgggctcagaggagggggtgggcccagtgagccttccagctgcacagagccataattcacgatgccttctagccccctcctttttgtctggaaagaagggtcaaggagctacagggtaggaatttcacttggtggccatctatggctttctttgggagaactgttttccaggcagggggtggggtggagaacaatctaacttccaaggttaacactttgacgttcttttttctgacgtgcagcactggtggtccggttcctcaccaaacgattcatcggtgactatgaaagaaatgcaggtgagacaatgcatttgagaaaaattctgtcccattgcaggaggactgcggttcccattttccagcgcttcccagggaggttctttcagtgacagtccgagcctgaggatcccgccacttaaaactttccccagtccccagccctccatggcgcccccctcccataactaccatctggcctcattccattccaagcccattcatcattttatcaagtgcctgaaagtattccccttggtatgttttaactatagtgaccccagttggaagcaccctttgtagtcaagaacctctcccttcaaaacactcctgcaaaagtcgt

SEQ ID NO: 378452 - DNA, 408 bp, Homo sapiens
cctctcaactccttaagcttccccctggccccgacccctgcattccttctcacggtgccccctccaccttcgagccaggaaaggagtgtcagatctccctgtgatttgaatctctctgattttctctcctgccacctgctggagaaggcgctctgcttccaggaggtgatgtgatgctaattagactgagagagcaccgccccccacccccgccccgcccgatgatcccctttcttaaggtctgctgtggtacacgacgacatacttgacgacatactcaagggtgtggcaccttgtcatattcacaggttttaggcattggaggggggctagagtgagagggatgtcattttagaaattctccccacagtagaaagactcttctcttaatggggccagccatggtgg

SEQ ID NO: 378453 - DNA, 735 bp, Homo sapiens
tgttggacctggtactctccaccacataattatgtcctggtacttagggtagcctggctaattcttttcacaacatttgaaaagccgtaggcattaacttcatggatgtggagaaacagcataatgaccttggttcacaatgaaagtgctagccttctttctcgtggctggaataagaaatgcaagaactggaagattaacagagagctgatacccggactggtaatcccacaactcactattttgggaggaaggggaagacagggaaagagaaggaaaaaggcaaatgggaaacattccccagagctgtgctcctggtctcacctgcaaaaaagaattgcagccacctaagagaaagctgagctgcccctcagtcctcactgtcacctacctctatcacaacaattgtaccaagatgaagacttctccagacttcagaaaataaagtcaaaccctagattttgttttaaaataggaaactcagaatcaacttgcctccatcctctgggaaaactgctcccacacaggccttggagtgtgttgtagcactgtggaggaatgcagaaaggatgaaagagatcttgattctcctagtggttctcttcactaccgtaggcatccctcagccattgactcctccttctttctcttgacattcactttcttggccagtcttacatgcttatgagtctactttccaataaatttactcatagtccattaacttccaaacct

SEQ ID NO: 378454 - DNA, 625 bp, Homo sapiens
aattaaatgactaggaagttaattaactgtaacaatgttggggtttatttttgcctgcaatgacacagctaagaaataaagcaacaaaacaaaaatacacagtgtttccagagtatgtttctgaactatctgcacaaggatcacctggccgccttatcaagatgcaggtttctggagcccatcttaaaacgaactgaattataatctgaattggagtggctgacaaaggcttgggaatctacatttataaaggtacatcagtaattattttgcatggtaaaatttgagaaccctggtacaggttattatgccttacaggttagcaaggccttttacagaacctcatttgacctcaaaacaatccaatcaggtgaatcaaggaaaaattattccctcataagggctatttgttctgagtaggtagtggttttgtctactgtgagggtctataggatagagataaagccattcttactgcaatgatatcttaagtaaaattagatgtcttacaaatgtacaactaaactccctatcaaataagctcctgccctaatccctccagcctctccacacaaacaaacaatgcatctctcttgtgatatagcaactctgtaagtgggtacaa

SEQ ID NO: 378455 - DNA, 412 bp, Homo sapiens
aatttttagaattaataagtcagctgcgtgcggcagctcacgcctgtaatcccagcactttgggaggccgaggtgggcagatcacaaggtcaagagatcgagaccatcctggccaacatggtgaaaccccatctctaccaaaaatacaaaaattaaccaggcgtggtggcgtgcacctgtggttccagctactcaggaggctaaggcaggagaatcgcttgaacctgggaggcggaggttgcggtgagccgagatcaaaccattgcactccagcctgggcaatgagagcaaaactcagtctcaaacaaacaaacaaaaataagtcagttcagcaagattgcaaaatacaaaatgaacataaaatacaaaatacactatttctatatactagaaatgcacacataaaaataaa

SEQ ID NO: 378456 - DNA, 4396 bp, Homo sapiens
  misc_feature (679)..(679): n is a, c, g, or t
ggtgttttgaaacataaaaggttgcaccctcgtgtgtgccttgtgttaaaaggagcccacgcagccgacggcagcaggagcaaatggcctgctctgatggggacaggcaggaagtccttcggggcatttctgtttcatcacagcttttcctggggctggtgagtctgttgggcctttggttgacagggaagcgcatgagcccatgttggtggatacaaagcatttggggcctggcagaatccagagaggggaagaaggtggccctaggaactggcctattttgtgatccccagagaccagtgtggctgacccattagtgctacaaatccatagccaggcctcaggacagcttttggtcttgtttttattaagccactgaccagtggttaggagcaagtggatcataaccttaacatttttattgaaaattggagccttgacctggggatgtgaaacccacaagctgcacatttctctgtagactgcatctggacacttgtcacattgccgactgggtctgacagtcatcgccaggactgcctgggcctgtgttcattcccagtcaatgagtcctgggacacagacgtcccggactcgtgcccggtgccaggcctcatgcccgcccaaggatgaagacatacctgccatcaccatgcaagtgccgggagctcttctcagngcttatgtgtgggaacacgagtaatcccacaccctaggaggtggcactactcttaccccagtgtgcagatgaagatcagaggccagaaaaggggggtgacttcagtcacacagcaagcatgtggcagagctggagtccaggtcgtcattctgagcctgcccctggctgggccattgtgctttgtcacctctctacagaaggtgggcctcatcccctacatcaggccccaagcctggccagcgctcttcccaccctgccccaggccacctgctatgcctgtgagggctgtgtgtgagcactctctggagcgccgctgattctcttgtctctcccctgcgtcctgccaggaagctgatcagtatctcctttggggacctgaaccctttccccctacgccagatccggaaccgacgcgcctaccacttggagaaagtccggctggagctgaccgagctggaggccatccgtgaggacttcctgcgtgagcgggacaccagccctgacaagggtgagctggtcagtgacgaggaggaggatacctgagtgggctcgggatgctgctcttccttccttcacaaccaaagtgtgcccaaagggtgaaagtgcacttaaaagccagaatgtaacgtgtgtgtcctctggggatctgctgggcagatgtcccaagccaggctgcccttcctcatttcccactgtgcggggggcaggggtgggaggtctaatctgtttacaaccatttccgtgccatgcttttggttacacgtatctcagtcacgctttctgcctggttggtggatcctcaggcttaccagtggctatttgcaagagcctgtttccagcctccgtcagcctgtcggtgctctgaccctctgaaaccttgctttgctgggcatctccccatattctctctcctgtacatagtgggcagtggtgtgtggttttgaatggcagtgctataaaggatgccagctgtgctttaggcacctgtaggccagagggttgctgcctcaggcataaggttggtatgaaaaggggctgccttagaaaagcaggcacatcccttgttcagaaatggccactgtaggaaagcctgtgaacctcccaccagtggctttaagctgccagccatgccccatttctagaatagcctttgctcttccacacgcaacccttccatcagtgtcttccagcctgcatggggagggcctggctgcccagacacccaccctcacttctcatggccagcctgtgtttgcagatcactgggctgctctgtccccagcttgccccgtgccaggcatggctctgtgagattctgtggaatgcccttcttgacttgtggaaatcattcaccaagtacgatgggatgggattccaagtaaacagtggaccgtcatattgcaaagcaggcccacgcctgggctggccttggttgaggggatggaggaatgttttcgggggtgctttgcagggcagtggtgcagccgcagcgtgaacgctcttggacagctgaaaaccatggcctccttggggatggccagtgctcctggtgtctccacctgcctgggttgtgcaggaggccggctgccagtgcctggggctgggaaacttttttgcttggggcaggcttgggtgagctctcccagatgtgtgcccaccccaccactgcctggaacatccttgttctctgccaggatgcaggggcactgttgcctctgacacagcagtttctgggaactcagaggactgcctttctgaaggctggggagaggctttgagcaaggagcttgtttttgcttaatcgctctagaccatccctgatgcgtagatgtgagaggatgttttctggcacagtgttatgaaaatacaagataaatgatctcagtggaatgtttcatattacccgaaaaaaactggaaatcatcctttgttgtgaacacactgagactaagaattgaagcaatgcagttttaagaagtatttttcctattttttgctgtcaactttttggcaatgccacggcaaagttggtgtttcagcacatgctagagtgagctccggcttcgtgtctttaaccaactccactaatgtttcactgggtagacggagctggcctctatatttagccagaagcctttgcctcttttcaggcatcaaaaatgggttttgtcattgtctttgtctttgagagcagcagtttgaggtctgactccttcagttgtcctgtgagctgggcgttgcagtctgctcgaatcaagtgttggaacccccccacccctcagcccatcgtgaaacgacagctgtcagcctggggggcggctgctgaggaggtgcagcaggaatggggctgggccctgaggttttactttccgagccaatggcccctggaacatgccagcacacactgccatgtcctggggctaagagctgcctttagggacaggctcgtgttgtccagtttgccctgagagatgcacctgaccaggggcccgtcgtggctgcaacccacggtggtatgttagtgtttccaggcagttgtcagcagctgccgggtagtgtgtgtgtgcgacagcaggagagttcctggaggaaagggactggggacactttctcagaggttctcctgcctggaatcaagtgatgcgtgtccagaaggcaagagagggcggctccgcctggttaaagtttgggaacgggacggagccaactcctccttccaggactgtgggccccactcttttgcgctaacacttcccctccctcgggtcactgaggaaagagctgctctgtcccctccagtgccctgaaggtccctggcctccactggctgccatggcagggggcccttctgacaggggctgccccaagctgctgttcctcctctgaaccttcaccccaacacccagcccgtggcccctgcaagggggaccctgccagctgggaaacccaaaggcctgtccaaacgtgcgcaccaggaccgaggggagctccctcccaacacctgctaggaattgccaacttttaaatggatggggttttttatgggttgaacctctgttaatacttttgtacactctcactacagtttatatttttataggctattttctcaaggtgtttctagattccacatatctattttatataacaagttattatgttatgtgtgtgactcccttgtgtgtatctgtgccagcctcagcctccgagttgcttttccctctggccctgactctcactgactcaccgatgtgatgtgcaggcccacttcttaccccagatagcctcgggcgctgcctgtagtcatgctgacagctgtacagtagccgccaagactgctgacagctggagacggttctggtttcaactacggtatattgatatcggaagtattctagacagatcctcggttgggttttctagctacatgtttgtattgcacagatccccacctgccatcctatagtgttgtcttcctgtgtgttccggggcttctgggcagctgggcctgcccggggaagtccttgcaggtgggaggccatacagagacccactgtgtgccactgagcgtcccactgctgctgggcaactggaggactgcagggggcgccaggtgactctctccttttatatcacagcagctcctgtgctgaccttcaagttacgttttggaactgtaatactaaaggaagaaataaactactaatttgtataata

SEQ ID NO: 378457 - DNA, 4380 bp, Homo sapiens
tgctctagaggatccttggatgctgtgctcagaagaccaggggcccacccgggaggtcatagcccagttgctggaggatgctctgcaggttgagagccaagagcagccggagcaagcatttgttaaacctcatcttgtcagtgaatatgatatttatgggttcaggactgtacctgaggatgatgaggaagagaaattggttgccaaggtccgcgcgttggatctgaagactctctacctcacagaaaaccaggaagtctccactggggtcaagtgggaaaactattttgcaagtacagtgaacagggagatgatgtgctctccagagttaaaaaacctcatccgtgcgggcattccccacgagcaccgttccaaggtgtggaagtggtgtgtggaccgtcacaccaggaagttcaaggacaacactgagcctggccacttccagaccttgctgcagaaggcgctggagaaacagaacccagcctccaagcagattgagctggacttgctgcgaactctgcccaacaacaaacattactcctgccccacctcagaaggcatacagaagttacgcaatgtcctcctcgccttctcctggcggaatccagatatcggctactgtcaaggcctaaacaggttggtggcagtggccctcctgtacctggaacaagaagatgctttctggtgtctcgttaccatagtggaagttttcatgcctcgagactattatacaaagactcttttaggatcccaggtggaccagcgggtgttcagagaccttatgagtgagaagctgcctcggttgcatggccactttgaacagtacaaagtcgactacactctcatcactttcaactggtttctggtggtatttgtggatagtgtcgttagtgacatcctctttaaaatatgggactctttcctttatgaaggaccaaaggttattttccgttttgctctggcactttttaagtacaaggaagaggagattttgaaattgcaagattcgatgtctatatttaagtatctccgctacttcactcgcactatccttgatgctagatccggaaccgacgcgcctaccacttggagaaagtccggctggagctgaccgagctggaggccatccgtgaggacttcctgcgtgagcgggacaccagccctgacaagggtgagctggtcagtgacgaggaggaggatacctgagtgggctcgggatgctgctcttccttccttcacaaccaaagtgtgcccaaagggtgaaagtgcacttaaaagccagaatgtaacgtgtgtgtcctctggggatctgctgggcagatgtcccaagccaggctgcccttcctcatttcccactgtgcggggggcaggggtgggaggtctaatctgtttacaaccatttccgtgccatgcttttggttacacgtatctcagtcacgctttctgcctggttggtggatcctcaggcttaccagtggctatttgcaagagcctgtttccagcctccgtcagcctgtcggtgctctgaccctctgaaaccttgctttgctgggcatctccccatattctctctcctgtacatagtgggcagtggtgtgtggttttgaatggcagtgctataaaggatgccagctgtgctttaggcacctgtaggccagagggttgctgcctcaggcataaggttggtatgaaaaggggctgccttagaaaagcaggcacatcccttgttcagaaatggccactgtaggaaagcctgtgaacctcccaccagtggctttaagctgccagccatgccccatttctagaatagcctttgctcttccacacgcaacccttccatcagtgtcttccagcctgcatggggagggcctggctgcccagacacccaccctcacttctcatggccagcctgtgtttgcagatcactgggctgctctgtccccagcttgccccgtgccaggcatggctctgtgagattctgtggaatgcccttcttgacttgtggaaatcattcaccaagtacgatgggatgggattccaagtaaacagtggaccgtcatattgcaaagcaggcccacgcctgggctggccttggttgaggggatggaggaatgttttcgggggtgctttgcagggcagtggtgcagccgcagcgtgaacgctcttggacagctgaaaaccatggcctccttggggatggccagtgctcctggtgtctccacctgcctgggttgtgcaggaggccggctgccagtgcctggggctgggaaacttttttgcttggggcaggcttgggtgagctctcccagatgtgtgcccaccccaccactgcctggaacatccttgttctctgccaggatgcaggggcactgttgcctctgacacagcagtttctgggaactcagaggactgcctttctgaaggctggggagaggctttgagcaaggagcttgtttttgcttaatcgctctagaccatccctgatgcgtagatgtgagaggatgttttctggcacagtgttatgaaaatacaagataaatgatctcagtggaatgtttcatattacccgaaaaaaactggaaatcatcctttgttgtgaacacactgagactaagaattgaagcaatgcagttttaagaagtatttttcctattttttgctgtcaactttttggcaatgccacggcaaagttggtgtttcagcacatgctagagtgagctccggcttcgtgtctttaaccaactccactaatgtttcactgggtagacggagctggcctctatatttagccagaagcctttgcctcttttcaggcatcaaaaatgggttttgtcattgtctttgtctttgagagcagcagtttgaggtctgactccttcagttgtcctgtgagctgggcgttgcagtctgctcgaatcaagtgttggaacccccccacccctcagcccatcgtgaaacgacagctgtcagcctggggggcggctgctgaggaggtgcagcaggaatggggctgggccctgaggttttactttccgagccaatggcccctggaacatgccagcacacactgccatgtcctggggctaagagctgcctttagggacaggctcgtgttgtccagtttgccctgagagatgcacctgaccaggggcccgtcgtggctgcaacccacggtggtatgttagtgtttccaggcagttgtcagcagctgccgggtagtgtgtgtgtgcgacagcaggagagttcctggaggaaagggactggggacactttctcagaggttctcctgcctggaatcaagtgatgcgtgtccagaaggcaagagagggcggctccgcctggttaaagtttgggaacgggacggagccaactcctccttccaggactgtgggccccactcttttgcgctaacacttcccctccctcgggtcactgaggaaagagctgctctgtcccctccagtgccctgaaggtccctggcctccactggctgccatggcagggggcccttctgacaggggctgccccaagctgctgttcctcctctgaaccttcaccccaacacccagcccgtggcccctgcaagggggaccctgccagctgggaaacccaaaggcctgtccaaacgtgcgcaccaggaccgaggggagctccctcccaacacctgctaggaattgccaacttttaaatggatggggttttttatgggttgaacctctgttaatacttttgtacactctcactacagtttatatttttataggctattttctcaaggtgtttctagattccacatatctattttatataacaagttattatgttatgtgtgtgactcccttgtgtgtatctgtgccagcctcagcctccgagttgcttttccctctggccctgactctcactgactcaccgatgtgatgtgcaggcccacttcttaccccagatagcctcgggcgctgcctgtagtcatgctgacagctgtacagtagccgccaagactgctgacagctggagacggttctggtttcaactacggtatattgatatcggaagtattctagacagatcctcggttgggttttctagctacatgtttgtattgcacagatccccacctgccatcctatagtgttgtcttcctgtgtgttccggggcttctgggcagctgggcctgcccggggaagtccttgcaggtgggaggccatacagagacccactgtgtgccactgagcgtcccactgctgctgggcaactggaggactgcagggggcgccaggtgactctctccttttatatcacagcagctcctgtgctgaccttcaagttacgttttggaactgtaatactaaaggaagaaataaactactaatttgtataata

SEQ ID NO: 378458 - DNA, 1853 bp, Homo sapiens
  misc_feature (21)..(21): n is a, c, g, or t
ggctaggtagaggcgggtgtntggaatgtttcatattacccgaaaaaaactggaaatcatcctttgttgtgaacacactgagactaagaattgaagcaatgcagttttaagaagtatttttcctattttttgctgtcaactttttggcaatgccacggcaaagttggtgtttcagcacatgctagagtgagctccggcttcgtgtctttaaccaactccactaatgtttcactgggtagacggagctggcctctatatttagccagaagcctttgcctcttttcaggcatcaaaaatgggttttgtcattgtctttgtctttgagagcagcagtttgaggtctgactccttcagttgtcctgtgagctgggcgttgcagtctgctcgaatcaagtgttggaacccccccacccctcagcccatcgtgaaacgacagctgtcagcctggggggcggctgctgaggaggtgcagcaggaatggggctgggccctgaggttttactttccgagccaatggcccctggaacatgccagcacacactgccatgtcctggggctaagagctgcctttagggacaggctcgtgttgtccagtttgccctgagagatgcacctgaccaggggcccgtcgtggctgcaacccacggtggtatgttagtgtttccaggcagttgtcagcagctgccgggtagtgtgtgtgtgcgacagcaggagagttcctggaggaaagggactggggacactttctcagaggttctcctgcctggaatcaagtgatgcgtgtccagaaggcaagagagggcggctccgcctggttaaagtttgggaacgggacggagccaactcctccttccaggactgtgggccccactcttttgcgctaacacttcccctccctcgggtcactgaggaaagagctgctctgtcccctccagtgccctgaaggtccctggcctccactggctgccatggcagggggcccttctgacaggggctgccccaagctgctgttcctcctctgaaccttcaccccaacacccagcccgtggcccctgcaagggggaccctgccagctgggaaacccaaaggcctgtccaaacgtgcgcaccaggaccgaggggagctccctcccaacacctgctaggaattgccaacttttaaatggatggggttttttatgggttgaacctctgttaatacttttgtacactctcactacagtttatatttttataggctattttctcaaggtgtttctagattccacatatctattttatataacaagttattatgttatgtgtgtgactcccttgtgtgtatctgtgccagcctcagcctccgagttgcttttccctctggccctgactctcactgactcaccgatgtgatgtgcaggcccacttcttaccccagatagcctcgggcgctgcctgtagtcatgctgacagctgtacagtagccgccaagactgctgacagctggagacggttctggtttcaactacggtatattgatatcggaagtattctagacagatcctcggttgggttttctagctacatgtttgtattgcacagatccccacctgccatcctatagtgttgtcttcctgtgtgttccggggcttctgggcagctgggcctgcccggggaagtccttgcaggtgggaggccatacagagacccactgtgtgccactgagcgtcccactgctgctgggcaactggaggactgcagggggcgccaggtgactctctccttttatatcacagcagctcctgtgctgaccttcaagttacgttttggaactgtaatactaaaggaagaaataaactactaatttgtataata

SEQ ID NO: 378459 - DNA, 1859 bp, Homo sapiens
gagtgttacgagtgccgtaccggttggtagtacgtgagagtagcggataaaatctgagaatatcaggcccggttgtgaacacactgagactaagaattgaagcaatgcagttttaagaagtatttttcctattttttgctgtcaactttttggcaatgccacggcaaagttggtgtttcagcacatgctagagtgagctccggcttcgtgtctttaaccaactccactaatgtttcactgggtagacggagctggcctctatatttagccagaagcctttgcctcttttcaggcatcaaaaatgggttttgtcattgtctttgtctttgagagcagcagtttgaggtctgactccttcagttgtcctgtgagctgggcgttgcagtctgctcgaatcaagtgttggaacccccccacccctcagcccatcgtgaaacgacagctgtcagcctggggggcggctgctgaggaggtgcagcaggaatggggctgggccctgaggttttactttccgagccaatggcccctggaacatgccagcacacactgccatgtcctggggctaagagctgcctttagggacaggctcgtgttgtccagtttgccctgagagatgcacctgaccaggggcccgtcgtggctgcaacccacggtggtatgttagtgtttccaggcagttgtcagcagctgccgggtagtgtgtgtgtgcgacagcaggagagttcctggaggaaagggactggggacactttctcagaggttctcctgcctggaatcaagtgatgcgtgtccagaaggcaagagagggcggctccgcctggttaaagtttgggaacgggacggagccaactcctccttccaggactgtgggccccactcttttgcgctaacacttcccctccctcgggtcactgaggaaagagctgctctgtcccctccagtgccctgaaggtccctggcctccactggctgccatggcagggggcccttctgacaggggctgccccaagctgctgttcctcctctgaaccttcaccccaacacccagcccgtggcccctgcaagggggaccctgccagctgggaaacccaaaggcctgtccaaacgtgcgcaccaggaccgaggggagctccctcccaacacctgctaggaattgccaacttttaaatggatggggttttttatgggttgaacctctgttaatacttttgtacactctcactacagtttatatttttataggctattttctcaaggtgtttctagattccacatatctattttatataacaagttattatgttatgtgtgtgactcccttgtgtgtatctgtgccagcctcagcctccgagttgcttttccctctggccctgactctcactgactcaccgatgtgatgtgcaggcccacttcttaccccagatagcctcgggcgctgcctgtagtcatgctgacagctgtacagtagccgccaagactgctgacagctggagacggttctggtttcaactacggtatattgatatcggaagtattctagacagatcctcggttgggttttctagctacatgtttgtattgcacagatccccacctgccatcctatagtgttgtcttcctgtgtgttccggggcttctgggcagctgggcctgcccggggaagtccttgcaggtgggaggccatacagagacccactgtgtgccactgagcgtcccactgctgctgggcaactggaggactgcagggggcgccaggtgactctctccttttatatcacagcagctcctgtgctgaccttcaagttacgttttggaactgtaatactaaaggaagaaataaactactaatttgtataata

SEQ ID NO: 378460 - DNA, 5762 bp, Homo sapiens
cagggggcggccgcggagcccggggcgggtccggcgcgggagccagcgcggctgtgtggctatctgcagaagctgtcgggcaagggccccctgcgtggctaccgcagccgctggttcgtgttcgacgcgcgccgctgctacctttactatttcaagagtccgcaggacgcgctgcccctcggccacttggacatcgcggacgcctgcttcagctaccagggccccgacgaggcggcggagccgggcacggagccgcccgcgcacttccaggtgcacagcgcgggagccgtcacggtgctcaaggctcccaatcgtcaactcatgacttactggttacaggagcttcagcagaagagatgggaatattgtaacagtcttgacatggtcaagtgggacagcaggacctctccaactcccggggattttcctaagggtcttgtagccagagataacactgatttaatttacccacacccaaatgcttctgcagaaaaagccagaaatgtcctagctgtggagactgtgcctggagagctggtgggagaacaagctgcaaatcagcccgccccagggcatccaaattccattaatttttactctttgaaacagtggggcaatgagctcaagaattcgatgtcttctttccgtcctgggagaggacataatgatagtcggaggactgtgttttataccaatgaagagtgggaacttttagacccaacccctaaggacctagaggagtccatagtacaggaagaaaagaagaagctgacccctgaaggaaacaaaggagtaactggctcaggattcccctttgattttggacgtaacccctacaaaggaaagcgccctttgaaagacataattgggtcgtacaaaaatcgtcacagcagtggtgacccttcaagtgaaggcacatcaggcagtggcagcgtcagcatcaggaagccggcctccgaaatgcaactgcaggtccagagccagcaggaagagctggaacagttaaagaaagacctgtccagtcagaaggagcttgttcgactgctccagcagacagtccggtcatcccagtatgacaagtatttcacaagcagccggctctgtgagggggtcccaaaggacacgctcgagcttctgcaccaaaaggatgatcagattctgggccttaccagccagctggagaggttcagcttggagaaggagagtcttcagcaggaagtaaggacgctgaagagcaaagtgggcgagctcaacgagcagctgggaatgctcatggagaccatccaagccaaggacgaggtcatcatcaagctcagcgagggcgagggcaacgggcctcctcccaccgtggcgcccagctccccttcggttgtgcctgttgccagggaccagctggaactggacaggctgaaagataatctacaggggtacaaaacccaaaacaaatttctaaataaggagattttggaactctcagctctacgaagaaatgcagaaaggagagagagggatctgatggcaaagtattctagcctggaagccaagctctgccagatagaaagtaaatacctgatattgctccaagaaatgaagacaccagtgtgctcagaagaccaggggcccacccgggaggtcatagcccagttgctggaggatgctctgcaggttgagagccaagagcagccggagcaagcatttgttaaacctcatcttgtcagtgaatatgatatttatgggttcaggactgtacctgaggatgatgaggaagagaaattggttgccaaggtccgcgcgttggatctgaagactctctacctcacagaaaaccaggaagtctccactggggtcaagtgggaaaactattttgcaagtacagtgaacagggagatgatgtgctctccagagttaaaaaacctcatccgtgcgggcattccccacgagcaccgttccaaggtgtggaagtggtgtgtggaccgtcacaccaggaagttcaaggacaacactgagcctggccacttccagaccttgctgcagaaggcgctggagaaacagaacccagcctccaagcagattgagctggacttgctgcgaactctgcccaacaacaaacattactcctgccccacctcagaaggcatacagaagttacgcaatgtcctcctcgccttctcctggcggaatccagatatcggctactgtcaaggcctaaacaggttggtggcagtggccctcctgtacctggaacaagaagatgctttctggtgtctcgttaccatagtggaagttttcatgcctcgagactattatacaaagactcttttaggatcccaggtggaccagcgggtgttcagagaccttatgagtgagaagctgcctcggttgcatggccactttgaacagtacaaagtcgactacactctcatcactttcaactggtttctggtggtatttgtggatagtgtcgttagtgacatcctctttaaaatatgggactctttcctttatgaaggaccaaaggttattttccgttttgctctggcactttttaagtacaaggaagaggagattttgaaattgcaagattcgatgtctatatttaagtatctccgctacttcactcgcactatccttgatgctagatccggaaccgacgcgcctaccacttggagaaagtccggctggagctgaccgagctggaggccatccgtgaggacttcctgcgtgagcgggacaccagccctgacaagggtgagctggtcagtgacgaggaggaggatacctgagtgggctcgggatgctgctcttccttccttcacaaccaaagtgtgcccaaagggtgaaagtgcacttaaaagccagaatgtaacgtgtgtgtcctctggggatctgctgggcagatgtcccaagccaggctgcccttcctcatttcccactgtgcggggggcaggggtgggaggtctaatctgtttacaaccatttccgtgccatgcttttggttacacgtatctcagtcacgctttctgcctggttggtggatcctcaggcttaccagtggctatttgcaagagcctgtttccagcctccgtcagcctgtcggtgctctgaccctctgaaaccttgctttgctgggcatctccccatattctctctcctgtacatagtgggcagtggtgtgtggttttgaatggcagtgctataaaggatgccagctgtgctttaggcacctgtaggccagagggttgctgcctcaggcataaggttggtatgaaaaggggctgccttagaaaagcaggcacatcccttgttcagaaatggccactgtaggaaagcctgtgaacctcccaccagtggctttaagctgccagccatgccccatttctagaatagcctttgctcttccacacgcaacccttccatcagtgtcttccagcctgcatggggagggcctggctgcccagacacccaccctcacttctcatggccagcctgtgtttgcagatcactgggctgctctgtccccagcttgccccgtgccaggcatggctctgtgagattctgtggaatgcccttcttgacttgtggaaatcattcaccaagtacgatgggatgggattccaagtaaacagtggaccgtcatattgcaaagcaggcccacgcctgggctggccttggttgaggggatggaggaatgttttcgggggtgctttgcagggcagtggtgcagccgcagcgtgaacgctcttggacagctgaaaaccatggcctccttggggatggccagtgctcctggtgtctccacctgcctgggttgtgcaggaggccggctgccagtgcctggggctgggaaacttttttgcttggggcaggcttgggtgagctctcccagatgtgtgcccaccccaccactgcctggaacatccttgttctctgccaggatgcaggggcactgttgcctctgacacagcagtttctgggaactcagaggactgcctttctgaaggctggggagaggctttgagcaaggagcttgtttttgcttaatcgctctagaccatccctgatgcgtagatgtgagaggatgttttctggcacagtgttatgaaaatacaagataaatgatctcagtggaatgtttcatattacccgaaaaaaactggaaatcatcctttgttgtgaacacactgagactaagaattgaagcaatgcagttttaagaagtatttttcctattttttgctgtcaactttttggcaatgccacggcaaagttggtgtttcagcacatgctagagtgagctccggcttcgtgtctttaaccaactccactaatgtttcactgggtagacggagctggcctctatatttagccagaagcctttgcctcttttcaggcatcaaaaatgggttttgtcattgtctttgtctttgagagcagcagtttgaggtctgactccttcagttgtcctgtgagctgggcgttgcagtctgctcgaatcaagtgttggaacccccccacccctcagcccatcgtgaaacgacagctgtcagcctggggggcggctgctgaggaggtgcagcaggaatggggctgggccctgaggttttactttccgagccaatggcccctggaacatgccagcacacactgccatgtcctggggctaagagctgcctttagggacaggctcgtgttgtccagtttgccctgagagatgcacctgaccaggggcccgtcgtggctgcaacccacggtggtatgttagtgtttccaggcagttgtcagcagctgccgggtagtgtgtgtgtgcgacagcaggagagttcctggaggaaagggactggggacactttctcagaggttctcctgcctggaatcaagtgatgcgtgtccagaaggcaagagagggcggctccgcctggttaaagtttgggaacgggacggagccaactcctccttccaggactgtgggccccactcttttgcgctaacacttcccctccctcgggtcactgaggaaagagctgctctgtcccctccagtgccctgaaggtccctggcctccactggctgccatggcagggggcccttctgacaggggctgccccaagctgctgttcctcctctgaaccttcaccccaacacccagcccgtggcccctgcaagggggaccctgccagctgggaaacccaaaggcctgtccaaacgtgcgcaccaggaccgaggggagctccctcccaacacctgctaggaattgccaacttttaaatggatggggttttttatgggttgaacctctgttaatacttttgtacactctcactacagtttatatttttataggctattttctcaaggtgtttctagattccacatatctattttatataacaagttattatgttatgtgtgtgactcccttgtgtgtatctgtgccagcctcagcctccgagttgcttttccctctggccctgactctcactgactcaccgatgtgatgtgcaggcccacttcttaccccagatagcctcgggcgctgcctgtagtcatgctgacagctgtacagtagccgccaagactgctgacagctggagacggttctggtttcaactacggtatattgatatcggaagtattctagacagatcctcggttgggttttctagctacatgtttgtattgcacagatccccacctgccatcctatagtatggcctcccacctgcaaggacttccccggcagcgccagctgcccagaagccccg

SEQ ID NO: 378461 - DNA, 2381 bp, Homo sapiens
cagggggcggccgcggagcccggggcgggtccggcgcgggagccagcgcggctgtgtggctatctgcagaagctgtcgggcaagggccccctgcgtggctaccgcagccgctggttcgtgttcgacgcgcgccgctgctacctttactatttcaagagtccgcaggacgcgctgcccctcggccacttggacatcgcggacgcctgcttcagctaccagggccccgacgaggcggcggagccgggcacggagccgcccgcgcacttccaggtgcacagcgcgggagccgtcacggtgctcaaggctcccaatcgtcaactcatgacttactggttacaggagcttcagcagaagagatgggaatattgtaacagtcttgacatggtcaagtgggacagcaggacctctccaactcccggggattttcctaagggtcttgtagccagagataacactgatttaatttacccacacccaaatgcttctgcagaaaaagccagaaatgtcctagctgtggagactgtgcctggagagctggtgggagaacaagctgcaaatcagcccgccccagggcatccaaattccattaatttttactctttgaaacagtggggcaatgagctcaagaattcgatgtcttctttccgtcctgggagaggacataatgatagtcggaggactgtgttttataccaatgaagagtgggaacttttagacccaacccctaaggacctagaggagtccatagtacaggaagaaaagaagaagctgacccctgaaggaaacaaaggagtaactggctcaggattcccctttgattttggacgtaacccctacaaaggaaagcgccctttgaaagacataattgggtcgtacaaaaatcgtcacagcagtggtgacccttcaagtgaaggcacatcaggcagtggcagcgtcagcatcaggaagccggcctccgaaatgcaactgcaggtccagagccagcaggaagagctggaacagttaaagaaagacctgtccagtcagaaggagcttgttcgactgctccagcagacagtccggtcatcccagtatgacaagtatttcacaagcagccggctctgtgagggggtcccaaaggacacgctcgagcttctgcaccaaaaggatgatcagattctgggccttaccagccagctggagaggttcagcttggagaaggagagtcttcagcaggaagtaaggacgctgaagagcaaagtgggcgagctcaacgagcagctgggaatgctcatggagaccatccaagccaaggacgaggtcatcatcaagctcagcgagggcgagggcaacgggcctcctcccaccgtggcgcccagctccccttcggttgtgcctgttgccagggaccagctggaactggacaggctgaaagataatctacaggggtacaaaacccaaaacaaatttctaaataaggagattttggaactctcagctctacgaagaaatgcagaaaggagagagagggatctgatggcaaagtattctagcctggaagccaagctctgccagatagaaagtaaatacctgatattgctccaagaaatgaagacaccagtgtgctcagaagaccaggggcccacccgggaggtcatagcccagttgctggaggatgctctgcaggttgagagccaagagcagccggagcaagcatttgttaaacctcatcttgtcagtgaatatgatatttatgggttcaggactgtacctgaggatgatgaggaagagaaattggttgccaaggtccgcgcgttggatctgaagactctctacctcacagaaaaccaggaagtctccactggggtcaagtgggaaaactattttgcaagtacagtgaacagggagatgatgtgctctccagagttaaaaaacctcatccgtgcgggcattccccacgagcaccgttccaaggtgtggaagtggtgtgtggaccgtcacaccaggaagttcaaggacaacactgagcctggccacttccagaccttgctgcagaaggcgctggagaaacagaacccagcctccaagcagattgagctggacttgctgcgaactctgcccaacaacaaacattactcctgccccacctcagaaggcatacagaagttacgcaatgtcctcctcgccttctcctggcggaatccagatatcggctactgtcaaggcctaaacaggttggtggcagtggccctcctgtacctggaacaagaagatgctttctggtgtctcgttaccatagtggaagttttcatgccttctgaggtggggcaggagtaatgtttgttgttgggcagagttcgcagcaagtccagctctatctgcttggcgggtcttgcgccgca

SEQ ID NO: 378462 - DNA, 5957 bp, Homo sapiens
cagggggcggccgcggagcccggggcgggtccggcgcgggagccagcgcggctgtgtggctatctgcagaagctgtcgggcaagggccccctgcgtggctaccgcagccgctggttcgtgttcgacgcgcgccgctgctacctttactatttcaagagtccgcaggacgcgctgcccctcggccacttggacatcgcggacgcctgcttcagctaccagggccccgacgaggcggcggagccgggcacggagccgcccgcgcacttccaggtgcacagcgcgggagccgtcacggtgctcaaggctcccaatcgtcaactcatgacttactggttacaggagcttcagcagaagagatgggaatattgtaacagtcttgacatggtcaagtgggacagcaggacctctccaactcccggggattttcctaagggtcttgtagccagagataacactgatttaatttacccacacccaaatgcttctgcagaaaaagccagaaatgtcctagctgtggagactgtgcctggagagctggtgggagaacaagctgcaaatcagcccgccccagggcatccaaattccattaatttttactctttgaaacagtggggcaatgagctcaagaattcgatgtcttctttccgtcctgggagaggacataatgatagtcggaggactgtgttttataccaatgaagagtgggaacttttagacccaacccctaaggacctagaggagtccatagtacaggaagaaaagaagaagctgacccctgaaggaaacaaaggagtaactggctcaggattcccctttgattttggacgtaacccctacaaaggaaagcgccctttgaaagacataattgggtcgtacaaaaatcgtcacagcagtggtgacccttcaagtgaaggcacatcaggcagtggcagcgtcagcatcaggaagccggcctccgaaatgcaactgcaggtccagagccagcaggaagagctggaacagttaaagaaagacctgtccagtcagaaggagcttgttcgactgctccagcagacagtccggtcatcccagtatgacaagtatttcacaagcagccggctctgtgagggggtcccaaaggacacgctcgagcttctgcaccaaaaggatgatcagattctgggccttaccagccagctggagaggttcagcttggagaaggagagtcttcagcaggaagtaaggacgctgaagagcaaagtgggcgagctcaacgagcagctgggaatgctcatggagaccatccaagccaaggacgaggtcatcatcaagctcagcgagggcgagggcaacgggcctcctcccaccgtggcgcccagctccccttcggttgtgcctgttgccagggaccagctggaactggacaggctgaaagataatctacaggggtacaaaacccaaaacaaatttctaaataaggagattttggaactctcagctctacgaagaaatgcagaaaggagagagagggatctgatggcaaagtattctagcctggaagccaagctctgccagatagaaagtaaatacctgatattgctccaagaaatgaagacaccagtgtgctcagaagaccaggggcccacccgggaggtcatagcccagttgctggaggatgctctgcaggttgagagccaagagcagccggagcaagcatttgttaaacctcatcttgtcagtgaatatgatatttatgggttcaggactgtacctgaggatgatgaggaagagaaattggttgccaaggtccgcgcgttggatctgaagactctctacctcacagaaaaccaggaagtctccactggggtcaagtgggaaaactattttgcaagtacagtgaacagggagatgatgtgctctccagagttaaaaaacctcatccgtgcgggcattccccacgagcaccgttccaaggtgtggaagtggtgtgtggaccgtcacaccaggaagttcaaggacaacactgagcctggccacttccagaccttgctgcagaaggcgctggagaaacagaacccagcctccaagcagattgagctggacttgctgcgaactctgcccaacaacaaacattactcctgccccacctcagaaggcatacagaagttacgcaatgtcctcctcgccttctcctggcggaatccagatatcggctactgtcaaggcctaaacaggttggtggcagtggccctcctgtacctggaacaagaagatgctttctggtgtctcgttaccatagtggaagttttcatgcctcgagactattatacaaagactcttttaggatcccaggtggaccagcgggtgttcagagaccttatgagtgagaagctgcctcggttgcatggccactttgaacagtacaaagtcgactacactctcatcactttcaactggtttctggtggtatttgtggatagtgtcgttagtgacatcctctttaaaatatgggactctttcctttatgaaggaccaaaggttattttccgttttgctctggcactttttaagtacaaggaagaggagattttgaaattgcaagattcgatgtctatatttaagtatctccgctacttcactcgcactatccttgatgctagatccggaaccgacgcgcctaccacttggagaaagtccggctggagctgaccgagctggaggccatccgtgaggacttcctgcgtgagcgggacaccagccctgacaagggtgagctggtcagtgacgaggaggaggatacctgagtgggctcgggatgctgctcttccttccttcacaaccaaagtgtgcccaaagggtgaaagtgcacttaaaagccagaatgtaacgtgtgtgtcctctggggatctgctgggcagatgtcccaagccaggctgcccttcctcatttcccactgtgcggggggcaggggtgggaggtctaatctgtttacaaccatttccgtgccatgcttttggttacacgtatctcagtcacgctttctgcctggttggtggatcctcaggcttaccagtggctatttgcaagagcctgtttccagcctccgtcagcctgtcggtgctctgaccctctgaaaccttgctttgctgggcatctccccatattctctctcctgtacatagtgggcagtggtgtgtggttttgaatggcagtgctataaaggatgccagctgtgctttaggcacctgtaggccagagggttgctgcctcaggcataaggttggtatgaaaaggggctgccttagaaaagcaggcacatcccttgttcagaaatggccactgtaggaaagcctgtgaacctcccaccagtggctttaagctgccagccatgccccatttctagaatagcctttgctcttccacacgcaacccttccatcagtgtcttccagcctgcatggggagggcctggctgcccagacacccaccctcacttctcatggccagcctgtgtttgcagatcactgggctgctctgtccccagcttgccccgtgccaggcatggctctgtgagattctgtggaatgcccttcttgacttgtggaaatcattcaccaagtacgatgggatgggattccaagtaaacagtggaccgtcatattgcaaagcaggcccacgcctgggctggccttggttgaggggatggaggaatgttttcgggggtgctttgcagggcagtggtgcagccgcagcgtgaacgctcttggacagctgaaaaccatggcctccttggggatggccagtgctcctggtgtctccacctgcctgggttgtgcaggaggccggctgccagtgcctggggctgggaaacttttttgcttggggcaggcttgggtgagctctcccagatgtgtgcccaccccaccactgcctggaacatccttgttctctgccaggatgcaggggcactgttgcctctgacacagcagtttctgggaactcagaggactgcctttctgaaggctggggagaggctttgagcaaggagcttgtttttgcttaatcgctctagaccatccctgatgcgtagatgtgagaggatgttttctggcacagtgttatgaaaatacaagataaatgatctcagtggaatgtttcatattacccgaaaaaaactggaaatcatcctttgttgtgaacacactgagactaagaattgaagcaatgcagttttaagaagtatttttcctattttttgctgtcaactttttggcaatgccacggcaaagttggtgtttcagcacatgctagagtgagctccggcttcgtgtctttaaccaactccactaatgtttcactgggtagacggagctggcctctatatttagccagaagcctttgcctcttttcaggcatcaaaaatgggttttgtcattgtctttgtctttgagagcagcagtttgaggtctgactccttcagttgtcctgtgagctgggcgttgcagtctgctcgaatcaagtgttggaacccccccacccctcagcccatcgtgaaacgacagctgtcagcctggggggcggctgctgaggaggtgcagcaggaatggggctgggccctgaggttttactttccgagccaatggcccctggaacatgccagcacacactgccatgtcctggggctaagagctgcctttagggacaggctcgtgttgtccagtttgccctgagagatgcacctgaccaggggcccgtcgtggctgcaacccacggtggtatgttagtgtttccaggcagttgtcagcagctgccgggtagtgtgtgtgtgcgacagcaggagagttcctggaggaaagggactggggacactttctcagaggttctcctgcctggaatcaagtgatgcgtgtccagaaggcaagagagggcggctccgcctggttaaagtttgggaacgggacggagccaactcctccttccaggactgtgggccccactcttttgcgctaacacttcccctccctcgggtcactgaggaaagagctgctctgtcccctccagtgccctgaaggtccctggcctccactggctgccatggcagggggcccttctgacaggggctgccccaagctgctgttcctcctctgaaccttcaccccaacacccagcccgtggcccctgcaagggggaccctgccagctgggaaacccaaaggcctgtccaaacgtgcgcaccaggaccgaggggagctccctcccaacacctgctaggaattgccaacttttaaatggatggggttttttatgggttgaacctctgttaatacttttgtacactctcactacagtttatatttttataggctattttctcaaggtgtttctagattccacatatctattttatataacaagttattatgttatgtgtgtgactcccttgtgtgtatctgtgccagcctcagcctccgagttgcttttccctctggccctgactctcactgactcaccgatgtgatgtgcaggcccacttcttaccccagatagcctcgggcgctgcctgtagtcatgctgacagctgtacagtagccgccaagactgctgacagctggagacggttctggtttcaactacggtatattgatatcggaagtattctagacagatcctcggttgggttttctagctacatgtttgtattgcacagatccccacctgccatcctatagtgttgtcttcctgtgtgttccggggcttctgggcagctgggcctgcccggggaagtccttgcaggtgggaggccatacagagacccactgtgtgccactgagcgtcccactgctgctgggcaactggaggactgcagggggcgccaggtgactctctccttttatatcacagcagctcctgtgctgaccttcaagttacgttttggaactgtaatactaaaggaagaaataaactactaatttgtataata

SEQ ID NO: 378463 - DNA, 2347 bp, Homo sapiens
  misc_feature (76)..(76): n is a, c, g, or t
caaatgagctgtaatcaaatgatacttgtcaacagctgttatatacctgatatacttttttgaacagaacttgaancatcttcccagaccttattcctgcatgttttctagggtatatttgatttgtctgataaggtggcagatgggagctagtcctggaccacagtgtcctaagaaagaatgggtatagcatggagtggccactcatgggccatgtgccagatggcaccgagctggacctcagtaattggcatgtagcctggttcctgctgctctctccacctctgtccagaggtgatgcatttgttggcatccagaggtctgattatcagcactccttctataaggaagagaggaacccactgcaggccattttaaacatgaaaggtggtctgtggcataaattaatttcttgtctttgctacagtctgtctctggctcacttcctaatagttttgggtttgttgttcactggtcatttgcgtacctaaagattgctcttcctgtgtctctgtctgaatggaggtaaccaccacattctctgcagtattctagcctggaagccaagctctgccagatagaaagtaaatacctgatattgctccaagaaatgaagacaccagtgtgctcagaagaccaggggcccacccgggaggtcatagcccagttgctggaggatgctctgcaggttgagagccaagagcagccggagcaagcatttgttaaacctcatcttgtcagtgaatatgatatttatgggttcaggactgtacctgaggatgatgaggaagagaaattggttgccaaggtccgcgcgttggatctgaagactctctacctcacagaaaaccaggaagtctccactggggtcaagtgggaaaactattttgcaagtacagtgaacagggagatgatgtgctctccagagttaaaaaacctcatccgtgcgggcattccccacgagcaccgttccaaggtgtggaagtggtgtgtggaccgtcacaccaggaagttcaaggacaacactgagcctggccacttccagaccttgctgcagaaggcgctggagaaacagaacccagcctccaagcagattgagctggacttgctgcgaactctgcccaacaacaaacattactcctgccccacctcagaaggcatacagaagttacgcaatgtcctcctcgccttctcctggcggaatccagatatcggctactgtcaaggcctaaacaggttggtggcagtggccctcctgtacctggaacaagaagatgctttctggtgtctcgttaccatagtggaagttttcatgcctcgagactattatacaaagactcttttaggatcccaggtggaccagcgggtgttcagagaccttatgagtgagaagctgcctcggttgcatggccactttgaacagtacaaagtcgactacactctcatcactttcaactggtttctggtggtatttgtggatagtgtcgttagtgacatcctctttaaaatatgggactctttcctttatgaaggaccaaaggtgagttagctcagctcagctattttcagatatacacacttgacaaccgtcagcagcgttggtggcggtagagcggctggctcacctggaacttatgagggttaccatggtgcccaagggatctcagcacggcctgcactagatctgggtccagggtatcaggaaaccacagtcatttgttcatgtatcagaaacattcaacccacatcaagccctgtgataggcgctgggagctatggcttacagtttgagcctgagcctcaccatctgtcaaatggctggtggtgttaccccatcatatggaggaggagatggaggcccagagatctaataagcaggggattaggggggctaatgagggggactaacttgggggagccaacttcagagccttactgcccatgagcctcccacccgctctgttgtatgttttttaaaaatcagtttttgaataaggaatatatttacatattaaaccctaattgtataaacaggtgtttgtaatggagtggaggcccctccctagtcttctagttactcttctcaatttattctttaccttagccgggcacagtggcatgtgccaattgtctcagctacttgggaggctgaggtaggaggatcatttgagctgaggagttaaaatatagcctgggcaacacagcaagacccagaaaacaaactaaattagagaaagtacaggcccttagatatggggaaagcagtttgttccaaagctgcttgaacttgcaagactaccaggagtccattccctctaacctctaatgtaccccaaacacaaattaa

SEQ ID NO: 378464 - DNA, 3732 bp, Homo sapiens
tgctggtgtctagaggatccgccaggctctcaggttgtgcgtctgctcgtctgcttaccggtgactggcaggcctgatacacttctcccctttgttccctctccaggtggaccagcgggtgttcagagaccttatgagtgagaagctgcctcggttgcatggccactttgaacagtacaaagtcgactacactctcatcactttcaactggtttctggtggtatttgtggatagtgtcgttagtgacatcctctttaaaatatgggactctttcctttatgaaggaccaaaggttattttccgttttgctctggcactttttaagtacaaggaagaggagattttgaaattgcaagattcgatgtctatatttaagtatctccgctacttcactcgcactatccttgatgctagatccggaaccgacgcgcctaccacttggagaaagtccggctggagctgaccgagctggaggccatccgtgaggacttcctgcgtgagcgggacaccagccctgacaagggtgagctggtcagtgacgaggaggaggatacctgagtgggctcgggatgctgctcttccttccttcacaaccaaagtgtgcccaaagggtgaaagtgcacttaaaagccagaatgtaacgtgtgtgtcctctggggatctgctgggcagatgtcccaagccaggctgcccttcctcatttcccactgtgcggggggcaggggtgggaggtctaatctgtttacaaccatttccgtgccatgcttttggttacacgtatctcagtcacgctttctgcctggttggtggatcctcaggcttaccagtggctatttgcaagagcctgtttccagcctccgtcagcctgtcggtgctctgaccctctgaaaccttgctttgctgggcatctccccatattctctctcctgtacatagtgggcagtggtgtgtggttttgaatggcagtgctataaaggatgccagctgtgctttaggcacctgtaggccagagggttgctgcctcaggcataaggttggtatgaaaaggggctgccttagaaaagcaggcacatcccttgttcagaaatggccactgtaggaaagcctgtgaacctcccaccagtggctttaagctgccagccatgccccatttctagaatagcctttgctcttccacacgcaacccttccatcagtgtcttccagcctgcatggggagggcctggctgcccagacacccaccctcacttctcatggccagcctgtgtttgcagatcactgggctgctctgtccccagcttgccccgtgccaggcatggctctgtgagattctgtggaatgcccttcttgacttgtggaaatcattcaccaagtacgatgggatgggattccaagtaaacagtggaccgtcatattgcaaagcaggcccacgcctgggctggccttggttgaggggatggaggaatgttttcgggggtgctttgcagggcagtggtgcagccgcagcgtgaacgctcttggacagctgaaaaccatggcctccttggggatggccagtgctcctggtgtctccacctgcctgggttgtgcaggaggccggctgccagtgcctggggctgggaaacttttttgcttggggcaggcttgggtgagctctcccagatgtgtgcccaccccaccactgcctggaacatccttgttctctgccaggatgcaggggcactgttgcctctgacacagcagtttctgggaactcagaggactgcctttctgaaggctggggagaggctttgagcaaggagcttgtttttgcttaatcgctctagaccatccctgatgcgtagatgtgagaggatgttttctggcacagtgttatgaaaatacaagataaatgatctcagtggaatgtttcatattacccgaaaaaaactggaaatcatcctttgttgtgaacacactgagactaagaattgaagcaatgcagttttaagaagtatttttcctattttttgctgtcaactttttggcaatgccacggcaaagttggtgtttcagcacatgctagagtgagctccggcttcgtgtctttaaccaactccactaatgtttcactgggtagacggagctggcctctatatttagccagaagcctttgcctcttttcaggcatcaaaaatgggttttgtcattgtctttgtctttgagagcagcagtttgaggtctgactccttcagttgtcctgtgagctgggcgttgcagtctgctcgaatcaagtgttggaacccccccacccctcagcccatcgtgaaacgacagctgtcagcctggggggcggctgctgaggaggtgcagcaggaatggggctgggccctgaggttttactttccgagccaatggcccctggaacatgccagcacacactgccatgtcctggggctaagagctgcctttagggacaggctcgtgttgtccagtttgccctgagagatgcacctgaccaggggcccgtcgtggctgcaacccacggtggtatgttagtgtttccaggcagttgtcagcagctgccgggtagtgtgtgtgtgcgacagcaggagagttcctggaggaaagggactggggacactttctcagaggttctcctgcctggaatcaagtgatgcgtgtccagaaggcaagagagggcggctccgcctggttaaagtttgggaacgggacggagccaactcctccttccaggactgtgggccccactcttttgcgctaacacttcccctccctcgggtcactgaggaaagagctgctctgtcccctccagtgccctgaaggtccctggcctccactggctgccatggcagggggcccttctgacaggggctgccccaagctgctgttcctcctctgaaccttcaccccaacacccagcccgtggcccctgcaagggggaccctgccagctgggaaacccaaaggcctgtccaaacgtgcgcaccaggaccgaggggagctccctcccaacacctgctaggaattgccaacttttaaatggatggggttttttatgggttgaacctctgttaatacttttgtacactctcactacagtttatatttttataggctattttctcaaggtgtttctagattccacatatctattttatataacaagttattatgttatgtgtgtgactcccttgtgtgtatctgtgccagcctcagcctccgagttgcttttccctctggccctgactctcactgactcaccgatgtgatgtgcaggcccacttcttaccccagatagcctcgggcgctgcctgtagtcatgctgacagctgtacagtagccgccaagactgctgacagctggagacggttctggtttcaactacggtatattgatatcggaagtattctagacagatcctcggttgggttttctagctacatgtttgtattgcacagatccccacctgccatcctatagtgttgtcttcctgtgtgttccggggcttctgggcagctgggcctgcccggggaagtccttgcaggtgggaggccatacagagacccactgtgtgccactgagcgtcccactgctgctgggcaactggaggactgcagggggcgccaggtgactctctccttttatatcacagcagctcctgtgctgaccttcaagttacgttttggaactgtaatactaaaggaagaaataaactactaatttgtataata

SEQ ID NO: 378465 - DNA, 5915 bp, Homo sapiens
cagggggcggccgcggagcccggggcgggtccggcgcgggagccagcgcggctgtgtggctatctgcagaagctgtcgggcaagggccccctgcgtggctaccgcagccgctggttcgtgttcgacgcgcgccgctgctacctttactatttcaagagtccgcaggacgcgctgcccctcggccacttggacatcgcggacgcctgcttcagctaccagggccccgacgaggcggcggagccgggcacggagccgcccgcgcacttccaggtgcacagcgcgggagccgtcacggtgctcaaggctcccaatcgtcaactcatgacttactggttacaggagcttcagcagaagagatgggaatattgtaacagtcttgacatggtcaagtgggacagcaggacctctccaactcccggggattttcctaagggtcttgtagccagagataacactgatttaatttacccacacccaaatgcttctgcagaaaaagccagaaatgtcctagctgtggagactgtgcctggagagctggtgggagaacaagctgcaaatcagcccgccccagggcatccaaattccattaatttttactctttgaaacagtggggcaatgagctcaagaattcgatgtcttctttccgtcctgggagaggacataatgatagtcggaggactgtgttttataccaatgaagagtgggaacttttagacccaacccctaaggacctagaggagtccatagtacaggaagaaaagaagaagctgacccctgaaggaaacaaaggagtaactggctcaggattcccctttgattttggacgtaacccctacaaaggaaagcgccctttgaaagacataattgggtcgtacaaaaatcgtcacagcagtggtgacccttcaagtgaaggcacatcaggcagtggcagcgtcagcatcaggaagccggcctccgaaatgcaactgcaggtccagagccagcaggaagagctggaacagttaaagaaagacctgtccagtcagaaggagcttgttcgactgctccagcagacagtccggtcatcccagtatgacaagtatttcacaagcagccggctctgtgagggggtcccaaaggacacgctcgagcttctgcaccaaaaggatgatcagattctgggccttaccagccagctggagaggttcagcttggagaaggagagtcttcagcaggaagtaaggacgctgaagagcaaagtgggcgagctcaacgagcagctgggaatgctcatggagaccatccaagccaaggacgaggtcatcatcaagctcagcgagggcgagggcaacgggcctcctcccaccgtggcgcccagctccccttcggttgtgcctgttgccagggaccagctggaactggacaggctgaaagataatctacaggggtacaaaacccaaaacaaatttctaaataaggagattttggaactctcagctctacgaagaaatgcagaaaggagagagagggatctgatggcaaagtattctagcctggaagccaagctctgccagatagaaagtaaatacctgatattgctccaagaaatgaagacaccagtgtgctcagaagaccaggggcccacccgggaggtcatagcccagttgctggaggatgctctgcaggttgagagccaagagcagccggagcaagcatttgttaaacctcatcttgtcagtgaatatgatatttatgggttcaggactgtacctgaggatgatgaggaagagaaattggttgccaaggtccgcgcgttggatctgaagactctctacctcacagaaaaccaggaagtctccactggggtcaagtgggaaaactattttgcaagtacagtgaacagggagatgatgtgctctccagagttaaaaaacctcatccgtgcgggcattccccacgagcaccgttccaaggtgtggaagtggtgtgtggaccgtcacaccaggaagttcaaggacaacactgagcctggccacttccagaccttgctgcagaaggcgctggagaaacagaacccagcctccaagcagattgagctggacttgctgcgaactctgcccaacaacaaacattactcctgccccacctcagaaggcatacagaagttacgcaatgtcctcctcgccttctcctggcggaatccagatatcggctactgtcaaggcctaaacaggttggtggcagtggccctcctgtacctggaacaagaagatgctttctggtgtctcgttaccatagtggaagttttcatgcctcgagactattatacaaagactcttttaggatcccaggtggaccagcgggtgttcagagaccttatgagtgagaagctgcctcggttgcatggccactttgaacagtacaaagtcgactacactctcatcactttcaactggtttctggtggtatttgtggatagtgtcgttagtgacatcctctttaaaatatgggactctttcctttatgaaggaccaaaggttattttccgttttgctctggcactttttaagtacaaggaagaggagattttgaaattgcaagattcgatgtctatatttaagtatctccgctacttcactcgcactatccttgatgctagatccggaaccgacgcgcctaccacttggagaaagtccggctggagctgaccgagctggaggccatccgtgaggacttcctgcgtgagcgggacaccagccctgacaagggtgagctggtcagtgacgaggaggaggatacctgagtgggctcgggatgctgctcttccttccttcacaaccaaagtgtgcccaaagggtgaaagtgcacttaaaagccagaatgtaacgtgtgtgtcctctggggatctgctgggcagatgtcccaagccaggctgcccttcctcatttcccactgtgcggggggcaggggtgggaggtctaatctgtttacaaccatttccgtgccatgcttttggttacacgtatctcagtcacgctttctgcctggttggtggatcctcaggcttaccagtggctatttgcaagagcctgtttccagcctccgtcagcctgtcggtgctctgaccctctgaaaccttgctttgctgggcatctccccatattctctctcctgtacatagtgggcagtggtgtgtggttttgaatggcagtgctataaaggatgccagctgtgctttaggcacctgtaggccagagggttgctgcctcaggcataaggttggtatgaaaaggggctgccttagaaaagcaggcacatcccttgttcagaaatggccactgtaggaaagcctgtgaacctcccaccagtggctttaagctgccagccatgccccatttctagaatagcctttgctcttccacacgcaacccttccatcagtgtcttccagcctgcatggggagggcctggctgcccagacacccaccctcacttctcatggccagcctgtgtttgcagatcactgggctgctctgtccccagcttgccccgtgccaggcatggctctgtgagattctgtggaatgcccttcttgacttgtggaaatcattcaccaagtacgatgggatgggattccaagtaaacagtggaccgtcatattgcaaagcaggcccacgcctgggctggccttggttgaggggatggaggaatgttttcgggggtgctttgcagggcagtggtgcagccgcagcgtgaacgctcttggacagctgaaaaccatggcctccttggggatggccagtgctcctggtgtctccacctgcctgggttgtgcaggaggccggctgccagtgcctggggctgggaaacttttttgcttggggcaggcttgggtgagctctcccagatgtgtgcccaccccaccactgcctggaacatccttgttctctgccaggatgcaggggcactgttgcctctgacacagcagtttctgggaactcagaggactgcctttctgaaggctggggagaggctttgagcaaggagcttgtttttgcttaatcgctctagaccatccctgatgcgtagatgtgagaggatgttttctggcacagtgttatgaaaatacaagataaatgatctcagtggaatgtttcatattacccgaaaaaaactggaaatcatcctttgttgtgaacacactgagactaagaattgaagcaatgcagttttaagaagtatttttcctattttttgctgtcaactttttggcaatgccacggcaaagttggtgtttcagcacatgctagagtgagctccggcttcgtgtctttaaccaactccactaatgtttcactgggtagacggagctggcctctatatttagccagaagcctttgcctcttttcaggcatcaaaaatgggttttgtcattgtctttgtctttgagagcagcagtttgaggtctgactccttcagttgtcctgtgagctgggcgttgcagtctgctcgaatcaagtgttggaacccccccacccctcagcccatcgtgaaacgacagctgtcagcctggggggcggctgctgaggaggtgcagcaggaatggggctgggccctgaggttttactttccgagccaatggcccctggaacatgccagcacacactgccatgtcctggggctaagagctgcctttagggacaggctcgtgttgtccagtttgccctgagagatgcacctgaccaggggcccgtcgtggctgcaacccacggtggtatgttagtgtttccaggcagttgtcagcagctgccgggtagtgtgtgtgtgcgacagcaggagagttcctggaggaaagggactggggacactttctcagaggttctcctgcctggaatcaagtgatgcgtgtccagaaggcaagagagggcggctccgcctggttaaagtttgggaacgggacggagccaactcctccttccaggactgtgggccccactcttttgcgctaacacttcccctccctcgggtcactgaggaaagagctgctctgtcccctccagtgccctgaaggtccctggcctccactggctgccatggcagggggcccttctgacaggggctgccccaagctgctgttcctcctctgaaccttcaccccaacacccagcccgtggcccctgcaagggggaccctgccagctgggaaacccaaaggcctgtccaaacgtgcgcaccaggaccgaggggagctccctcccaacacctgctaggaattgccaacttttaaatggatggggttttttatgggttgaacctctgttaatacttttgtacactctcactacagtttatatttttataggctattttctcaaggtgtttctagattccacatatctattttatataacaagttattatgttatgtgtgtgactcccttgtgtgtatctgtgccagcctcagcctccgagttgcttttccctctggccctgactctcactgactcaccgatgtgatgtgcaggcccacttcttaccccagatagcctcgggcactgctgacagctggagacggttctggtttcaactacggtatattgatatcggaagtattctagacagatcctcggttgggttttctagctacatgtttgtattgcacagatccccacctgccatcctatagtgttgtcttcctgtgtgttccggggcttctgggcagctgggcctgcccggggaagtccttgcaggtgggaggccatacagagacccactgtgtgccactgagcgtcccactgctgctgggcaactggaggactgcagggggcgccaggtgactctctccttttatatcacagcagctcctgtgctgaccttcaagttacgttttggaactgtaatactaaaggaagaaataaactactaatttgtataata

SEQ ID NO: 378466 - DNA, 2739 bp, Homo sapiens
cagggggcggccgcggagcccggggcgggtccggcgcgggagccagcgcggctgtgtggctatctgcagaagctgtcgggcaagggccccctgcgtggctaccgcagccgctggttcgtgttcgacgcgcgccgctgctacctttactatttcaagagtccgcaggacgcgctgcccctcggccacttggacatcgcggacgcctgcttcagctaccagggccccgacgaggcggcggagccgggcacggagccgcccgcgcacttccaggtgcacagcgcgggagccgtcacggtgctcaaggctcccaatcgtcaactcatgacttactggttacaggagcttcagcagaagagatgggaatattgtaacagtcttgacatggtcaagtgggacagcaggacctctccaactcccggggattttcctaagggtcttgtagccagagataacactgatttaatttacccacacccaaatgcttctgcagaaaaagccagaaatgtcctagctgtggagactgtgcctggagagctggtgggagaacaagctgcaaatcagcccgccccagggcatccaaattccattaatttttactctttgaaacagtggggcaatgagctcaagaattcgatgtcttctttccgtcctgggagaggacataatgatagtcggaggactgtgttttataccaatgaagagtgggaacttttagacccaacccctaaggacctagaggagtccatagtacaggaagaaaagaagaagctgacccctgaaggaaacaaaggagtaactggctcaggattcccctttgattttggacgtaacccctacaaaggaaagcgccctttgaaagacataattgggtcgtacaaaaatcgtcacagcagtggtgacccttcaagtgaaggcacatcaggcagtggcagcgtcagcatcaggaagccggcctccgaaatgcaactgcaggtccagagccagcaggaagagctggaacagttaaagaaagacctgtccagtcagaaggagcttgttcgactgctccagcagacagtccggtcatcccagtatgacaagtatttcacaagcagccggctctgtgagggggtcccaaaggacacgctcgagcttctgcaccaaaaggatgatcagattctgggccttaccagccagctggagaggttcagcttggagaaggagagtcttcagcaggaagtaaggacgctgaagagcaaagtgggcgagctcaacgagcagctgggaatgctcatggagaccatccaagccaaggacgaggtcatcatcaagctcagcgagggcgagggcaacgggcctcctcccaccgtggcgcccagctccccttcggttgtgcctgttgccagggaccagctggaactggacaggctgaaagataatctacaggggtacaaaacccaaaacaaatttctaaataaggagattttggaactctcagctctacgaagaaatgcagaaaggagagagagggatctgatggcaaagtattctagcctggaagccaagctctgccagatagaaagtaaatacctgatattgctccaagaaatgaagacaccagtgtgctcagaagaccaggggcccacccgggaggtcatagcccagttgctggaggatgctctgcaggttgagagccaagagcagccggagcaagcatttgttaaacctcatcttgtcagtgaatatgatatttatgggttcaggactgtacctgaggatgatgaggaagagaaattggttgccaaggtccgcgcgttggatctgaagactctctacctcacagaaaaccaggaagtctccactggggtcaagtgggaaaactattttgcaagtacagtgaacagggagatgatgtgctctccagagttaaaaaacctcatccgtgcgggcattccccacgagcaccgttccaaggtgtggaagtggtgtgtggaccgtcacaccaggaagttcaaggacaacactgagcctggccacttccagaccttgctgcagaaggcgctggagaaacagaacccagcctccaagcagattgagctggacttgctgcgaactctgcccaacaacaaacattactcctgccccacctcagaaggcatacagaagttacgcaatgtcctcctcgccttctcctggcggaatccagatatcggctactgtcaaggcctaaacaggttggtggcagtggccctcctgtacctggaacaagaagatgctttctggtgtctcgttaccatagtggaagttttcatgcctcgagactattatacaaagactcttttaggatcccaggtagttctgaaaattctgtgttttagtcaccacttttagaattgcagctgaaatgtgacctgaattaaacctgcggtcagggtgaggggttgctttgtgtatgtgacttcagagactgattcctgaagacagcaggccacatctcagaggctgtccccagtcatggcctgctgtttgtgactgaggccgagttgggctcattcagccccctgcgaaccagcagagacagacccgtcctgcaggcctaacattgtgttcactgctctgcactgtcttccccggacacaggcctaccagtgggctgagtcataatccaggtgtgcttgggtgactggtgtgttagctcaggctctcaagaagcaatgtcaggctggaatgagacaaaccagagacttcggcggggggaag

SEQ ID NO: 378467 - DNA, 2097 bp, Homo sapiens
cagggggcggccgcggagcccggggcgggtccggcgcgggagccagcgcggctgtgtggctatctgcagaagctgtcgggcaagggccccctgcgtggctaccgcagccgctggttcgtgttcgacgcgcgccgctgctacctttactatttcaagagtccgcaggacgcgctgcccctcggccacttggacatcgcggacgcctgcttcagctaccagggccccgacgaggcggcggagccgggcacggagccgcccgcgcacttccaggtgcacagcgcgggagccgtcacggtgctcaaggctcccaatcgtcaactcatgacttactggttacaggagcttcagcagaagagatgggaatattgtaacagtcttgacatggtcaagtgggacagcaggacctctccaactcccggggattttcctaagggtcttgtagccagagataacactgatttaatttacccacacccaaatgcttctgcagaaaaagccagaaatgtcctagctgtggagactgtgcctggagagctggtgggagaacaagctgcaaatcagcccgccccagggcatccaaattccattaatttttactctttgaaacagtggggcaatgagctcaagaattcgatgtcttctttccgtcctgggagaggacataatgatagtcggaggactgtgttttataccaatgaagagtgggaacttttagacccaacccctaaggacctagaggagtccatagtacaggaagaaaagaagaagctgacccctgaaggaaacaaaggagtaactggctcaggattcccctttgattttggacgtaacccctacaaaggaaagcgccctttgaaagacataattgggtcgtacaaaaatcgtcacagcagtggtgacccttcaagtgaaggcacatcaggcagtggcagcgtcagcatcaggaagccggcctccgaaatgcaactgcaggtccagagccagcaggaagagctggaacagttaaagaaagacctgtccagtcagaaggagcttgttcgactgctccagcagacagtccggtcatcccagtatgacaagtatttcacaagcagccggctctgtgagggggtcccaaaggacacgctcgagcttctgcaccaaaaggatgatcagattctgggccttaccagccagctggagaggttcagcttggagaaggagagtcttcagcaggaagtaaggacgctgaagagcaaagtgggcgagctcaacgagcagctgggaatgctcatggagaccatccaagccaaggacgaggtcatcatcaagctcagcgagggcgagggcaacgggcctcctcccaccgtggcgcccagctccccttcggttgtgcctgttgccagggaccagctggaactggacaggctgaaagataatctacaggggtacaaaacccaaaacaaatttctaaataaggagattttggaactctcagctctacgaagaaatgcagaaaggagagagagggatctgatggcaaagtattctagcctggaagccaagctctgccagatagaaagtaaatacctgatattgctccaagaaatgaagacaccagtgtgctcagaagaccaggggcccacccgggaggtcatagcccagttgctggaggatgctctgcaggttgagagccaagagcagccggagcaagcatttgttaaacctcatcttgtcagtgaatatgatatttatgggttcaggactgtacctgaggatgatgaggaagagaaattggttgccaaggtccgcgcgttggatctgaagactctctacctcacagaaaaccaggaagtctccactggggtcaagtgggaaaactattttgcaagtacagtgaacagggagatgatgtgctctccagagttaaaaaacctcatccgtgcgggcattccccacgagcaccgttccaaggtgtggaagtggtgtgtggaccgtcacaccagcaaacacaaagacctgcggaccaagggcttcaggctagagtcgtgccgcagcatggtgaacctcatggatcgtgatgggcatgggaagctgggcctggtggagttcaacatt

SEQ ID NO: 378468 - DNA, 445 bp, Homo sapiens
  misc_feature (120)..(120): n is a, c, g, or t
  misc_feature (128)..(128): n is a, c, g, or t
tcctctacactccatatgcacaaggcttttaccatctaatatgggacatacatggaaataaataacaaaaagagtactattacagtttgtgttcaagagttgtctggacactgtggctcncacctgtnaccccagcattttgggaggctggggctggtctcgaactcctgtcctcatgatccaccttcctcagtctccccaaatgctgagattacaggcatgagccactgcacctagcccttttacatgttttctaatgcatatttggattatccattgagagtaatacttttcagaagcttacactctttaaataggcagaaaaccaaaactgaaaatcaaatatatcactagtttggaattaatctagataaatgaagttctgttatctactgtaatcaatttatcacctttgtaagttgcattttggagatttaaaaaaaaa

SEQ ID NO: 378469 - DNA, 831 bp, Homo sapiens
cttaccacacaagaccagggtggagaggtagggggaaaagagggcaggtggtgctcagagtggggtacacagggaagggcaccccaaagctgggctctgcgcccttgagcccctctagatgggtatgcaaggtcaagatcatcctgcagggactagaaagctgtctgggaggagctgtgtttgtgcctgggtgtttgccactacttggggtagtgggtgtgtgtttggagttggagagaagatgatatgtatgaatatctatatttggatgtgagtggttctatggttttgtttccagcgggcattgcctgtgtgtggagagactctatatgtttgtttacgattgtatgtgttttcttgtgttggcatgttctgcatttgtgtgcatcctggtgagagactggaggtggtgtgagggacagggggcatatgcacacttgcgtgtgtctgagtgtgtctggatgctggtgcccccacctacaacatttgtgttctgttcctggaacagcgccatggggcaagcgtggctggaagatgttccacagagaaaacagcaagccgggtttgctcagaacatggggtgtgtgaaagggaggtacacttgaggcaaaattgccagggcctgcatttgggccttattccacaggcagctgaaggcttttgattatggcaccaacatgtccagagtggtgttctcaccagactaatgtgcaagcacagattgattaggctggggcgaccaggatgggactagcattgcttgtgagccgccggcccctaggctgctttttccaggcttagatggatctacacacaagtcagggacaatag

SEQ ID NO: 378470 - DNA, 4869 bp, Homo sapiens
cacattcactgggcaagccgactgtgagccaggaagtgctcttggggagcccaggccaagccatccattcttgggtcctttggagggtagatatggattcccagtttctccagcggccagtgctccccctagtccacacagtgagaccgtgaaagcagatgctccggggcactcctgggcagcttttgctcagtggatgatgggtgactacagactccctgaccacccccagcccatggaaattctcaacctgtacttgggagacagcctggagccccacccaggagagtgcccaagggaaacgtgcagccatgaggatccaccggagcctttcgaggagcaaacctgggccactgaccctcctgaacctaccagacaaaatgttcctccctggggctccggtgtggagctcacacacctggggagctgggtccatcaggacgggctggagccttgccaggagcaaacccgggccactgaccctcctgaatctaccagacaagatgctcctccctggggctccggtgtggagctcacacacctggggagcccctctgcccagagggagcacaggcagaacacagcatcaccagggtcaccagtgaacagccatctaccggggagcccaaagcagaaccggagcacgtccacacaggtagtgttctgggcaggcatcctgcaggcccagatgtgtgtcctagacctggaggaggagctggagaagacggaagggctcaaggctgggctgaaatgctgtctccccacgccccctgtggacctccccggggacacgggcctgcactccagcccacctgagaatgaagactcaggggaagacagcagcgagcctgagggagagggccaggcatggctgagagagggaaccccagactcttccccacagtggggagctgaggaggagagcatgttcttcagcaaccccctcttcctggcgagtccttgctcagagaacagtgcttctggagagtgcttttcctggggggcttcagactcccatgcaggtgtgaggactggacctgagagcccagcgactctggagcctcccctcccagaagacacagtgctgtgggagctggaaagtgagccagatttgggggacggcgctgctatcagtgggcattgtacccctccattccctgtgcccatctataaaccacactccatctgctgggcctcagtggctgccgctgagggggctcctgcagcacctcctggtcacggggagagtgagggagataggcttggtcctgctccatctgcagcaccgtgtgtggacgaagcattgacctgggaatcaggatgtgtcggatctgatcttggccctgctgcacatcctgtgcaaccttgggcctctctcagccctgagggctggcagagaggaggtcctttttggccccaggtgactcttaactcccaggacagagatgagagggagggtgggcacccccaggaatctcttccctgcaccttggccccctgcccctggaggagcccagcttcttctccagagcctagcagcccagaatctgagagcagaggccctggtcccaggcccagccctgcatcgtcccaggagggcagcccgcagcttcaacaccacagctcaggcattttgcccaagtggacactagatgcttcacagtcttcactcttggagacggatggggaacagccaagttccttgaagaaaaaggaggcaggggaggccccaaaaccaggcgaggaagtaaagagtgaaggaacagccaggcctgcagagactggagacgtccagcctgacattcacctgacttctgcagaacatgagaatctgaggacaccgatgaactcttcttggcttcctgggagccctatgccccaagcacagtccccagaggaaggccagagaccaccagctggagacaagctagctaatggcgtcaggaacaacaaggtagcctggaacttggcctcacgcctctatcgcctggagggcttccggaagtctgaagtggctgcctacctgcagaagaacaatgactttagcagggctgtggctgaggagtacctgtccttcttccagtttggaggccagagtctggaccgagccctccggagcttcctccaggccttggtgctcagtggggagactcaggaacgggagcgaatcctctaccagttctccagacgcttccaccattgcaatccggggatcttcccctcagtagattctgtacacaccttgacatgtgcaatcatgctgcttaacacggacctgcatggacagaacattgggaagagcatgagctgccaggaattcataaccaacctgaatgggctgagggatggcgggaacttccccaaggagctgctgaaggccctctactggtctatccgcagcgagaagctcgagtgggccgtggatgaagaagacacagccagacctgagaaggcccagccgtccctgccagctggcaagatgagcaagcccttccttcagctggctcaggatcccacagtgcccacctacaagcagggcatcctggctcggaaaatgcatcaagatgcagacggcaagaagacgccatggggcaagcgtggctggaagatgttccacaccttactgcgagggatggttctctacttcctgaagcagggagaagaccactgtctggagggggagagcttggtggggcagatggtggatgagcccgtgggggtgcaccactcgctggccacccccgccacgcattacaccaagaagccgcacgtcttccagctgcgcacggctgactggcgcctctacctcttccaggcacccactgccaaggagatgagctcctggatcgcgcgcatcaacttggctgcggccacgcactccgcgccgcccttccccgccgctgtgggctcccagcgcagattcgtgcggcccatcctgcccgtgggccccgcccagagctccctggaggagcagcatcgatcccacgagaactgcctggacgctgccgcggacgacctgctggatctacagaggaacctgccggagcggcggggccgtggccgcgagctggaggagcaccgcctgcggaaggagtacctggagtacgagaaaacccgctacgagacctacgtgcagctgctggtggcccgcctgcactgcccctctgatgctctggacctgtgggaggagcagctggggagggaagctggaggcactcgggagcccaagctcagcctgaagaagtcccactcgagcccgtccctgcaccaggatgaggctcccaccacggccaaggtgaagcgcaacatctcagagcgcagaacctaccggaagatcatccctaagcggaaccgcaatcagctgtgaagccagcaccacctcagagacactgttccctgctccagggtagacctgagatgaacctccctggaggagacttatttcaatgagtccaccatgacggatgaggcacctcctttccctgctgaaggacaaaccttgtttccctgtggccctcattcttgtgctccctgaagctttcctaatattgctgtgctccccaccacccccatggcagtccctccgcagccccagtccctggccacgcccaagggaagagggaggtgaggacttgactttcctcccagagctcagcccatgtcaccctccaggccccagaatccagagtggcctcatttcctagacttgctgagaactcagcacttgtttgagaaccagtgcttatgtggtgtgcccttggcttctgggggagagcttggggcagcagaggcccctgggcagcccagccaggggagccacagccccgaggatggtcttgctctgggaattaggtgaccttcctggggaggccccaggagagtgaatcagggactcttgagaaattcctaaccagcctcctgtgacccagggagcagggtcgctaaggtcctgcccactgaggggacagccttctgggcagggacctcggggggcttcaagggctctgcacggctgtggggccctgtgcctttgtctccttgtgtctcctttcccccgaagtagatgaaacagtctcacatacccaactgctcatcaacagagcagagctgatggcatgagtgagggctgggcggggtggggcctccagagctttgcagggaaccctggaaccctaggaacaaggagcctttgttccaacagagcagagaaggaggttctctatgttcagaccactggagaggatagagaggtaaaaggtggcgacagtttcccttaggggtctgcctggcaggagccacagctcaggagagttgtgagggatgggacggaggctggcgaccaggcgaggcctaggccaggctcgggagacttttctgtgctcctttctacacatgccttaaaccttccttcctgtggggtgcctggaccccttccccatctctggcagctcagagggtctctgctgctctcccctgggaaatcccctcatcctgccctctggctgcctcccagctgggcttgttctctgagggaggttccggagactcatggacttggggctctgcctgtaggaaggaggctgggccggagggaccagccaccattgtctctgttcagccaagtgtgcaagtaggctgcccgccaagagggggcctctgctacccgctgctgcctgccggctgacacactgcctccccagccttcctgctaggccaccctcctcccttcccatgcttgtaaccagctctggggcttgcacctccacaaagtaaggttggcccttggaggccatgtttgggtctccggccagggcctagggctaggccatgcacccaatgggtgcacaataaataacaggtcaacaaaga

SEQ ID NO: 378471 - DNA, 5070 bp, Homo sapiens
gcagtactccccggtctaggtacgaggctgggtgtttacagacaaaatgttcctccctggggctccggtgtggagctcacacacctggggagctgggtccatcaggacgggctggagccttgccaggagcaaacccgggccactgaccctcctgaatctaccagacaagatgctcctccctggggctccggtgtggagctcacacacctggggagcccctctgcccagagggagcacaggcagaacacagcatcaccagggtcaccagtgaacagccatctaccggggagcccaaagcagaaccggagcacgtccacacaggtagtgttctgggcaggcatcctgcaggcccagatgtgtgtcctagacctggaggaggagctggagaagacggaagggctcaaggctgggctgaaatgctgtctccccacgccccctgtggacctccccggggacacgggcctgcactccagcccacctgagaatgaagactcaggggaagacagcagcgagcctgagggagagggccaggcatggctgagagagggaaccccagactcttccccacagtggggagctgaggaggagagcatgttcttcagcaaccccctcttcctggcgagtccttgctcagagaacagtgcttctggagagtgcttttcctggggggcttcagactcccatgcaggtgtgaggactggacctgagagcccagcgactctggagcctcccctcccagaagacacagtgctgtgggagctggaaagtgagccagatttgggggacggcgctgctatcagtgggcattgtacccctccattccctgtgcccatctataaaccacactccatctgctgggcctcagtggctgccgctgagggggctcctgcagcacctcctggtcacggggagagtgagggagataggcttggtcctgctccatctgcagcaccgtgtgtggacgaagcattgacctgggaatcaggatgtgtcggatctgatcttggccctgctgcacatcctgtgcaaccttgggcctctctcagccctgagggctggcagagaggaggtcctttttggccccaggtgactcttaactcccaggacagagcaaaggtcctgagcccttagttgcctggaggcttgagtcctgggagcccgctgtctgctgcctctgcaagtgggagaggtcactgcccgagggaggacagggcatgctgccaggctccaggggaggagccccagggagggagcctctggaggtggtgcccaggccgttctcctgcctcctgccctgtgcccgcctcacttcatgttcttcctcagatgagagggagggtgggcacccccaggaatctcttccctgcaccttggccccctgcccctggaggagcccagcttcttctccagagcctagcagcccagaatctgagagcagaggccctggtcccaggcccagccctgcatcgtcccaggagggcagcccgcagcttcaacaccacagctcaggcattttgcccaagtggacactagatgcttcacagtcttcactcttggagacggatggggaacagccaagttccttgaagaaaaaggaggcaggggaggccccaaaaccaggcgaggaagtaaagagtgaaggaacagccaggcctgcagagactggagacgtccagcctgacattcacctgacttctgcagaacatgagaatctgaggacaccgatgaactcttcttggcttcctgggagccctatgccccaagcacagtccccagaggaaggccagagaccaccagctggagacaagctagctaatggcgtcaggaacaacaaggtagcctggaacttggcctcacgcctctatcgcctggagggcttccggaagtctgaagtggctgcctacctgcagaagaacaatgactttagcagggctgtggctgaggagtacctgtccttcttccagtttggaggccagagtctggaccgagccctccggagcttcctccaggccttggtgctcagtggggagactcaggaacgggagcgaatcctctaccagttctccagacgcttccaccattgcaatccggggatcttcccctcagtagattctgtacacaccttgacatgtgcaatcatgctgcttaacacggacctgcatggacagaacattgggaagagcatgagctgccaggaattcataaccaacctgaatgggctgagggatggcgggaacttccccaaggagctgctgaaggccctctactggtctatccgcagcgagaagctcgagtgggccgtggatgaagaagacacagccagacctgagaaggcccagccgtccctgccagctggcaagatgagcaagcccttccttcagctggctcaggatcccacagtgcccacctacaagcagggcatcctggctcggaaaatgcatcaagatgcagacggcaagaagacgccatggggcaagcgtggctggaagatgttccacaccttactgcgagggatggttctctacttcctgaagcagggagaagaccactgtctggagggggagagcttggtggggcagatggtggatgagcccgtgggggtgcaccactcgctggccacccccgccacgcattacaccaagaagccgcacgtcttccagctgcgcacggctgactggcgcctctacctcttccaggcacccactgccaaggagatgagctcctggatcgcgcgcatcaacttggctgcggccacgcactccgcgccgcccttccccgccgctgtgggctcccagcgcagattcgtgcggcccatcctgcccgtgggccccgcccagagctccctggaggagcagcatcgatcccacgagaactgcctggacgctgccgcggacgacctgctggatctacagaggaacctgccggagcggcggggccgtggccgcgagctggaggagcaccgcctgcggaaggagtacctggagtacgagaaaacccgctacgagacctacgtgcagctgctggtggcccgcctgcactgcccctctgatgctctggacctgtgggaggagcagctggggagggaagctggaggcactcgggagcccaagctcagcctgaagaagtcccactcgagcccgtccctgcaccaggatgaggctcccaccacggccaaggtgaagcgcaacatctcagagcgcagaacctaccggaagatcatccctaagcggaaccgcaatcagctgtgaagccagcaccacctcagagacactgttccctgctccagggtagacctgagatgaacctccctggaggagacttatttcaatgagtccaccatgacggatgaggcacctcctttccctgctgaaggacaaaccttgtttccctgtggccctcattcttgtgctccctgaagctttcctaatattgctgtgctccccaccacccccatggcagtccctccgcagccccagtccctggccacgcccaagggaagagggaggtgaggacttgactttcctcccagagctcagcccatgtcaccctccaggccccagaatccagagtggcctcatttcctagacttgctgagaactcagcacttgtttgagaaccagtgcttatgtggtgtgcccttggcttctgggggagagcttggggcagcagaggcccctgggcagcccagccaggggagccacagccccgaggatggtcttgctctgggaattaggtgaccttcctggggaggccccaggagagtgaatcagggactcttgagaaattcctaaccagcctcctgtgacccagggagcagggtcgctaaggtcctgcccactgaggggacagccttctgggcagggacctcggggggcttcaagggctctgcacggctgtggggccctgtgcctttgtctccttgtgtctcctttcccccgaagtagatgaaacagtctcacatacccaactgctcatcaacagagcagagctgatggcatgagtgagggctgggcggggtggggcctccagagctttgcagggaaccctggaaccctaggaacaaggagcctttgttccaacagagcagagaaggaggttctctatgttcagaccactggagaggatagagaggtaaaaggtggcgacagtttcccttaggggtctgcctggcaggagccacagctcaggagagttgtgagggatgggacggaggctggcgaccaggcgaggcctaggccaggctcgggagacttttctgtgctcctttctacacatgccttaaaccttccttcctgtggggtgcctggaccccttccccatctctggcagctcagagggtctctgctgctctcccctgggaaatcccctcatcctgccctctggctgcctcccagctgggcttgttctctgagggaggttccggagactcatggacttggggctctgcctgtaggaaggaggctgggccggagggaccagccaccattgtctctgttcagccaagtgtgcaagtaggctgcccgccaagagggggcctctgctacccgctgctgcctgccggctgacacactgcctccccagccttcctgctaggccaccctcctcccttcccatgcttgtaaccagctctggggcttgcacctccacaaagtaaggttggcccttggaggccatgtttgggtctccggccagggcctagggctaggccatgcacccaatgggtgcacaataaataacaggtcaacaaagagggaggtgtgtcagtgtgtgaggaagggaggtcaggcagctaggaccacctgcagtgtggcaggcttcatccctctttgctccaagtgtgtatgtgtgtctgtgcatgtgtgtagtgtctgtgtctgtgtgttcatgcatatgcaggagtcacacggtcataggccatcaaagctggaggagacctcagaatcattcattcacctacttgctcatttattcattcattcattttgcagataatatgggacgctttctatgtgccagtaccaggggattcacaaatgaattaaacatgtccctgactccatgagttgaaaa

SEQ ID NO: 378472 - DNA, 4592 bp, Homo sapiens
gcagtactccccggtctaggtacgaggctgggtgtttacagacaaaatgttcctccctggggctccggtgtggagctcacacacctggggagctgggtccatcaggacgggctggagccttgccaggagcaaacccgggccactgaccctcctgaatctaccagacaagatgctcctccctggggctccggtgtggagctcacacacctggggagcccctctgcccagagggagcacaggcagaacacagcatcaccagggtcaccagtgaacagccatctaccggggagcccaaagcagaaccggagcacgtccacacaggtagtgttctgggcaggcatcctgcaggcccagatgtgtgtcctagacctggaggaggagctggagaagacggaagggctcaaggctgggctgaaatgctgtctccccacgccccctgtggacctccccggggacacgggcctgcactccagcccacctgagaatgaagactcaggggaagacagcagcgagcctgagggagagggccaggcatggctgagagagggaaccccagactcttccccacagtggggagctgaggaggagagcatgttcttcagcaaccccctcttcctggcgagtccttgctcagagaacagtgcttctggagagtgcttttcctggggggcttcagactcccatgcaggtgtgaggactggacctgagagcccagcgactctggagcctcccctcccagaagacacagtgctgtgggagctggaaagtgagccagatttgggggacggcgctgctatcagtgggcattgtacccctccattccctgtgcccatctataaaccacactccatctgctgggcctcagtggctgccgctgagggggctcctgcagcacctcctggtcacggggagagtgagggagataggcttggtcctgctccatctgcagcaccgtgtgtggacgaagcattgacctgggaatcaggatgtgtcggatctgatcttggccctgctgcacatcctgtgcaaccttgggcctctctcagccctgagggctggcagagaggaggtcctttttggccccaggtgactcttaactcccaggacagagcaaaggtcctgagcccttagttgcctggaggcttgagtcctgggagcccgctgtctgctgcctctgcaagtgggagaggtcactgcccgagggaggacagggcatgctgccaggctccaggggaggagccccagggagggagcctctggaggtggtgcccaggccgttctcctgcctcctgccctgtgcccgcctcacttcatgttcttcctcagatgagagggagggtgggcacccccaggaatctcttccctgcaccttggccccctgcccctggaggagcccagcttcttctccagagcctagcagcccagaatctgagagcagaggccctggtcccaggcccagccctgcatcgtcccaggagggcagcccgcagcttcaacaccacagctcaggcattttgcccaagtggacactagatgcttcacagtcttcactcttggagacggatggggaacagccaagttccttgaagaaaaaggaggcaggggaggccccaaaaccaggcgaggaagtaaagagtgaaggaacagccaggcctgcagagactggagacgtccagcctgacattcacctgacttctgcagaacatgagaatctgaggacaccgatgaactcttcttggcttcctgggagccctatgccccaagcacagtccccagaggaaggccagagaccaccagctggagacaagctagctaatggcgtcaggaacaacaaggtagcctggaacttggcctcacgcctctatcgcctggagggcttccggaagtctgaagtggctgcctacctgcagaagaacaatgactttagcagggctgtggctgaggagtacctgtccttcttccagtttggaggccagagtctggaccgagccctccggagcttcctccaggccttggtgctcagtggggagactcaggaacgggagcgaatcctctaccagttctccagacgcttccaccattgcaatccggggatcttcccctcagtagattctgtacacaccttgacatgtgcaatcatgctgcttaacacggacctgcatggacagaacattgggaagagcatgagctgccaggaattcataaccaacctgaatgggctgagggatggcgggaacttccccaaggagctgctgaaggccctctactggtctatccgcagcgagaagctcgagtgggccgtggatgaagaagacacagccagacctgagaaggcccagccgtccctgccagctggcaagatgagcaagcccttccttcagctggctcaggatcccacagtgcccacctacaagcagggcatcctggctcggaaaatgcatcaagatgcagacggcaagaagacgccatggggcaagcgtggctggaagatgttccacaccttactgcgagggatggttctctacttcctgaagcagggagaagaccactgtctggagggggagagcttggtggggcagatggtggatgagcccgtgggggtgcaccactcgctggccacccccgccacgcattacaccaagaagccgcacgtcttccagctgcgcacggctgactggcgcctctacctcttccaggcacccactgccaaggagatgagctcctggatcgcgcgcatcaacttggctgcggccacgcactccgcgccgcccttccccgccgctgtgggctcccagcgcagattcgtgcggcccatcctgcccgtgggccccgcccagagctccctggaggagcagcatcgatcccacgagaactgcctggacgctgccgcggacgacctgctggatctacagaggaacctgccggagcggcggggccgtggccgcgagctggaggagcaccgcctgcggaaggagtacctggagtacgagaaaacccgctacgagacctacgtgcagctgctggtggcccgcctgcactgcccctctgatgctctggacctgtgggaggagcagctggggagggaagctggaggcactcgggagcccaagctcagcctgaagaagtcccactcgagcccgtccctgcaccaggatgaggctcccaccacggccaaggtgaagcgcaacatctcagagcgcagaacctaccggaagatcatccctaagcggaaccgcaatcagctgtgaagccagcaccacctcagagacactgttccctgctccagggtagacctgagatgaacctccctggaggagacttatttcaatgagtccaccatgacggatgaggcacctcctttccctgctgaaggacaaaccttgtttccctgtggccctcattcttgtgctccctgaagctttcctaatattgctgtgctccccaccacccccatggcagtccctccgcagccccagtccctggccacgcccaagggaagagggaggtgaggacttgactttcctcccagagctcagcccatgtcaccctccaggccccagaatccagagtggcctcatttcctagacttgctgagaactcagcacttgtttgagaaccagtgcttatgtggtgtgcccttggcttctgggggagagcttggggcagcagaggcccctgggcagcccagccaggggagccacagccccgaggatggtcttgctctgggaattaggtgaccttcctggggaggccccaggagagtgaatcagggactcttgagaaattcctaaccagcctcctgtgacccagggagcagggtcgctaaggtcctgcccactgaggggacagccttctgggcagggacctcggggggcttcaagggctctgcacggctgtggggccctgtgcctttgtctccttgtgtctcctttcccccgaagtagatgaaacagtctcacatacccaactgctcatcaacagagcagagctgatggcatgagtgagggctgggcggggtggggcctccagagctttgcagggaaccctggaaccctaggaacaaggagcctttgttccaacagagcagagaaggaggttctctatgttcagaccactggagaggatagagaggtaaaaggtggcgacagtttcccttaggggtctgcctggcaggagccacagctcaggagagttgtgagggatgggacggaggctggcgaccaggcgaggcctaggccaggctcgggagacttttctgtgctcctttctacacatgccttaaaccttccttcctgtggggtgcctggaccccttccccatctctggcagctcagagggtctctgctgctctcccctgggaaatcccctcatcctgccctctggctgcctcccagctgggcttgttctctgagggaggttccggagactcatggacttgggcctcctcccttcccatgcttgtaaccagctctggggcttgcacctccacaaagtaaggttggcccttggaggccatgtttgggtctccggccagggcctagggctaggccatgcacccaatgggtgcacaataaataacaggtcaacaaaga

SEQ ID NO: 378473 - DNA, 2795 bp, Homo sapiens
cttaccacacaagaccagggtggagaggtagggggaaaagagggcaggtggtgctcagagtggggtacacagggaagggcaccccaaagctgggctctgcgcccttgagcccctctagatgggtatgcaaggtcaagatcatcctgcagggactagaaagctgtctgggaggagctgtgtttgtgcctgggtgtttgccactacttggggtagtgggtgtgtgtttggagttggagagaagatgatatgtatgaatatctatatttggatgtgagtggttctatggttttgtttccagcgggcattgcctgtgtgtggagagactctatatgtttgtttacgattgtatgtgttttcttgtgttggcatgttctgcatttgtgtgcatcctggtgagagactggaggtggtgtgagggacagggggcatatgcacacttgcgtgtgtctgagtgtgtctggatgctggtgcccccacctacaacatttgtgttctgttcctggaacagcgccatggggcaagcgtggctggaagatgttccacaccttactgcgagggatggttctctacttcctgaagcagggagaagaccactgtctggagggggagagcttggtggggcagatggtggatgagcccgtgggggtgcaccactcgctggccacccccgccacgcattacaccaagaagccgcacgtcttccagctgcgcacggctgactggcgcctctacctcttccaggcacccactgccaaggagatgagctcctggatcgcgcgcatcaacttggctgcggccacgcactccgcgccgcccttccccgccgctgtgggctcccagcgcagattcgtgcggcccatcctgcccgtgggccccgcccagagctccctggaggagcagcatcgatcccacgagaactgcctggacgctgccgcggacgacctgctggatctacagaggaacctgccggagcggcggggccgtggccgcgagctggaggagcaccgcctgcggaaggagtacctggagtacgagaaaacccgctacgagacctacgtgcagctgctggtggcccgcctgcactgcccctctgatgctctggacctgtgggaggagcagctggggagggaagctggaggcactcgggagcccaagctcagcctgaagaagtcccactcgagcccgtccctgcaccaggatgaggctcccaccacggccaaggtgaagcgcaacatctcagagcgcagaacctaccggaagatcatccctaagcggaaccgcaatcagctgtgaagccagcaccacctcagagacactgttccctgctccagggtagacctgagatgaacctccctggaggagacttatttcaatgagtccaccatgacggatgaggcacctcctttccctgctgaaggacaaaccttgtttccctgtggccctcattcttgtgctccctgaagctttcctaatattgctgtgctccccaccacccccatggcagtccctccgcagccccagtccctggccacgcccaagggaagagggaggtgaggacttgactttcctcccagagctcagcccatgtcaccctccaggccccagaatccagagtggcctcatttcctagacttgctgagaactcagcacttgtttgagaaccagtgcttatgtggtgtgcccttggcttctgggggagagcttggggcagcagaggcccctgggcagcccagccaggggagccacagccccgaggatggtcttgctctgggaattaggtgaccttcctggggaggccccaggagagtgaatcagggactcttgagaaattcctaaccagcctcctgtgacccagggagcagggtcgctaaggtcctgcccactgaggggacagccttctgggcagggacctcggggggcttcaagggctctgcacggctgtggggccctgtgcctttgtctccttgtgtctcctttcccccgaagtagatgaaacagtctcacatacccaactgctcatcaacagagcagagctgatggcatgagtgagggctgggcggggtggggcctccagagctttgcagggaaccctggaaccctaggaacaaggagcctttgttccaacagagcagagaaggaggttctctatgttcagaccactggagaggatagagaggtaaaaggtggcgacagtttcccttaggggtctgcctggcaggagccacagctcaggagagttgtgagggatgggacggaggctggcgaccaggcgaggcctaggccaggctcgggagacttttctgtgctcctttctacacatgccttaaaccttccttcctgtggggtgcctggaccccttccccatctctggcagctcagagggtctctgctgctctcccctgggaaatcccctcatcctgccctctggctgcctcccagctgggcttgttctctgagggaggttccggagactcatggacttggggctctgcctgtaggaaggaggctgggccggagggaccagccaccattgtctctgttcagccaagtgtgcaagtaggctgcccgccaagagggggcctctgctacccgctgctgcctgccggctgacacactgcctccccagccttcctgctaggccaccctcctcccttcccatgcttgtaaccagctctggggcttgcacctccacaaagtaaggttggcccttggaggccatgtttgggtctccggccagggcctagggctaggccatgcacccaatgggtgcacaataaataacaggtcaacaaaga

SEQ ID NO: 378474 - DNA, 2023 bp, Homo sapiens
ggaggcgggctgcgcacttggcctgggaaccgaggcggccaggggggcggcgcgcccgggcccggaaagcggcggaggggacgcccgggacagcgcccctcaccgcccgctgctcgcaggaggagcagcatcgatcccacgagaactgcctggacgctgccgcggacgacctgctggatctacagaggaacctgccggagcggcggggccgtggccgcgagctggaggagcaccgcctgcggaaggagtacctggagtacgagaaaacccgctacgagacctacgtgcagctgctggtggcccgcctgcactgcccctctgatgctctggacctgtgggaggagcagctggggagggaagctggaggcactcgggagcccaagctcagcctgaagaagtcccactcgagcccgtccctgcaccaggatgaggctcccaccacggccaaggtgaagcgcaacatctcagagcgcagaacctaccggaagatcatccctaagcggaaccgcaatcagctgtgaagccagcaccacctcagagacactgttccctgctccagggtagacctgagatgaacctccctggaggagacttatttcaatgagtccaccatgacggatgaggcacctcctttccctgctgaaggacaaaccttgtttccctgtggccctcattcttgtgctccctgaagctttcctaatattgctgtgctccccaccacccccatggcagtccctccgcagccccagtccctggccacgcccaagggaagagggaggtgaggacttgactttcctcccagagctcagcccatgtcaccctccaggccccagaatccagagtggcctcatttcctagacttgctgagaactcagcacttgtttgagaaccagtgcttatgtggtgtgcccttggcttctgggggagagcttggggcagcagaggcccctgggcagcccagccaggggagccacagccccgaggatggtcttgctctgggaattaggtgaccttcctggggaggccccaggagagtgaatcagggactcttgagaaattcctaaccagcctcctgtgacccagggagcagggtcgctaaggtcctgcccactgaggggacagccttctgggcagggacctcggggggcttcaagggctctgcacggctgtggggccctgtgcctttgtctccttgtgtctcctttcccccgaagtagatgaaacagtctcacatacccaactgctcatcaacagagcagagctgatggcatgagtgagggctgggcggggtggggcctccagagctttgcagggaaccctggaaccctaggaacaaggagcctttgttccaacagagcagagaaggaggttctctatgttcagaccactggagaggatagagaggtaaaaggtggcgacagtttcccttaggggtctgcctggcaggagccacagctcaggagagttgtgagggatgggacggaggctggcgaccaggcgaggcctaggccaggctcgggagacttttctgtgctcctttctacacatgccttaaaccttccttcctgtggggtgcctggaccccttccccatctctggcagctcagagggtctctgctgctctcccctgggaaatcccctcatcctgccctctggctgcctcccagctgggcttgttctctgagggaggttccggagactcatggacttggggctctgcctgtaggaaggaggctgggccggagggaccagccaccattgtctctgttcagccaagtgtgcaagtaggctgcccgccaagagggggcctctgctacccgctgctgcctgccggctgacacactgcctccccagccttcctgctaggccaccctcctcccttcccatgcttgtaaccagctctggggcttgcacctccacaaagtaaggttggcccttggaggccatgtttgggtctccggccagggcctagggctaggccatgcacccaatgggtgcacaataaataacaggtcaacaaaga

SEQ ID NO: 378475 - DNA, 1223 bp, Homo sapiens
gcagtactccccggtctaggtacgaggctgggtgtttacagacaaaatgttcctccctggggctccggtgtggagctcacacacctggggagctgggtccatcaggacgggctggagccttgccaggagcaaacccgggccactgaccctcctgaatctaccagacaagatgctcctccctggggctccggtgtggagctcacacacctggggagcccctctgcccagagggagcacaggcagaacacagcatcaccagggtcaccagtgaacagccatctaccggggagcccaaagcagaaccggagcacgtccacacaggtagtgttctgggcaggcatcctgcaggcccagatgtgtgtcctagacctggaggaggagctggagaagacggaagggctcaaggctgggctgaaatgctgtctccccacgccccctgtggacctccccggggacacgggcctgcactccagcccacctgagaatgaagactcaggggaagacagcagcgagcctgagggagagggccaggcatggctgagagagggaaccccagactcttccccacagtggggagctgaggaggagagcatgttcttcagcaaccccctcttcctggcgagtccttgctcagagaacagtgcttctggagagtgcttttcctggggggcttcagactcccatgcaggtgtgaggactggacctgagagcccagcgactctggagcctcccctcccagaagacacagtgctgtgggagctggaaagtgagccagatttgggggacggcgctgctatcagtgggcattgtacccctccattccctgtgcccatctataaaccacactccatctgctgggcctcagtggctgccgctgagggggctcctgcagcacctcctggtcacggggagagtgagggagataggcttggtcctgctccatctgcagcaccgtgtgtggacgaagcattgacctgggaatcaggatgtgtcggatctgatcttggccctgctgcacatcctgtgcaaccttgggcctctctcagccctgagggctggcagagaggaggtcctttttggccccaggtgactcttaactcccaggacagaggtgagccctaataagggggtttgggaaattgggtcctgggaggatttggaatttggagtggggacaaagatcattcttggatccatggttgccattaatgggtcccattata

SEQ ID NO: 378476 - DNA, 400 bp, Homo sapiens
cattgggaagagcatgagctgccaggaattcataaccaacctgaatgggctgagggatggcgggaacttccccaaggagctgctgaaggtatgtgccacggggtcttcttatgagcctcatgtaggacctggagccttggttctttgttccaagggagatgctgagcttgggactggctttgccaaaatatccttgagagaacaggacttgtttattgaagggctagtaaaagtgtattccctggcgggcagcatcagaagcatcttggaatttgttatccatgcaaatctgcaggctccctgtgctggacttattgaatcagactctctgagactgggacccctaaaatattttcttaagttttcaagtcattcttaccccttcaaagtctgagaaggg

SEQ ID NO: 378477 - DNA, 4750 bp, Homo sapiens
gcagtactccccggtctaggtacgaggctgggtgtttacagacaaaatgttcctccctggggctccggtgtggagctcacacacctggggagctgggtccatcaggacgggctggagccttgccaggagcaaacccgggccactgaccctcctgaatctaccagacaagatgctcctccctggggctccggtgtggagctcacacacctggggagcccctctgcccagagggagcacaggcagaacacagcatcaccagggtcaccagtgaacagccatctaccggggagcccaaagcagaaccggagcacgtccacacaggtagtgttctgggcaggcatcctgcaggcccagatgtgtgtcctagacctggaggaggagctggagaagacggaagggctcaaggctgggctgaaatgctgtctccccacgccccctgtggacctccccggggacacgggcctgcactccagcccacctgagaatgaagactcaggggaagacagcagcgagcctgagggagagggccaggcatggctgagagagggaaccccagactcttccccacagtggggagctgaggaggagagcatgttcttcagcaaccccctcttcctggcgagtccttgctcagagaacagtgcttctggagagtgcttttcctggggggcttcagactcccatgcaggtgtgaggactggacctgagagcccagcgactctggagcctcccctcccagaagacacagtgctgtgggagctggaaagtgagccagatttgggggacggcgctgctatcagtgggcattgtacccctccattccctgtgcccatctataaaccacactccatctgctgggcctcagtggctgccgctgagggggctcctgcagcacctcctggtcacggggagagtgagggagataggcttggtcctgctccatctgcagcaccgtgtgtggacgaagcattgacctgggaatcaggatgtgtcggatctgatcttggccctgctgcacatcctgtgcaaccttgggcctctctcagccctgagggctggcagagaggaggtcctttttggccccaggtgactcttaactcccaggacagagcaaaggtcctgagcccttagttgcctggaggcttgagtcctgggagcccgctgtctgctgcctctgcaagtgggagaggtcactgcccgagggaggacagggcatgctgccaggctccaggggaggagccccagggagggagcctctggaggtggtgcccaggccgttctcctgcctcctgccctgtgcccgcctcacttcatgttcttcctcagatgagagggagggtgggcacccccaggaatctcttccctgcaccttggccccctgcccctggaggagcccagcttcttctccagagcctagcagcccagaatctgagagcagaggccctggtcccaggcccagccctgcatcgtcccaggagggcagcccgcagcttcaacaccacagctcaggcattttgcccaagtggacactagatgcttcacagtcttcactcttggagacggatggggaacagccaagttccttgaagaaaaaggaggcaggggaggccccaaaaccaggcgaggaagtaaagagtgaaggaacagccaggcctgcagagactggagacgtccagcctgacattcacctgacttctgcagaacatgagaatctgaggacaccgatgaactcttcttggcttcctgggagccctatgccccaagcacagtccccagaggaaggccagagaccaccagctggagacaagctagctaatggcgtcaggaacaacaaggtagcctggaacttggcctcacgcctctatcgcctggagggcttccggaagtctgaagtggctgcctacctgcagaagaacaatgactttagcagggctgtggctgaggagtacctgtccttcttccagtttggaggccagagtctggaccgagccctccggagcttcctccaggccttggtgctcagtggggagactcaggaacgggagcgaatcctctaccagttctccagacgcttccaccattgcaatccggggatcttcccctcagtagattctgtacacaccttgacatgtgcaatcatgctgcttaacacggacctgcatggacagaacattgggaagagcatgagctgccaggaattcataaccaacctgaatgggctgagggatggcgggaacttccccaaggagctgctgaaggccctctactggtctatccgcagcgagaagctcgagtgggccgtggatgaagaagacacagccagacctgagaaggcccagccgtccctgccagctggcaagatgagcaagcccttccttcagctggctcaggatcccacagtgcccacctacaagcagggcatcctggctcggaaaatgcatcaagatgcagacggcaagaagacgccatggggcaagcgtggctggaagatgttccacaccttactgcgagggatggttctctacttcctgaagcagggagaagaccactgtctggagggggagagcttggtggggcagatggtggatgagcccgtgggggtgcaccactcgctggccacccccgccacgcattacaccaagaagccgcacgtcttccagctgcgcacggctgactggcgcctctacctcttccaggcacccactgccaaggagatgagctcctggatcgcgcgcatcaacttggctgcggccacgcactccgcgccgcccttccccgccgctgtgggctcccagcgcagattcgtgcggcccatcctgcccgtgggccccgcccagagctccctggaggagcagcatcgatcccacgagaactgcctggacgctgccgcggacgacctgctggatctacagaggaacctgccggagcggcggggccgtggccgcgagctggaggagcaccgcctgcggaaggagtacctggagtacgagaaaacccgctacgagacctacgtgcagctgctggtggcccgcctgcactgcccctctgatgctctggacctgtgggaggagcagctggggagggaagctggaggcactcgggagcccaagctcagcctgaagaagtcccactcgagcccgtccctgcaccaggatgaggctcccaccacggccaaggtgaagcgcaacatctcagagcgcagaacctaccggaagatcatccctaagcggaaccgcaatcagctgtgaagccagcaccacctcagagacactgttccctgctccagggtagacctgagatgaacctccctggaggagacttatttcaatgagtccaccatgacggatgaggcacctcctttccctgctgaaggacaaaccttgtttccctgtggccctcattcttgtgctccctgaagctttcctaatattgctgtgctccccaccacccccatggcagtccctccgcagccccagtccctggccacgcccaagggaagagggaggtgaggacttgactttcctcccagagctcagcccatgtcaccctccaggccccagaatccagagtggcctcatttcctagacttgctgagaactcagcacttgtttgagaaccagtgcttatgtggtgtgcccttggcttctgggggagagcttggggcagcagaggcccctgggcagcccagccaggggagccacagccccgaggatggtcttgctctgggaattaggtgaccttcctggggaggccccaggagagtgaatcagggactcttgagaaattcctaaccagcctcctgtgacccagggagcagggtcgctaaggtcctgcccactgaggggacagccttctgggcagggacctcggggggcttcaagggctctgcacggctgtggggccctgtgcctttgtctccttgtgtctcctttcccccgaagtagatgaaacagtctcacatacccaactgctcatcaacagagcagagctgatggcatgagtgagggctgggcggggtggggcctccagagctttgcagggaaccctggaaccctaggaacaaggagcctttgttccaacagagcagagaaggaggttctctatgttcagaccactggagaggatagagaggtaaaaggtggcgacagtttcccttaggggtctgcctggcaggagccacagctcaggagagttgtgagggatgggacggaggctggcgaccaggcgaggcctaggccaggctcgggagacttttctgtgctcctttctacacatgccttaaaccttccttcctgtggggtgcctggaccccttccccatctctggcagctcagagggtctctgctgctctcccctgggaaatcccctcatcctgccctctggctgcctcccagctgggcttgttctctgagggaggttccggagactcatggacttggggctctgcctgtaggaaggaggctgggccggagggaccagccaccattgtctctgttcagccaagtgtgcaagtaggctgcccgccaagagggggcctctgctacccgctgctgcctgccggctgacacactgcctccccagccttcctgctaggccaccctcctcccttcccatgcttgtaaccagctctggggcttgcacctccacaaagtaaggttggcccttggaggccatgtttgggtctccggccagggcctagggctaggccatgcacccaatgggtgcacaataaataacaggtcaacaaaga

SEQ ID NO: 378478 - DNA, 2811 bp, Homo sapiens
gtggctgtctagaggatcccttccgggttgtgcatccgagtctggacgagccctccggagcttcctccaggccttggtgctcagtggggagactcaggaacgggagcgaatcctctaccagttctccagacgcttccaccattgcaatccggggatcttcccctcagtagattctgtacacaccttgacatgtgcaatcatgctgcttaacacggacctgcatggacagaacattgggaagagcatgagctgccaggaattcataaccaacctgaatgggctgagggatggcgggaacttccccaaggagctgctgaaggccctctactggtctatccgcagcgagaagctcgagtgggccgtggatgaagaagacacagccagacctgagaaggcccagccgtccctgccagctggcaagatgagcaagcccttccttcagctggctcaggatcccacagtgcccacctacaagcagggcatcctggctcggaaaatgcatcaagatgcagacggcaagaagacgccatggggcaagcgtggctggaagatgttccacaccttactgcgagggatggttctctacttcctgaagcagggagaagaccactgtctggagggggagagcttggtggggcagatggtggatgagcccgtgggggtgcaccactcgctggccacccccgccacgcattacaccaagaagccgcacgtcttccagctgcgcacggctgactggcgcctctacctcttccaggcacccactgccaaggagatgagctcctggatcgcgcgcatcaacttggctgcggccacgcactccgcgccgcccttccccgccgctgtgggctcccagcgcagattcgtgcggcccatcctgcccgtgggccccgcccagagctccctggaggagcagcatcgatcccacgagaactgcctggacgctgccgcggacgacctgctggatctacagaggaacctgccggagcggcggggccgtggccgcgagctggaggagcaccgcctgcggaaggagtacctggagtacgagaaaacccgctacgagacctacgtgcagctgctggtggcccgcctgcactgcccctctgatgctctggacctgtgggaggagcagctggggagggaagctggaggcactcgggagcccaagctcagcctgaagaagtcccactcgagcccgtccctgcaccaggatgaggctcccaccacggccaaggtgaagcgcaacatctcagagcgcagaacctaccggaagatcatccctaagcggaaccgcaatcagctgtgaagccagcaccacctcagagacactgttccctgctccagggtagacctgagatgaacctccctggaggagacttatttcaatgagtccaccatgacggatgaggcacctcctttccctgctgaaggacaaaccttgtttccctgtggccctcattcttgtgctccctgaagctttcctaatattgctgtgctccccaccacccccatggcagtccctccgcagccccagtccctggccacgcccaagggaagagggaggtgaggacttgactttcctcccagagctcagcccatgtcaccctccaggccccagaatccagagtggcctcatttcctagacttgctgagaactcagcacttgtttgagaaccagtgcttatgtggtgtgcccttggcttctgggggagagcttggggcagcagaggcccctgggcagcccagccaggggagccacagccccgaggatggtcttgctctgggaattaggtgaccttcctggggaggccccaggagagtgaatcagggactcttgagaaattcctaaccagcctcctgtgacccagggagcagggtcgctaaggtcctgcccactgaggggacagccttctgggcagggacctcggggggcttcaagggctctgcacggctgtggggccctgtgcctttgtctccttgtgtctcctttcccccgaagtagatgaaacagtctcacatacccaactgctcatcaacagagcagagctgatggcatgagtgagggctgggcggggtggggcctccagagctttgcagggaaccctggaaccctaggaacaaggagcctttgttccaacagagcagagaaggaggttctctatgttcagaccactggagaggatagagaggtaaaaggtggcgacagtttcccttaggggtctgcctggcaggagccacagctcaggagagttgtgagggatgggacggaggctggcgaccaggcgaggcctaggccaggctcgggagacttttctgtgctcctttctacacatgccttaaaccttccttcctgtggggtgcctggaccccttccccatctctggcagctcagagggtctctgctgctctcccctgggaaatcccctcatcctgccctctggctgcctcccagctgggcttgttctctgagggaggttccggagactcatggacttggggctctgcctgtaggaaggaggctgggccggagggaccagccaccattgtctctgttcagccaagtgtgcaagtaggctgcccgccaagagggggcctctgctacccgctgctgcctgccggctgacacactgcctccccagccttcctgctaggccaccctcctcccttcccatgcttgtaaccagctctggggcttgcacctccacaaagtaaggttggcccttggaggccatgtttgggtctccggccagggcctagggctaggccatgcacccaatgggtgcacaataaataacaggtcaacaaaga

SEQ ID NO: 378479 - DNA, 4376 bp, Homo sapiens
gcagtactccccggtctaggtacgaggctgggtgtttacagacaaaatgttcctccctggggctccggtgtggagctcacacacctggggagctgggtccatcaggacgggctggagccttgccaggagcaaacccgggccactgaccctcctgaatctaccagacaagatgctcctccctggggctccggtgtggagctcacacacctggggagcccctctgcccagagggagcacaggcagaacacagcatcaccagggtcaccagtgaacagccatctaccggggagcccaaagcagaaccggagcacgtccacacaggtagtgttctgggcaggcatcctgcaggcccagatgtgtgtcctagacctggaggaggagctggagaagacggaagggctcaaggctgggctgaaatgctgtctccccacgccccctgtggacctccccggggacacgggcctgcactccagcccacctgagaatgaagactcaggggaagacagcagcgagcctgagggagagggccaggcatggctgagagagggaaccccagactcttccccacagtggggagctgaggaggagagcatgttcttcagcaaccccctcttcctggcgagtccttgctcagagaacagtgcttctggagagtgcttttcctggggggcttcagactcccatgcaggtgtgaggactggacctgagagcccagcgactctggagcctcccctcccagaagacacagtgctgtgggagctggaaagtgagccagatttgggggacggcgctgctatcagtgggcattgtacccctccattccctgtgcccatctataaaccacactccatctgctgggcctcagtggctgccgctgagggggctcctgcagcacctcctggtcacggggagagtgagggagataggcttggtcctgctccatctgcagcaccgtgtgtggacgaagcattgacctgggaatcaggatgtgtcggatctgatcttggccctgctgcacatcctgtgcaaccttgggcctctctcagccctgagggctggcagagaggaggtcctttttggccccaggtgactcttaactcccaggacagagcaaaggtcctgagcccttagttgcctggaggcttgagtcctgggagcccgctgtctgctgcctctgcaagtgggagaggtcactgcccgagggaggacagggcatgctgccaggctccaggggaggagccccagggagggagcctctggaggtggtgcccaggccgttctcctgcctcctgccctgtgcccgcctcacttcatgttcttcctcagatgagagggagggtgggcacccccaggaatctcttccctgcaccttggccccctgcccctggaggagcccagcttcttctccagagcctagcagcccagaatctgagagcagaggccctggtcccaggcccagccctgcatcgtcccaggagggcagcccgcagcttcaacaccacagctcaggcattttgcccaagtggacactagatgcttcacagtcttcactcttggagacggatggggaacagccaagttccttgaagaaaaaggaggcaggggaggccccaaaaccaggcgaggaagtaaagagtgaaggaacagccaggcctgcagagactggagacgtccagcctgacattcacctgacttctgcagaacatgagaatctgaggacaccgatgaactcttcttggcttcctgggagccctatgccccaagcacagtccccagaggaaggccagagaccaccagctggagacaagctagctaatggcgtcaggaacaacaaggtagcctggaacttggcctcacgcctctatcgcctggagggcttccggaagtctgaagtggctgcctacctgcagaagaacaatgactttagcagggctgtggctgaggagtacctgtccttcttccagtttggaggccagagtctggaccgagccctccggagcttcctccaggccttggtgctcagtggggagactcaggaacgggagcgaatcctctaccagttctccagacgcttccaccattgcaatccggggatcttcccctcagtagattctgtacacaccttgacatgtgcaatcatgctgcttaacacggacctgcatggacagaacattgggaagagcatgagctgccaggaattcataaccaacctgaatgggctgagggatggcgggaacttccccaaggagctgctgaaggccctctactggtctatccgcagcgagaagctcgagtgggccgtggatgaagaagacacagccagacctgagaaggcccagccgtccctgccagctggcaagatgagcaagcccttccttcagctggctcaggatcccacagtgcccacctacaagcagggcatcctggctcggaaaatgcatcaagatgcagacggcaagaagacgccatggggcaagcgtggctggaagatgttccacaccttactgcgagggatggttctctacttcctgaagcagggagaagaccactgtctggagggggagagcttggtggggcagatggtggatgagcccgtgggggtgcaccactcgctggccacccccgccacgcattacaccaagaagccgcacgtcttccagctgcgcacggctgactggcgcctctacctcttccaggcacccactgccaaggagatgagctcctggatcgcgcgcatcaacttggctgcggccacgcactccgcgccgcccttccccgccgctgtgggctcccagcgcagattcgtgcggcccatcctgcccgtgggccccgcccagagctccctggaggagcagcatcgatcccacgagaactgcctggacgctgccgcggacgacctgctggatctacagaggaacctgccggagcggcggggccgtggccgcgagctggaggagcaccgcctgcggaaggagtacctggagtacgagaaaacccgctacgagacctacgtgcagctgctggtggcccgcctgcactgcccctctgatgctctggacctgtgggaggagcagctggggagggaagctggaggcactcgggagcccaagctcagcctgaagaagtcccactcgagcccgtccctgcaccaggatgaggctcccaccacggccaaggtgaagcgcaacatctcagagcgcagaacctaccggaagatcatccctaagcggaaccgcaatcagctgtgaagccagcaccacctcagagacactgttccctgctccagggtagacctgagatgaacctccctggaggagacttatttcaatgagtccaccatgacggatgaggcacctcctttccctgctgaaggacaaaccttgtttccctgtggccctcattcttgtgctccctgaagctttcctaatattgctgtgctccccaccacccccatggcagtccctccgcagccccagtccctggccacgcccaagggaagagggaggtgaggacttgactttcctcccagagctcagcccatgtcaccctccaggccccagaatccagagtggcctcatttcctagacttgctgagaactcagcacttgtttgagaaccagtgcttatgtggtgtgcccttggcttctgggggagagcttggggcagcagaggcccctgggcagcccagccaggggagccacagccccgaggatggtcttgctctgggaattaggtgaccttcctggggaggccccaggagagtgaatcagggactcttgagaaattcctaaccagcctcctgtgacccagggagcagggtcgctaaggtcctgcccactgaggggacagccttctgggcagggacctcggggggcttcaagggctctgcacggctgtggggccctgtgcctttgtctccttgtgtctcctttcccccgaagtagatgaaacagtctcacatacccaactgctcatcaacagagcagagctgatggcatgagtgagggctgggcggggtggggcctccagagctttgcagggaaccctggaaccctaggaacaaggagcctttgttccaacagagcagagaaggaggttctctatgttcagaccactggagaggatagagaggtaaaaggtggcgacagtttcccttaggggtctgcctggcaggagccacagctcaggagagttgtgagggatgggacggaggctggcgaccaggcgaggcctaggccaggctcgggagacttttctgtgctcctttctccacaaagtaaggttggcccttggaggccatgtttgggtctccggccagggcctagggctaggccatgcacccaatgggtgcacaataaataacaggtcaacaaaga

SEQ ID NO: 378480 - DNA, 2064 bp, Homo sapiens
gcagtactccccggtctaggtacgaggctgggtgtttacagacaaaatgttcctccctggggctccggtgtggagctcacacacctggggagctgggtccatcaggacgggctggagccttgccaggagcaaacccgggccactgaccctcctgaatctaccagacaagatgctcctccctggggctccggtgtggagctcacacacctggggagcccctctgcccagagggagcacaggcagaacacagcatcaccagggtcaccagtgaacagccatctaccggggagcccaaagcagaaccggagcacgtccacacaggtagtgttctgggcaggcatcctgcaggcccagatgtgtgtcctagacctggaggaggagctggagaagacggaagggctcaaggctgggctgaaatgctgtctccccacgccccctgtggacctccccggggacacgggcctgcactccagcccacctgagaatgaagactcaggggaagacagcagcgagcctgagggagagggccaggcatggctgagagagggaaccccagactcttccccacagtggggagctgaggaggagagcatgttcttcagcaaccccctcttcctggcgagtccttgctcagagaacagtgcttctggagagtgcttttcctggggggcttcagactcccatgcaggtgtgaggactggacctgagagcccagcgactctggagcctcccctcccagaagacacagtgctgtgggagctggaaagtgagccagatttgggggacggcgctgctatcagtgggcattgtacccctccattccctgtgcccatctataaaccacactccatctgctgggcctcagtggctgccgctgagggggctcctgcagcacctcctggtcacggggagagtgagggagataggcttggtcctgctccatctgcagcaccgtgtgtggacgaagcattgacctgggaatcaggatgtgtcggatctgatcttggccctgctgcacatcctgtgcaaccttgggcctctctcagccctgagggctggcagagaggaggtcctttttggccccaggtgactcttaactcccaggacagagatgagagggagggtgggcacccccaggaatctcttccctgcaccttggccccctgcccctggaggagcccagcttcttctccagagcctagcagcccagaatctgagagcagaggccctggtcccaggcccagccctgcatcgtcccaggagggcagcccgcagcttcaacaccacagctcaggcattttgcccaagtggacactagatgcttcacagtcttcactcttggagacggatggggaacagccaagttccttgaagaaaaaggaggcaggggaggccccaaaaccaggcgaggaagtaaagagtgaaggaacagccaggcctgcagagactggagacgtccagcctgacattcacctgacttctgcagaacatgagaatctgaggacaccgatgaactcttcttggcttcctgggagccctatgccccaagcacagtccccagaggaaggccagagaccaccagctggagacaagctagctaatggcgtcaggaacaacaaggtagcctggaacttggcctcacgcctctatcgcctggagggcttccggaagtctgaagtggctgcctacctgcagaagaagtaaggggctttgagcctggggaaggctggaggctgaggcagccagggaggagctgctgaagggctccctccactggccaccctccccttcccgtccctgccctgttcccttcccatctcccctcctaacttttcccccataccctcactgtatctgctgcttactctcagtcatggtcctcatgctctccacacccttggtccttggtccccactgccttgccaaccagactccacaggtctctcccagtgtctcccagtgtacactgaatagggtagcagggcataccagaccctggctgcccccttgctctgtcaggacccaaggcccagcgtgcctgcacccttcccttgctcaccccca

SEQ ID NO: 378481 - DNA, 280 bp, Homo sapiens
gatttgagatgatgaactattatgtaaaattataaatgagcaaaatgttgttttttgtattgttaatcaaatcagaaactggtttaaaagatttacaaaattcacaagggtatgaaaaacagaggttgtatttactgattggtctgtttaatggaaattgtctaatggaattgtctcatattttcaaatgggattttgttttcatggaatttaattagtctgattataatttacaagttcttttaaaaagtacaggagcagctttttaaagtttgagaaa

SEQ ID NO: 378482 - DNA, 428 bp, Homo sapiens
gcttaatacaattatttgtattaagcactagccacctgttaggatcattctcattaaaggtcactgtgtggtgcctgactgtctgactatggcagcctgcatcagatttgctagtggcccctggtttgtgtgacacctgccaatagtaacagaaagaatggagatctgatagctcaaagggaacagaaggtactagaggaggaatgaggaatcaggagaaccatggagcacctgccactctagcaccattaccatggtttttggtgctaacttgcctagtctcccttttctctggctaccccttcagtgagctgtgccaggcatttcgaagagttctgttattgtctgcatgctgatattgctttggtttattgatattaagacattcagcagaggggatgtaaggaatttcaggtacaagaaattca

SEQ ID NO: 378483 - DNA, 443 bp, Homo sapiens
tgggccacagagtgagactccgtctcaaaagaagaaaaaagttagagcaatgaatctatcccatattaaggcctactggataactacagtaatcaagacaacacagcattggcaaaaagagagacacataacatagatcagtggaacagactggagaacccagagacaggcccacatgaatatgccaaactgatttctgtgccattcaacaaacagtgctagagcaattagacacccctaggcaaaagcaatgagcttctacccaatcctcattgtggtacatccataccatggaatactactcaacaataaaaaggaacaaattattagtacgttccacgacctggataagaatccagggaattaaattatgctgagtgacagaaagccaatcccaaaatgttagatactatacgagtacacttacatagcatttcccagat

SEQ ID NO: 378484 - DNA, 585 bp, Homo sapiens
  misc_feature (42)..(42): n is a, c, g, or t
aggcggaacggccggggcgggggcgcaggccggcagccgcangcggtgcgggatgcgccccgcagccgcgccgcgtgcgcccggcagaggcggccctgcgtgccgtacgctgcgtccggggcgcgcccgccgctattcgggaagctattcagcttcccgggctcattagcagtcgcggtgtgcggctcggcgcgggctcacaaagagctcggcctcgcggactgagccggcggcagcggggcggggacggcggcgtacccgggcagcccagcgccctggccagtctcctgaatatttacgcgttgctgaatctcctgtggacaaaccaccaataggccaggactgtcctgtggacagacggggtgagcctcttcttgtgtctggagattctgaaaagatttgatcaccaggagatttttcgggacattaccaaaccactcattttaggtaagaaatacaaggcagcgttgcatggaatgaggttttgcttttgccatgtggggagcggaccgtttcactggagggaaaatgctacattgcaggcagagctggcaacagagcaagactcagtctcaaaaaaaaaaa

SEQ ID NO: 378485 - DNA, 3922 bp, Homo sapiens
  misc_feature (42)..(42): n is a, c, g, or t
  misc_feature (3921)..(3922): n is a, c, g, or t
aggcggaacggccggggcgggggcgcaggccggcagccgcangcggtgcgggatgcgccccgcagccgcgccgcgtgcgcccggcagaggcggccctgcgtgccgtacgctgcgtccggggcgcgcccgccgctattcgggaagctattcagcttcccgggctcattagcagtcgcggtgtgcggctcggcgcgggctcacaaagagctcggcctcgcggactgagccggcggcagcggggcggggacggcggcgtacccgggcagcccagcgccctggccagtctcctgaatatttacgcgttgctgaatctcctgtggacaaaccaccaataggccaggactgtcctgtggacagacggggtgagcctcttcttgtgtctggagattctgaaaagatttgatcaccaggagatttttcgggacattaccaaaccactcattttagtggctgcctccgggtgatgatggctgtgtgaacgactgccatggcccaccggaagcttgagagcgtggggagcggcatgttggaccatagggtgagaccaggtcctgtccctcacagccaggagcccgagagcgaggacatggagctgcccttggagggctatgtgcccgagggcctggagctggctgccctgcggccagagagccccgcgccagaggaacaggagtgccacaaccacagccccgatggggactccagctctgactacgtgaacaacacctctgaggaggaggactatgacgagggcctccctgaggaggaggagggcatcacctactacatccgctactgccctgaggacgacagctacctagagggcatggactgcaacggggaggagtacctggcccacagtgcacaccctgtggacactgatgagtgccaggaggcggtggaggagtggacggactcggcgggcccgcacccccacggccacgaggctgaaggcagccaggactacccagacggccaactgcccattccggaggatgagccctccgtccttgaggcccatgaccaggaagaagatggtcactactgtgccagcaaagagggctaccaggactactaccccgaggaggccaacgggaacaccggcgcctccccctaccgcctgaggcgtggggatggggacctggaggaccaggaggaggacattgaccagatcgtggcagagatcaagatgagtctgagcatgaccagcatcaccagcgccagtgaggccagccccgagcatgggcctgagccagggcctgaggactctgtagaggcctgcccacccatcaaggccagctgcagccccagcaggcacgaggcgaggcccaagtcgctgaacctccttcccgaggccaagcaccccggagacccccagagaggcttcaagcccaagaccaggaccccagaagagaggctgaagtggccccacgagcaggtttgcaatggtctggagcagccaaggaagcagcagcgctctgatctcaatggacctgttgacaataacaacattccagagacaaagaaggtggcatcatttccaagttttgtggctgttccagggccctgcgaaccagaagacctcatcgacgggatcatctttgctgccaattacctggggtccacccagctgctatcagaacggaacccttccaaaaacatcagaatgatgcaagcgcaggaggccgtcagccgggtcaagaggatgcaaaaggctgctaagatcaagaaaaaagcgaattctgagggggatgcccagacgctgacggaagtggacctcttcatttccacccagaggatcaaggttttaaatgcagacacgcaggaaaccatgatggaccacgccttgcgtaccatctcctacatcgccgacattgggaacattgtagtgctgatggccagacgccgcatgccccggtcagcctctcaggactgcatcgagaccacgcccggggcccaggaaggcaagaagcagtataagatgatctgccatgtgttcgagtcggaggatgcccagctcatcgcccagtctatcggccaggccttcagcgtggcctaccaggagttcctgcgagccaatggcatcaaccccgaagacttgagccagaaggaatacagcgacatcatcaacacccaggagatgtacaacgacgacctcatccacttctcaaactcggagaactgcaaggagctgcagctggagaagcacaagggcgagatcctgggcgtggtggtggtggagtcgggctggggctccatcctgcccacggtgatcctggccaacatgatgaatggcggcccggctgcccgctcggggaagctgagcatcggggaccagatcatgtccatcaatggcaccagcctggtggggctgcccctcgccacctgccaaggcatcatcaagggcctgaagaaccagacacaggtgaagctcaacattgtcagctgtcccccggtcaccacggtccttatcaagcggccagacctcaagtaccagctgggcttcagcgtgcagaatggaattatctgcagcctcatgagagggggcattgctgagcgagggggcgtccgtgtgggccaccgcatcatcgagatcaacgggcagagcgtggtggccacagcccacgagaagatagtccaagctctgtccaactcggtcggagagatccacatgaagaccatgcccgccgccatgttcaggctcctcacgggtcaggagaccccgctgtacatctaggccaccccagcctggccacgcagccaggacaccgggcagggccgcccgggcccagaggagctgggagccgggccgcagacttgaccccgacgccacagcccagccacggacgctggctccccaaagggtgtgccctcaccacccacttgatttttttcattttgccaaaaaggggtatgtctttatcaaaggagagtcacagaacaaatgtttgtttgtaaagcgttccaagtattttgccacgttctggactgtcttctccctgcacaagccagggtgtgtctcggtagctgtgcgtggtgtggagtgtgtgtctttcctccctgaagctgtgcggagcgaactggcgcctccgagggacgcggctcccggggcagggcagccgtcacccctgcctcccgcccccttggctgggacgtctggggtcctgtggggcccccacaatggtcccaaacagctgcctctgccactgactgcagggacacgggcagcctggctcccaggacacgacttgtaatgaaagtttggggacatgtgattgattgattgattgattgtaaataaaggatgatggccacaacatgaaaactccatatttatttagatgctattattactgtttggacttttattttggcaggcttttttccagactctagggttttccaatgtgactaatgaccacacctgcctctcccgtcgtctcttctgggcaccctcccacccggctgcatacccggccagggctcccacagagacaaggagggcacaggtgtctgccccctctttaaaatcgatctacacacatccacgcacatgcgaccccgaggaaacgaaacccactctagaaaacgcgaccttggccgcacctaaagcagccagccgtgagtgcagaccccttggccagcgtggcgcagtggccctgagcagtagtggcatgtgtgtagatcaagtcggatctagtccagctcggttcattagcgatccatgtaatctgacgtcatcttgtctcgaagtctctttttttggcccaggccttgaagaatacactgtgacttaagaagccttaccacgcagtaactaaagctttaggatgactgtattcgaggagtgccgtgtgttgcatgcagctacccgtaggaagacttcgcgcatatcactaataaacctgaagtcgtgatgann

SEQ ID NO: 378486 - DNA, 3580 bp, Homo sapiens
  misc_feature (3579)..(3580): n is a, c, g, or t
agtggtgagcacggtgtcgggggccgcattagctattgatttatgtgctgttatagaattaattgagtctggacatggggactcattttcttggacatgtagcagtggctgcctccgggtgatgatggctgtgtgaacgactgccatggcccaccggaagcttgagagcgtggggagcggcatgttggaccatagggtgagaccaggtcctgtccctcacagccaggagcccgagagcgaggacatggagctgcccttggagggctatgtgcccgagggcctggagctggctgccctgcggccagagagccccgcgccagaggaacaggagtgccacaaccacagccccgatggggactccagctctgactacgtgaacaacacctctgaggaggaggactatgacgagggcctccctgaggaggaggagggcatcacctactacatccgctactgccctgaggacgacagctacctagagggcatggactgcaacggggaggagtacctggcccacagtgcacaccctgtggacactgatgagtgccaggaggcggtggaggagtggacggactcggcgggcccgcacccccacggccacgaggctgaaggcagccaggactacccagacggccaactgcccattccggaggatgagccctccgtccttgaggcccatgaccaggaagaagatggtcactactgtgccagcaaagagggctaccaggactactaccccgaggaggccaacgggaacaccggcgcctccccctaccgcctgaggcgtggggatggggacctggaggaccaggaggaggacattgaccagatcgtggcagagatcaagatgagtctgagcatgaccagcatcaccagcgccagtgaggccagccccgagcatgggcctgagccagggcctgaggactctgtagaggcctgcccacccatcaaggccagctgcagccccagcaggcacgaggcgaggcccaagtcgctgaacctccttcccgaggccaagcaccccggagacccccagagaggcttcaagcccaagaccaggaccccagaagagaggctgaagtggccccacgagcaggtttgcaatggtctggagcagccaaggaagcagcagcgctctgatctcaatggacctgttgacaataacaacattccagagacaaagaaggtggcatcatttccaagttttgtggctgttccagggccctgcgaaccagaagacctcatcgacgggatcatctttgctgccaattacctggggtccacccagctgctatcagaacggaacccttccaaaaacatcagaatgatgcaagcgcaggaggccgtcagccgggtcaagaggatgcaaaaggctgctaagatcaagaaaaaagcgaattctgagggggatgcccagacgctgacggaagtggacctcttcatttccacccagaggatcaaggttttaaatgcagacacgcaggaaaccatgatggaccacgccttgcgtaccatctcctacatcgccgacattgggaacattgtagtgctgatggccagacgccgcatgccccggtcagcctctcaggactgcatcgagaccacgcccggggcccaggaaggcaagaagcagtataagatgatctgccatgtgttcgagtcggaggatgcccagctcatcgcccagtctatcggccaggccttcagcgtggcctaccaggagttcctgcgagccaatggcatcaaccccgaagacttgagccagaaggaatacagcgacatcatcaacacccaggagatgtacaacgacgacctcatccacttctcaaactcggagaactgcaaggagctgcagctggagaagcacaagggcgagatcctgggcgtggtggtggtggagtcgggctggggctccatcctgcccacggtgatcctggccaacatgatgaatggcggcccggctgcccgctcggggaagctgagcatcggggaccagatcatgtccatcaatggcaccagcctggtggggctgcccctcgccacctgccaaggcatcatcaagggcctgaagaaccagacacaggtgaagctcaacattgtcagctgtcccccggtcaccacggtccttatcaagcggccagacctcaagtaccagctgggcttcagcgtgcagaatggaattatctgcagcctcatgagagggggcattgctgagcgagggggcgtccgtgtgggccaccgcatcatcgagatcaacgggcagagcgtggtggccacagcccacgagaagatagtccaagctctgtccaactcggtcggagagatccacatgaagaccatgcccgccgccatgttcaggctcctcacgggtcaggagaccccgctgtacatctaggccaccccagcctggccacgcagccaggacaccgggcagggccgcccgggcccagaggagctgggagccgggccgcagacttgaccccgacgccacagcccagccacggacgctggctccccaaagggtgtgccctcaccacccacttgatttttttcattttgccaaaaaggggtatgtctttatcaaaggagagtcacagaacaaatgtttgtttgtaaagcgttccaagtattttgccacgttctggactgtcttctccctgcacaagccagggtgtgtctcggtagctgtgcgtggtgtggagtgtgtgtctttcctccctgaagctgtgcggagcgaactggcgcctccgagggacgcggctcccggggcagggcagccgtcacccctgcctcccgcccccttggctgggacgtctggggtcctgtggggcccccacaatggtcccaaacagctgcctctgccactgactgcagggacacgggcagcctggctcccaggacacgacttgtaatgaaagtttggggacatgtgattgattgattgattgattgtaaataaaggatgatggccacaacatgaaaactccatatttatttagatgctattattactgtttggacttttattttggcaggcttttttccagactctagggttttccaatgtgactaatgaccacacctgcctctcccgtcgtctcttctgggcaccctcccacccggctgcatacccggccagggctcccacagagacaaggagggcacaggtgtctgccccctctttaaaatcgatctacacacatccacgcacatgcgaccccgaggaaacgaaacccactctagaaaacgcgaccttggccgcacctaaagcagccagccgtgagtgcagaccccttggccagcgtggcgcagtggccctgagcagtagtggcatgtgtgtagatcaagtcggatctagtccagctcggttcattagcgatccatgtaatctgacgtcatcttgtctcgaagtctctttttttggcccaggccttgaagaatacactgtgacttaagaagccttaccacgcagtaactaaagctttaggatgactgtattcgaggagtgccgtgtgttgcatgcagctacccgtaggaagacttcgcgcatatcactaataaacctgaagtcgtgatgann

SEQ ID NO: 378487 - DNA, 3868 bp, Homo sapiens
  misc_feature (42)..(42): n is a, c, g, or t
  misc_feature (3867)..(3868): n is a, c, g, or t
aggcggaacggccggggcgggggcgcaggccggcagccgcangcggtgcgggatgcgccccgcagccgcgccgcgtgcgcccggcagaggcggccctgcgtgccgtacgctgcgtccggggcgcgcccgccgctattcgggaagctattcagcttcccgggctcattagcagtcgcggtgtgcggctcggcgcgggctcacaaagagctcggcctcgcggactgagccggcggcagcggggcggggacggcggcgtacccgggcagcccagcgccctggccagtctcctgaatatttacgcgttgctgaatctcctgtggacaaaccaccaataggccaggactgtcctgtggacagacggggtgagcctcttcttgtgtctggagattctgatggctgcctccgggtgatgatggctgtgtgaacgactgccatggcccaccggaagcttgagagcgtggggagcggcatgttggaccatagggtgagaccaggtcctgtccctcacagccaggagcccgagagcgaggacatggagctgcccttggagggctatgtgcccgagggcctggagctggctgccctgcggccagagagccccgcgccagaggaacaggagtgccacaaccacagccccgatggggactccagctctgactacgtgaacaacacctctgaggaggaggactatgacgagggcctccctgaggaggaggagggcatcacctactacatccgctactgccctgaggacgacagctacctagagggcatggactgcaacggggaggagtacctggcccacagtgcacaccctgtggacactgatgagtgccaggaggcggtggaggagtggacggactcggcgggcccgcacccccacggccacgaggctgaaggcagccaggactacccagacggccaactgcccattccggaggatgagccctccgtccttgaggcccatgaccaggaagaagatggtcactactgtgccagcaaagagggctaccaggactactaccccgaggaggccaacgggaacaccggcgcctccccctaccgcctgaggcgtggggatggggacctggaggaccaggaggaggacattgaccagatcgtggcagagatcaagatgagtctgagcatgaccagcatcaccagcgccagtgaggccagccccgagcatgggcctgagccagggcctgaggactctgtagaggcctgcccacccatcaaggccagctgcagccccagcaggcacgaggcgaggcccaagtcgctgaacctccttcccgaggccaagcaccccggagacccccagagaggcttcaagcccaagaccaggaccccagaagagaggctgaagtggccccacgagcaggtttgcaatggtctggagcagccaaggaagcagcagcgctctgatctcaatggacctgttgacaataacaacattccagagacaaagaaggtggcatcatttccaagttttgtggctgttccagggccctgcgaaccagaagacctcatcgacgggatcatctttgctgccaattacctggggtccacccagctgctatcagaacggaacccttccaaaaacatcagaatgatgcaagcgcaggaggccgtcagccgggtcaagaggatgcaaaaggctgctaagatcaagaaaaaagcgaattctgagggggatgcccagacgctgacggaagtggacctcttcatttccacccagaggatcaaggttttaaatgcagacacgcaggaaaccatgatggaccacgccttgcgtaccatctcctacatcgccgacattgggaacattgtagtgctgatggccagacgccgcatgccccggtcagcctctcaggactgcatcgagaccacgcccggggcccaggaaggcaagaagcagtataagatgatctgccatgtgttcgagtcggaggatgcccagctcatcgcccagtctatcggccaggccttcagcgtggcctaccaggagttcctgcgagccaatggcatcaaccccgaagacttgagccagaaggaatacagcgacatcatcaacacccaggagatgtacaacgacgacctcatccacttctcaaactcggagaactgcaaggagctgcagctggagaagcacaagggcgagatcctgggcgtggtggtggtggagtcgggctggggctccatcctgcccacggtgatcctggccaacatgatgaatggcggcccggctgcccgctcggggaagctgagcatcggggaccagatcatgtccatcaatggcaccagcctggtggggctgcccctcgccacctgccaaggcatcatcaagggcctgaagaaccagacacaggtgaagctcaacattgtcagctgtcccccggtcaccacggtccttatcaagcggccagacctcaagtaccagctgggcttcagcgtgcagaatggaattatctgcagcctcatgagagggggcattgctgagcgagggggcgtccgtgtgggccaccgcatcatcgagatcaacgggcagagcgtggtggccacagcccacgagaagatagtccaagctctgtccaactcggtcggagagatccacatgaagaccatgcccgccgccatgttcaggctcctcacgggtcaggagaccccgctgtacatctaggccaccccagcctggccacgcagccaggacaccgggcagggccgcccgggcccagaggagctgggagccgggccgcagacttgaccccgacgccacagcccagccacggacgctggctccccaaagggtgtgccctcaccacccacttgatttttttcattttgccaaaaaggggtatgtctttatcaaaggagagtcacagaacaaatgtttgtttgtaaagcgttccaagtattttgccacgttctggactgtcttctccctgcacaagccagggtgtgtctcggtagctgtgcgtggtgtggagtgtgtgtctttcctccctgaagctgtgcggagcgaactggcgcctccgagggacgcggctcccggggcagggcagccgtcacccctgcctcccgcccccttggctgggacgtctggggtcctgtggggcccccacaatggtcccaaacagctgcctctgccactgactgcagggacacgggcagcctggctcccaggacacgacttgtaatgaaagtttggggacatgtgattgattgattgattgattgtaaataaaggatgatggccacaacatgaaaactccatatttatttagatgctattattactgtttggacttttattttggcaggcttttttccagactctagggttttccaatgtgactaatgaccacacctgcctctcccgtcgtctcttctgggcaccctcccacccggctgcatacccggccagggctcccacagagacaaggagggcacaggtgtctgccccctctttaaaatcgatctacacacatccacgcacatgcgaccccgaggaaacgaaacccactctagaaaacgcgaccttggccgcacctaaagcagccagccgtgagtgcagaccccttggccagcgtggcgcagtggccctgagcagtagtggcatgtgtgtagatcaagtcggatctagtccagctcggttcattagcgatccatgtaatctgacgtcatcttgtctcgaagtctctttttttggcccaggccttgaagaatacactgtgacttaagaagccttaccacgcagtaactaaagctttaggatgactgtattcgaggagtgccgtgtgttgcatgcagctacccgtaggaagacttcgcgcatatcactaataaacctgaagtcgtgatgann

SEQ ID NO: 378488 - DNA, 3811 bp, Homo sapiens
  misc_feature (3810)..(3811): n is a, c, g, or t
agcagatgagggcctgcttgggtctggggcgtcagtggggattggctgcaggcagccatgaggagccttcagggtgatgagggttctaaaagtgcgtcgtgtgcctgagccactgcgacattcactagaagtcctccgtgctgacggagggtgaactgtgtggggcccaagttctatctcaggaaagccagggaagccactcagttcagctttgtgaaaatcaagggagtcttcttggaggaagtggactctgagctggatgtgaatgacggagtgtctttgaaagatttgatcaccaggagatttttcgggacattaccaaaccactcattttagtggctgcctccgggtgatgatggctgtgtgaacgactgccatggcccaccggaagcttgagagcgtggggagcggcatgttggaccatagggtgagaccaggtcctgtccctcacagccaggagcccgagagcgaggacatggagctgcccttggagggctatgtgcccgagggcctggagctggctgccctgcggccagagagccccgcgccagaggaacaggagtgccacaaccacagccccgatggggactccagctctgactacgtgaacaacacctctgaggaggaggactatgacgagggcctccctgaggaggaggagggcatcacctactacatccgctactgccctgaggacgacagctacctagagggcatggactgcaacggggaggagtacctggcccacagtgcacaccctgtggacactgatgagtgccaggaggcggtggaggagtggacggactcggcgggcccgcacccccacggccacgaggctgaaggcagccaggactacccagacggccaactgcccattccggaggatgagccctccgtccttgaggcccatgaccaggaagaagatggtcactactgtgccagcaaagagggctaccaggactactaccccgaggaggccaacgggaacaccggcgcctccccctaccgcctgaggcgtggggatggggacctggaggaccaggaggaggacattgaccagatcgtggcagagatcaagatgagtctgagcatgaccagcatcaccagcgccagtgaggccagccccgagcatgggcctgagccagggcctgaggactctgtagaggcctgcccacccatcaaggccagctgcagccccagcaggcacgaggcgaggcccaagtcgctgaacctccttcccgaggccaagcaccccggagacccccagagaggcttcaagcccaagaccaggaccccagaagagaggctgaagtggccccacgagcaggtttgcaatggtctggagcagccaaggaagcagcagcgctctgatctcaatggacctgttgacaataacaacattccagagacaaagaaggtggcatcatttccaagttttgtggctgttccagggccctgcgaaccagaagacctcatcgacgggatcatctttgctgccaattacctggggtccacccagctgctatcagaacggaacccttccaaaaacatcagaatgatgcaagcgcaggaggccgtcagccgggtcaagaggatgcaaaaggctgctaagatcaagaaaaaagcgaattctgagggggatgcccagacgctgacggaagtggacctcttcatttccacccagaggatcaaggttttaaatgcagacacgcaggaaaccatgatggaccacgccttgcgtaccatctcctacatcgccgacattgggaacattgtagtgctgatggccagacgccgcatgccccggtcagcctctcaggactgcatcgagaccacgcccggggcccaggaaggcaagaagcagtataagatgatctgccatgtgttcgagtcggaggatgcccagctcatcgcccagtctatcggccaggccttcagcgtggcctaccaggagttcctgcgagccaatggcatcaaccccgaagacttgagccagaaggaatacagcgacatcatcaacacccaggagatgtacaacgacgacctcatccacttctcaaactcggagaactgcaaggagctgcagctggagaagcacaagggcgagatcctgggcgtggtggtggtggagtcgggctggggctccatcctgcccacggtgatcctggccaacatgatgaatggcggcccggctgcccgctcggggaagctgagcatcggggaccagatcatgtccatcaatggcaccagcctggtggggctgcccctcgccacctgccaaggcatcatcaagggcctgaagaaccagacacaggtgaagctcaacattgtcagctgtcccccggtcaccacggtccttatcaagcggccagacctcaagtaccagctgggcttcagcgtgcagaatggaattatctgcagcctcatgagagggggcattgctgagcgagggggcgtccgtgtgggccaccgcatcatcgagatcaacgggcagagcgtggtggccacagcccacgagaagatagtccaagctctgtccaactcggtcggagagatccacatgaagaccatgcccgccgccatgttcaggctcctcacgggtcaggagaccccgctgtacatctaggccaccccagcctggccacgcagccaggacaccgggcagggccgcccgggcccagaggagctgggagccgggccgcagacttgaccccgacgccacagcccagccacggacgctggctccccaaagggtgtgccctcaccacccacttgatttttttcattttgccaaaaaggggtatgtctttatcaaaggagagtcacagaacaaatgtttgtttgtaaagcgttccaagtattttgccacgttctggactgtcttctccctgcacaagccagggtgtgtctcggtagctgtgcgtggtgtggagtgtgtgtctttcctccctgaagctgtgcggagcgaactggcgcctccgagggacgcggctcccggggcagggcagccgtcacccctgcctcccgcccccttggctgggacgtctggggtcctgtggggcccccacaatggtcccaaacagctgcctctgccactgactgcagggacacgggcagcctggctcccaggacacgacttgtaatgaaagtttggggacatgtgattgattgattgattgattgtaaataaaggatgatggccacaacatgaaaactccatatttatttagatgctattattactgtttggacttttattttggcaggcttttttccagactctagggttttccaatgtgactaatgaccacacctgcctctcccgtcgtctcttctgggcaccctcccacccggctgcatacccggccagggctcccacagagacaaggagggcacaggtgtctgccccctctttaaaatcgatctacacacatccacgcacatgcgaccccgaggaaacgaaacccactctagaaaacgcgaccttggccgcacctaaagcagccagccgtgagtgcagaccccttggccagcgtggcgcagtggccctgagcagtagtggcatgtgtgtagatcaagtcggatctagtccagctcggttcattagcgatccatgtaatctgacgtcatcttgtctcgaagtctctttttttggcccaggccttgaagaatacactgtgacttaagaagccttaccacgcagtaactaaagctttaggatgactgtattcgaggagtgccgtgtgttgcatgcagctacccgtaggaagacttcgcgcatatcactaataaacctgaagtcgtgatgann

SEQ ID NO: 378489 - DNA, 1029 bp, Homo sapiens
  misc_feature (1028)..(1029): n is a, c, g, or t
cccacgcgtccgactagttctagatcgcgagggccgccctttttttaacaaatgtttgtttgtaaagcgttccaagtattttgccacgttctggactgtcttctccctgcacaagccagggtgtgtctcggtagctgtgcgtggtgtggagtgtgtgtctttcctccctgaagctgtgcggagcgaactggcgcctccgagggacgcggctcccggggcagggcagccgtcacccctgcctcccgcccccttggctgggacgtctggggtcctgtggggcccccacaatggtcccaaacagctgcctctgccactgactgcagggacacgggcagcctggctcccaggacacgacttgtaatgaaagtttggggacatgtgattgattgattgattgattgtaaataaaggatgatggccacaacatgaaaactccatatttatttagatgctattattactgtttggacttttattttggcaggcttttttccagactctagggttttccaatgtgactaatgaccacacctgcctctcccgtcgtctcttctgggcaccctcccacccggctgcatacccggccagggctcccacagagacaaggagggcacaggtgtctgccccctctttaaaatcgatctacacacatccacgcacatgcgaccccgaggaaacgaaacccactctagaaaacgcgaccttggccgcacctaaagcagccagccgtgagtgcagaccccttggccagcgtggcgcagtggccctgagcagtagtggcatgtgtgtagatcaagtcggatctagtccagctcggttcattagcgatccatgtaatctgacgtcatcttgtctcgaagtctctttttttggcccaggccttgaagaatacactgtgacttaagaagccttaccacgcagtaactaaagctttaggatgactgtattcgaggagtgccgtgtgttgcatgcagctacccgtaggaagacttcgcgcatatcactaataaacctgaagtcgtgatgann

SEQ ID NO: 378490 - DNA, 1650 bp, Homo sapiens
  misc_feature (42)..(42): n is a, c, g, or t
aggcggaacggccggggcgggggcgcaggccggcagccgcangcggtgcgggatgcgccccgcagccgcgccgcgtgcgcccggcagaggcggccctgcgtgccgtacgctgcgtccggggcgcgcccgccgctattcgggaagctattcagcttcccgggctcattagcagtcgcggtgtgcggctcggcgcgggctcacaaagagctcggcctcgcggactgagccggcggcagcggggcggggacggcggcgtacccgggcagcccagcgccctggccagaattcagagatgcctgcaccagctgggttttgaagaatgaataggagtttgccaggaagattctagaggaacaacagcaacaaaaagatttaaacatgggcacagaagagtctcctgaatatttacgcgttgctgaatctcctgtggacaaaccaccaataggccaggactgtcctgtggacagacggggtgagcctcttcttgtgtctggagattctgaaaagatttgatcaccaggagatttttcgggacattaccaaaccactcattttagtggctgcctccgggtgatgatggctgtgtgaacgactgccatggcccaccggaagcttgagagcgtggggagcggcatgttggaccatagggtgagaccaggtcctgtccctcacagccaggagcccgagagcgaggacatggagctgcccttggagggctatgtgcccgagggcctggagctggctgccctgcggccagagagccccgcgccagaggaacaggagtgccacaaccacggtccttatcaagcggccagacctcaagtaccagctgggcttcagcgtgcagaatggaattatctgcagcctcatgagagggggcattgctgagcgagggggcgtccgtgtgggccaccgcatcatcgagatcaacgggcagagcgtggtggccacagcccacgagaagatagtccaagctctgtccaactcggtcggagagatccacatgaagaccatgcccgccgccatgttcaggctcctcacgggtcaggagaccccgctgtacatctaggccaccccagcctggccacgcagccaggacaccgggcagggccgcccgggcccagaggagctgggagccgggccgcagacttgaccccgacgccacagcccagccacggacgctggctccccaaagggtgtgccctcaccacccacttgatttttttcattttgccaaaaaggggtatgtctttatcaaaggagagtcacagaacaaatgtttgtttgtaaagcgttccaagtattttgccacgttctggactgtcttctccctgcacaagccagggtgtgtctcggtagctgtgcgtggtgtggagtgtgtgtctttcctccctgaagctgtgcggagcgaactggcgcctccgagggacgcggctcccggggcagggcagccgtcacccctgcctcccgcccccttggctgggacgtctggggtcctgtggggcccccacaatggtcccaaacagctgcctctgccactgactgcagggacacgggcagcctggctcccaggacacgacttgtaatgaaagtttggggacatgtgattgattgattgattgattgtaaataaaggatgatggccacaac

SEQ ID NO: 378491 - DNA, 322 bp, Homo sapiens
tatgagcattacagaaacaaatcttcagttggctaccataatagcaatgatgaaaattatgaattactctcacctctacttttgttcgatagagaacaagtcgtttaaggctgcataacttggcaatgtggttgaaagcttgaggtgggtggcatcatttccaagtttcgtggctgttccagggccctgcgaaccagaagacctcatcgacgggatcatctttgctgccaattacctggggtccacccagctgctattgaaacttctaaaactaggcctagtttgagaagtttcaagtagcaccaagaaagaaagagaaaaa

SEQ ID NO: 378492 - DNA, 3891 bp, Homo sapiens
  misc_feature (42)..(42): n is a, c, g, or t
  misc_feature (3890)..(3891): n is a, c, g, or t
aggcggaacggccggggcgggggcgcaggccggcagccgcangcggtgcgggatgcgccccgcagccgcgccgcgtgcgcccggcagaggcggccctgcgtgccgtacgctgcgtccggggcgcgcccgccgctattcgggaagctattcagcttcccgggctcattagcagtcgcggtgtgcggctcggcgcgggctcacaaagagctcggcctcgcggactgagccggcggcagcggggcggggacggcggcgtacccgggcagcccagcgccctggccagtctcctgaatatttacgcgttgctgaatctcctgtggacaaaccaccaataggccaggactgtcctgtggacagacgggaaagatttgatcaccaggagatttttcgggacattaccaaaccactcattttagtggctgcctccgggtgatgatggctgtgtgaacgactgccatggcccaccggaagcttgagagcgtggggagcggcatgttggaccatagggtgagaccaggtcctgtccctcacagccaggagcccgagagcgaggacatggagctgcccttggagggctatgtgcccgagggcctggagctggctgccctgcggccagagagccccgcgccagaggaacaggagtgccacaaccacagccccgatggggactccagctctgactacgtgaacaacacctctgaggaggaggactatgacgagggcctccctgaggaggaggagggcatcacctactacatccgctactgccctgaggacgacagctacctagagggcatggactgcaacggggaggagtacctggcccacagtgcacaccctgtggacactgatgagtgccaggaggcggtggaggagtggacggactcggcgggcccgcacccccacggccacgaggctgaaggcagccaggactacccagacggccaactgcccattccggaggatgagccctccgtccttgaggcccatgaccaggaagaagatggtcactactgtgccagcaaagagggctaccaggactactaccccgaggaggccaacgggaacaccggcgcctccccctaccgcctgaggcgtggggatggggacctggaggaccaggaggaggacattgaccagatcgtggcagagatcaagatgagtctgagcatgaccagcatcaccagcgccagtgaggccagccccgagcatgggcctgagccagggcctgaggactctgtagaggcctgcccacccatcaaggccagctgcagccccagcaggcacgaggcgaggcccaagtcgctgaacctccttcccgaggccaagcaccccggagacccccagagaggcttcaagcccaagaccaggaccccagaagagaggctgaagtggccccacgagcaggtttgcaatggtctggagcagccaaggaagcagcagcgctctgatctcaatggacctgttgacaataacaacattccagagacaaagaaggtggcatcatttccaagttttgtggctgttccagggccctgcgaaccagaagacctcatcgacgggatcatctttgctgccaattacctggggtccacccagctgctatcagaacggaacccttccaaaaacatcagaatgatgcaagcgcaggaggccgtcagccgggtcaagaggatgcaaaaggctgctaagatcaagaaaaaagcgaattctgagggggatgcccagacgctgacggaagtggacctcttcatttccacccagaggatcaaggttttaaatgcagacacgcaggaaaccatgatggaccacgccttgcgtaccatctcctacatcgccgacattgggaacattgtagtgctgatggccagacgccgcatgccccggtcagcctctcaggactgcatcgagaccacgcccggggcccaggaaggcaagaagcagtataagatgatctgccatgtgttcgagtcggaggatgcccagctcatcgcccagtctatcggccaggccttcagcgtggcctaccaggagttcctgcgagccaatggcatcaaccccgaagacttgagccagaaggaatacagcgacatcatcaacacccaggagatgtacaacgacgacctcatccacttctcaaactcggagaactgcaaggagctgcagctggagaagcacaagggcgagatcctgggcgtggtggtggtggagtcgggctggggctccatcctgcccacggtgatcctggccaacatgatgaatggcggcccggctgcccgctcggggaagctgagcatcggggaccagatcatgtccatcaatggcaccagcctggtggggctgcccctcgccacctgccaaggcatcatcaagggcctgaagaaccagacacaggtgaagctcaacattgtcagctgtcccccggtcaccacggtccttatcaagcggccagacctcaagtaccagctgggcttcagcgtgcagaatggaattatctgcagcctcatgagagggggcattgctgagcgagggggcgtccgtgtgggccaccgcatcatcgagatcaacgggcagagcgtggtggccacagcccacgagaagatagtccaagctctgtccaactcggtcggagagatccacatgaagaccatgcccgccgccatgttcaggctcctcacgggtcaggagaccccgctgtacatctaggccaccccagcctggccacgcagccaggacaccgggcagggccgcccgggcccagaggagctgggagccgggccgcagacttgaccccgacgccacagcccagccacggacgctggctccccaaagggtgtgccctcaccacccacttgatttttttcattttgccaaaaaggggtatgtctttatcaaaggagagtcacagaacaaatgtttgtttgtaaagcgttccaagtattttgccacgttctggactgtcttctccctgcacaagccagggtgtgtctcggtagctgtgcgtggtgtggagtgtgtgtctttcctccctgaagctgtgcggagcgaactggcgcctccgagggacgcggctcccggggcagggcagccgtcacccctgcctcccgcccccttggctgggacgtctggggtcctgtggggcccccacaatggtcccaaacagctgcctctgccactgactgcagggacacgggcagcctggctcccaggacacgacttgtaatgaaagtttggggacatgtgattgattgattgattgattgtaaataaaggatgatggccacaacatgaaaactccatatttatttagatgctattattactgtttggacttttattttggcaggcttttttccagactctagggttttccaatgtgactaatgaccacacctgcctctcccgtcgtctcttctgggcaccctcccacccggctgcatacccggccagggctcccacagagacaaggagggcacaggtgtctgccccctctttaaaatcgatctacacacatccacgcacatgcgaccccgaggaaacgaaacccactctagaaaacgcgaccttggccgcacctaaagcagccagccgtgagtgcagaccccttggccagcgtggcgcagtggccctgagcagtagtggcatgtgtgtagatcaagtcggatctagtccagctcggttcattagcgatccatgtaatctgacgtcatcttgtctcgaagtctctttttttggcccaggccttgaagaatacactgtgacttaagaagccttaccacgcagtaactaaagctttaggatgactgtattcgaggagtgccgtgtgttgcatgcagctacccgtaggaagacttcgcgcatatcactaataaacctgaagtcgtgatgann

SEQ ID NO: 378493 - DNA, 3810 bp, Homo sapiens
  misc_feature (42)..(42): n is a, c, g, or t
  misc_feature (3809)..(3810): n is a, c, g, or t
aggcggaacggccggggcgggggcgcaggccggcagccgcangcggtgcgggatgcgccccgcagccgcgccgcgtgcgcccggcagaggcggccctgcgtgccgtacgctgcgtccggggcgcgcccgccgctattcgggaagctattcagcttcccgggctcattagcagtcgcggtgtgcggctcggcgcgggctcacaaagagctcggcctcgcggactgagccggcggcagcggggcggggacggcggcgtacccgggcagcccagcgccctggccaaagatttgatcaccaggagatttttcgggacattaccaaaccactcattttagtggctgcctccgggtgatgatggctgtgtgaacgactgccatggcccaccggaagcttgagagcgtggggagcggcatgttggaccatagggtgagaccaggtcctgtccctcacagccaggagcccgagagcgaggacatggagctgcccttggagggctatgtgcccgagggcctggagctggctgccctgcggccagagagccccgcgccagaggaacaggagtgccacaaccacagccccgatggggactccagctctgactacgtgaacaacacctctgaggaggaggactatgacgagggcctccctgaggaggaggagggcatcacctactacatccgctactgccctgaggacgacagctacctagagggcatggactgcaacggggaggagtacctggcccacagtgcacaccctgtggacactgatgagtgccaggaggcggtggaggagtggacggactcggcgggcccgcacccccacggccacgaggctgaaggcagccaggactacccagacggccaactgcccattccggaggatgagccctccgtccttgaggcccatgaccaggaagaagatggtcactactgtgccagcaaagagggctaccaggactactaccccgaggaggccaacgggaacaccggcgcctccccctaccgcctgaggcgtggggatggggacctggaggaccaggaggaggacattgaccagatcgtggcagagatcaagatgagtctgagcatgaccagcatcaccagcgccagtgaggccagccccgagcatgggcctgagccagggcctgaggactctgtagaggcctgcccacccatcaaggccagctgcagccccagcaggcacgaggcgaggcccaagtcgctgaacctccttcccgaggccaagcaccccggagacccccagagaggcttcaagcccaagaccaggaccccagaagagaggctgaagtggccccacgagcaggtttgcaatggtctggagcagccaaggaagcagcagcgctctgatctcaatggacctgttgacaataacaacattccagagacaaagaaggtggcatcatttccaagttttgtggctgttccagggccctgcgaaccagaagacctcatcgacgggatcatctttgctgccaattacctggggtccacccagctgctatcagaacggaacccttccaaaaacatcagaatgatgcaagcgcaggaggccgtcagccgggtcaagaggatgcaaaaggctgctaagatcaagaaaaaagcgaattctgagggggatgcccagacgctgacggaagtggacctcttcatttccacccagaggatcaaggttttaaatgcagacacgcaggaaaccatgatggaccacgccttgcgtaccatctcctacatcgccgacattgggaacattgtagtgctgatggccagacgccgcatgccccggtcagcctctcaggactgcatcgagaccacgcccggggcccaggaaggcaagaagcagtataagatgatctgccatgtgttcgagtcggaggatgcccagctcatcgcccagtctatcggccaggccttcagcgtggcctaccaggagttcctgcgagccaatggcatcaaccccgaagacttgagccagaaggaatacagcgacatcatcaacacccaggagatgtacaacgacgacctcatccacttctcaaactcggagaactgcaaggagctgcagctggagaagcacaagggcgagatcctgggcgtggtggtggtggagtcgggctggggctccatcctgcccacggtgatcctggccaacatgatgaatggcggcccggctgcccgctcggggaagctgagcatcggggaccagatcatgtccatcaatggcaccagcctggtggggctgcccctcgccacctgccaaggcatcatcaagggcctgaagaaccagacacaggtgaagctcaacattgtcagctgtcccccggtcaccacggtccttatcaagcggccagacctcaagtaccagctgggcttcagcgtgcagaatggaattatctgcagcctcatgagagggggcattgctgagcgagggggcgtccgtgtgggccaccgcatcatcgagatcaacgggcagagcgtggtggccacagcccacgagaagatagtccaagctctgtccaactcggtcggagagatccacatgaagaccatgcccgccgccatgttcaggctcctcacgggtcaggagaccccgctgtacatctaggccaccccagcctggccacgcagccaggacaccgggcagggccgcccgggcccagaggagctgggagccgggccgcagacttgaccccgacgccacagcccagccacggacgctggctccccaaagggtgtgccctcaccacccacttgatttttttcattttgccaaaaaggggtatgtctttatcaaaggagagtcacagaacaaatgtttgtttgtaaagcgttccaagtattttgccacgttctggactgtcttctccctgcacaagccagggtgtgtctcggtagctgtgcgtggtgtggagtgtgtgtctttcctccctgaagctgtgcggagcgaactggcgcctccgagggacgcggctcccggggcagggcagccgtcacccctgcctcccgcccccttggctgggacgtctggggtcctgtggggcccccacaatggtcccaaacagctgcctctgccactgactgcagggacacgggcagcctggctcccaggacacgacttgtaatgaaagtttggggacatgtgattgattgattgattgattgtaaataaaggatgatggccacaacatgaaaactccatatttatttagatgctattattactgtttggacttttattttggcaggcttttttccagactctagggttttccaatgtgactaatgaccacacctgcctctcccgtcgtctcttctgggcaccctcccacccggctgcatacccggccagggctcccacagagacaaggagggcacaggtgtctgccccctctttaaaatcgatctacacacatccacgcacatgcgaccccgaggaaacgaaacccactctagaaaacgcgaccttggccgcacctaaagcagccagccgtgagtgcagaccccttggccagcgtggcgcagtggccctgagcagtagtggcatgtgtgtagatcaagtcggatctagtccagctcggttcattagcgatccatgtaatctgacgtcatcttgtctcgaagtctctttttttggcccaggccttgaagaatacactgtgacttaagaagccttaccacgcagtaactaaagctttaggatgactgtattcgaggagtgccgtgtgttgcatgcagctacccgtaggaagacttcgcgcatatcactaataaacctgaagtcgtgatgann

SEQ ID NO: 378494 - DNA, 3282 bp, Homo sapiens
  misc_feature (42)..(42): n is a, c, g, or t
aggcggaacggccggggcgggggcgcaggccggcagccgcangcggtgcgggatgcgccccgcagccgcgccgcgtgcgcccggcagaggcggccctgcgtgccgtacgctgcgtccggggcgcgcccgccgctattcgggaagctattcagcttcccgggctcattagcagtcgcggtgtgcggctcggcgcgggctcacaaagagctcggcctcgcggactgagccggcggcagcggggcggggacggcggcgtacccgggcagcccagcgccctggccagtctcctgaatatttacgcgttgctgaatctcctgtggacaaaccaccaataggccaggactgtcctgtggacagacggggtgagcctcttcttgtgtctggagattctgaaaagatttgatcaccaggagatttttcgggacattaccaaaccactcattttagtggctgcctccgggtgatgatggctgtgtgaacgactgccatggcccaccggaagcttgagagcgtggggagcggcatgttggaccatagggtgagaccaggtcctgtccctcacagccaggagcccgagagcgaggacatggagctgcccttggagggctatgtgcccgagggcctggagctggctgccctgcggccagagagccccgcgccagaggaacaggagtgccacaaccacagccccgatggggactccagctctgactacgtgaacaacacctctgaggaggaggactatgacgagggcctccctgaggaggaggagggcatcacctactacatccgctactgccctgaggacgacagctacctagagggcatggactgcaacggggaggagtacctggcccacagtgcacaccctgtggacactgatgagtgccaggaggcggtggaggagtggacggactcggcgggcccgcacccccacggccacgaggctgaaggcagccaggactacccagacggccaactgcccattccggaggatgagccctccgtccttgaggcccatgaccaggaagaagatggtcactactgtgccagcaaagagggctaccaggactactaccccgaggaggccaacgggaacaccggcgcctccccctaccgcctgaggcgtggggatggggacctggaggaccaggaggaggacattgaccagatcgtggcagagatcaagatgagtctgagcatgaccagcatcaccagcgccagtgaggccagccccgagcatgggcctgagccagggcctgaggactctgtagaggcctgcccacccatcaaggccagctgcagccccagcaggcacgaggcgaggcccaagtcgctgaacctccttcccgaggccaagcaccccggagacccccagagaggcttcaagcccaagaccaggaccccagaagagaggctgaagtggccccacgagcaggtttgcaatggtctggagcagccaaggaagcagcagcgctctgatctcaatggacctgttgacaataacaacattccagagacaaagaaggtggcatcatttccaagttttgtggctgttccagggccctgcgaaccagaagacctcatcgacgggatcatctttgctgccaattacctggggtccacccagctgctatcagaacggaacccttccaaaaacatcagaatgatgcaagcgcaggaggccgtcagccgggtcaagaattctgagggggatgcccagacgctgacggaagtggacctcttcatttccacccagaggatcaaggttttaaatgcagacacgcaggaaaccatgatggaccacgccttgcgtaccatctcctacatcgccgacattgggaacattgtagtgctgatggccagacgccgcatgccccggtcagcctctcaggactgcatcgagaccacgcccggggcccaggaaggcaagaagcagtataagatgatctgccatgtgttcgagtcggaggatgcccagctcatcgcccagtctatcggccaggccttcagcgtggcctaccaggagttcctgcgagccaatggcatcaaccccgaagacttgagccagaaggaatacagcgacatcatcaacacccaggagatgtacaacgacgacctcatccacttctcaaactcggagaactgcaaggagctgcagctggagaagcacaagggcgagatcctgggcgtggtggtggtggagtcgggctggggctccatcctgcccacggtgatcctggccaacatgatgaatggcggcccggctgcccgctcggggaagctgagcatcggggaccagatcatgtccatcaatggcaccagcctggtggggctgcccctcgccacctgccaaggcatcatcaagggcctgaagaaccagacacaggtgaagctcaacattgtcagctgtcccccggtcaccacggtccttatcaagcggccagacctcaagtaccagctgggcttcagcgtgcagaatggaattatctgcagcctcatgagagggggcattgctgagcgagggggcgtccgtgtgggccaccgcatcatcgagatcaacgggcagagcgtggtggccacagcccacgagaagatagtccaagctctgtccaactcggtcggagagatccacatgaagaccatgcccgccgccatgttcaggctcctcacgggtcaggagaccccgctgtacatctaggccaccccagcctggccacgcagccaggacaccgggcagggccgcccgggcccagaggagctgggagccgggccgcagacttgaccccgacgccacagcccagccacggacgctggctccccaaagggtgtgccctcaccacccacttgatttttttcattttgccaaaaaggggtatgtctttatcaaaggagagtcacagaacaaatgtttgtttgtaaagcgttccaagtattttgccacgttctggactgtcttctccctgcacaagccagggtgtgtctcggtagctgtgcgtggtgtggagtgtgtgtctttcctccctgaagctgtgcggagcgaactggcgcctccgagggacgcggctcccggggcagggcagccgtcacccctgcctcccgcccccttggctgggacgtctggggtcctgtggggcccccacaatggtcccaaacagctgcctctgccactgactgcagggacacgggcagcctggctcccaggacacgacttgtaatgaaagtttggggacatgtgattgattgattgattgattgtaaataaaggatgatggccacaac

SEQ ID NO: 378495 - DNA, 1045 bp, Homo sapiens
aaatgaaagcaccataaaaattaactttgtcatttaaaatatattgtatttcagtttagtttaacaattattgtatgaatttacttttaggatctctgatttggatatgtctcatatatttttatacctaaacacttgcttttcatttcccacccattgcacagtatttagaaaatataggtaagcaaatttaagtagtaattcccaaaacaataataaccaaagacaagtcagaattaatgttttgacgtgtatctttccagtctttcatctaagcctattttttggcttatccttttttatattattctaagtcacattatgcacagatatcttatacatgtagaattacgcaaaccacccaggttttaagaaaatgtcaatggaggacgttaacttaattgtcaaaaaagtttagaactatgagggacttaggagataagctctggttccatgacttcgtgtctgaggagagtgaagcccctcagagtgcagtgggggcctgcgtgccagatgctccaattcctgagcacctgttccttgccctgccctctgctgagaagccactagaatcctttcctagaacaaggcagggtatgaataagatcagtttatttttaggtcattgaacaaatcaagccccatgctatcctccttacccatatttgccctttaataataaaggcaggaagcctatggttgaatgtttgccatgtgcaatttcccataaaacacaaagcagcagcgcaccgcgtggtggccaagagcaggcaagttatctgatttcctgtgctggtttcatcatgtgtagtgtgtagaaaatggctgcatctcatcaaggtgttataagggttctatcagatcatgggtacaaagtacttagcacagggcttgacctataagctctcaaatacttgtgcatataaatattatgtatgtaaagttactcaataataaaggcttattataatagtattatgtaatccagctgctgaattctaacacagttttatgataagtaggagtattaactatctgtttttga

SEQ ID NO: 378496 - DNA, 510 bp, Homo sapiens
ggaggtgatctagaggatcccaagctccaacaagactaaatgactctgaattcctgagaaaagggaagagggttaggacagaggaaatggaatcatttagtcaggtaaagggagcaaagccaccgaaggcagtggttggaggtgtagatgtgaggaagttgggttgagaccattcaccatcaaggcttgaagatgagtgtctgtttgtgtgtgtcatgttggctgtgagttgcagaagagagtatctggcctctagttgaggagcacttccggcttctgagctgaacatggtgtagaagagaggatactcaatccaaaaccctggctatctatgcagagggctgaccagttctacccatgtacccttccttccctcacccttcctcacaaacaggcatattgagagctgtctggcagtcaatccaggcgaggcagcaggtttgagaatgggcttgtccgcctggcacctgcttccccccacttccaccttcacccctccatcccatatat

SEQ ID NO: 378497 - DNA, 589 bp, Homo sapiens
ggccctctgctggtacgtgtccctttactgactaaatgacttccatttcctccgccttcctcttcaagtttttctttctgattgggtttcctgaccctgattgctggtatgggtaagaatgactctgaattcctgagaaaagggaagagggttaggacagaggaaatggaatcatttagtcaggtaaagggagcaaagccaccgaaggcagtggttggaggtgtagatgtgaggaagttgggttgagaccattcaccatcaaggcttgaagatgagtgtctgtttgtgtgtgtcatgttggctgtgagttgcagaagagagtatctggcctctagttgaggagcacttccggcttctgagctgaacatggtgtagaagagaggatactcaatccaaaaccctggctatctatgcagagggctgaccagttctacccatgtacccttccttccctcacccttcctcacaaacaggcatattgagagctgtctggcagtcaatccaggcgaggcagcaggtttgagaatgggcttgtccgcctggcacctgcttccccccacttccaccttcacccctccatcccatatat

SEQ ID NO: 378498 - DNA, 898 bp, Homo sapiens
ggctcactgcaacctctgcctctcaggttcaagcaattctcctgcctcagcctccgagtagctgggactacaggtatgtgccaccatgcccagctgatttttctatttttagtagagatggggtttcaccatgttggccaggctggtcttgaacttgtgacctcaagtgattcgcccaccttggcctcccaaagcactgggattacaggcatgagccaccgtgcctggcagaaaagcttcttttccagttctgaagagtgtgaaggtaggagagccagaattcagttctctcactttccaacccagtacctggagagagagtgtcttgctggtcactggggagtgataggatccggatgcccgccttcctcttcaagtttttctttctgattgggtttcctgaccctgattgctggtatgggtaagaatgactctgaattcctgagaaaagggaagagggttaggacagaggaaatggaatcatttagtcaggtaaagggagcaaagccaccgaaggcagtggttggaggtgtagatgtgaggaagttgggttgagaccattcaccatcaaggcttgaagatgagtgtctgtttgtgtgtgtcatgttggctgtgagttgcagaagagagtatctggcctctagttgaggagcacttccggcttctgagctgaacatggtgtagaagagaggatactcaatccaaaaccctggctatctatgcagagggctgaccagttctacccatgtacccttccttccctcacccttcctcacaaacaggcatattgagagctgtctggcagtcaatccaggcgaggcagcaggtttgagaatgggcttgtccgcctggcacctgcttccccccacttccaccttcacccctccatcccatatat

SEQ ID NO: 378499 - DNA, 280 bp, Homo sapiens
acttattcatgctcccaacaattctctgtggcaaagctttaccaccccactttgcagacaaggaaactgaggcccaaagactctgagtgatgaaactggagatcactctcaagtctctttcacagtaaacctttgggataagattctggccaagtcatttgggaggctgtgctccgtgtcccaatcatattagaatccaccatgggccgggtgcagtggctcacgcctgtcatcccagcactttgggaggtcgaggcgggcagatcacgaggtcaagaga

SEQ ID NO: 378500 - DNA, 1680 bp, Homo sapiens
tctaggatggagtaacagttcaacccccttagacccatcccttctctctctgtttctcctttgacttcgaagttaacaaaaacatttaatcgcattctaaatgcaaaagccccatgcaaacacttggaattgggaaaagaggagaatacaacagtttctgccctcaaggaacataaagacagagtcacagagaccttgaagaatggaggaggtagaaaaaggagaaatgcaggaaggaggtgtgttatggagttatccagtggaggctcgcatccagctttattttgcctccaaagatcttgcatcctacctgttaagaagcttggaatgccactattccattaaatcttaaaggaacttgagtctttcatttaaaaatgtgttcctaaaatgtaaatgtccctatgtgggacagtatttagccgacagtaaatttgagaggagggtctcaaggggcagtgtcaccaggaaaagagagaaaggctcctctccccaagtcaaaccttaccttacttaaccgattgtatttcctccctcagaggatgccatatctcagtacaggagagaaaatagaaggtagagagacttttacccaagcaccccctgaaccccaggtgtacacaactgaacctgatgcagtgacaatcacgttcacacataaaacatctggctaaaggctaagatcacttcggatttccgacatacattttcctaagcagtgcatttttctttaattttccttagaaaaagactgtaaagtagccccacaattcccacatcttcatactccaccctgcattcaagttttcctgggacaggtatctatgtgtgtgcatgaatctatttttacggcatatgtctaggaccccctacgaggagccaaagtttcagagagcccagcaactatgtaactccatggaagggaggcatgatattactctctgttcacaggagcgtacgcacagatcttttctcctcctcatggtcagttttctatttgtgattagtaattagcttctcttggtacgctacgatctattacaaaagccaaacattcagggggcgagctgaaatgacaaaatttggctataatttatgttggcccctgacatatatatttttttaatggtttggtctctaagcaactgatctcttagcaacaagaagcacctttataaaagatggcacacgaagagtgattgccagaaaagccacctggttcttaaacagccgcgcatcattagcaaaactcaccatcttcaagagtccaaaaactagaagtgaccagcagacccaggtaaccttgatatttgcaccattttcctggggaaaaaaaaaaaaaaaaaactcatgcaactattgaagagaacaaaattctttgaaatatgttcatttttgaggtcttattagttggtcttgactaacttttaataatagtatgtattcttttaaataactgctttttgatttttttaaaaaaacgtgatatttgtgatcagaaaacagttcacttgaaatatttcattggcatgagaatggaaggaggggaacaatctatctgtttcagaatttatttctgtaggttttcatttgatgggaaaaaaatccacatcatggcaaaaataggagtatacagaatgtcacccaagtggtgtgcactattagggaaatacgctgtat

SEQ ID NO: 378501 - DNA, 1417 bp, Homo sapiens
tctaggatggagtaacagttcaacccccttagacccatcccttctctctctgtttctcctttgacttcgaagttaacaaaaacatttaatcgcattctaaatgcaaaagccccatgcaaacacttggaattgggaaaagaggagaatacaacagtttctgccctcaaggaacataaagacagagtcacagagaccttgaagaatggaggaggtagaaaaaggagaaatgcaggaaggaggtgtgttatggagttatccagtggaggctcgcatccagctttattttgcctccaaagatcttgcatcctacctgttaagaagcttggaatgccactattccattaaatcttaaaggaacttgagtctttcatttaaaaatgtgttcctaaaatgtaaatgtccctatgtgggacagtatttagccgacagtaaatttgagaggagggtctcaaggggcagtgtcaccaggaaaagagagaaaggctcctctccccaagtcaaaccttaccttacttaaccgattgtatttcctccctcagaggatgccatatctcagtacaggagagaaaatagaaggtagagagacttttacccaagcaccccctgaaccccaggtgtacacaactgaacctgatgcagtgacaatcacgttcacacataaaacatctggctaaaggctaagatcacttcggatttccgacatacattttcctaagcagtgcatttttctttaattttccttagaaaaagactgtaaagtagccccacaattcccacatcttcatactccaccctgcattcaagttttcctgggacaggtatctatgtgtgtgcatgaatctatttttacggcatatgtctaggaccccctacgaggagccaaagtttcagagagcccagcaactatgtaactccatggaagggaggcatgatattactctctgttcacaggagcgtacgcacagatcttttctcctcctcatggtcagttttctatttgtgattagtaattagcttctcttggtacgctacgatctattacaaaagccaaacattcagggggcgagctgaaatgacaaaatttggctataatttatgttggcccctgacatatatatttttttaatggtttggtctctaagcaactgatctcttagcaacaagaagcacctttataaaagatggcacacgaagagtgattgccagaaaagccacctggttcttaaacagccgcgcatcattagcaaaactcaccatcttcaagagtccaaaaactagaagtgaccagcagacccaggtacccagggattgaagacttaaatgtctttccagaaaattggaattagaaatgagaattgttacttcatctgtactccttcaataaagattgcgtaattataaacccaaaaaaaaagca

SEQ ID NO: 378502 - DNA, 375 bp, Homo sapiens
gcaacctccgcctcccgggttcaaacgattctccaccctcagcctcctgagtagctgggattacaggagcctgccaccatgcacggctaatttttgtatttttagtagagacgggatttcaccatgttagccaggctggtctccaactcctgacctcaggtgatctacccgcctcgacctcccaaagtgctgggattacaggcctgagccaccgtcccgcaagagcatagtttgaaaaaaaacatatttcgtagtactcatatatgttttaattttttttaaaactattgtttccagaatactatctacattaaggcaaagtgagatgaaatcctcttggctggtggagcatgcgttaaaaaccttactatccac

SEQ ID NO: 378503 - DNA, 269 bp, Homo sapiens
gcaaaactccatctgaaaaaaaaaaaaaaaagaaaagaaaaagaaacctttgttttgcacagttccatcttaactgaaactcgtgcatgtcagaaccatgcaaaggttttgatatgcacaggttttatttaatatggtgccatgcaaaagctaggactacttgtatacccaaatgtgaactctgcagttgtatgtaatgttctataagtgttaattaggtcaatttggttagtagagttgttgaagtcttctaaattctcttttttttt

SEQ ID NO: 378504 - DNA, 325 bp, Homo sapiens
aatgtctgctgtttgtaagccacacaacctatggcattctcttatagcagtctgaatagactaagataataccataaggatctacctttgggactgtgtgctgttataataaaggctctgataagtcctgctagcgccgtttagaccaggggtttctaaactttttgaccacacaagttatttttccctttgcaagcaccttccatggaaatcttttgggaggctgaggcatgagaattgcttgaacccatgaagtgaaggttgcagtgaactgagatcatgccactgcactccagcctgggtgatggagtaagactctgtgtca

SEQ ID NO: 378505 - DNA, 366 bp, Homo sapiens
aaaaaaaaaaaaatgaaagaaacttgcccttttactttatatattcccatagtcacacacctagacctctgtttggccagattaccagatatatgtatgcaaagagaatttgtagtgaaaactgtcgagtcatattcaaatcctttctgtaatgaaaagctttttcctaaaatctgttggaaattgctcattggttaactacttctgtaaaagtatttggttgaaattccagagttttatgaggtgaaggataaaaagatggctcaaggcctactaaagtcaacctgcatcattagtccctttcagaagacaagaacctggattatggaaagaatcctgtttctgaatctgctatagtttctctcc

SEQ ID NO: 378506 - DNA, 503 bp, Homo sapiens
caaattgatatttcatataatttgttcattttaaacattgtatgagaaagcaggataaatttgatccctattaattcattttgtctggaagcagaagtcccaggcaaacattttaatatttctgtcttacttttgagagtaattgtagacatcattcttctttacccctaaatacttcagtttgtgctttctaagaacaaaaacattctcagctgggtatggtggctcacgcctgtaatcccagcactttgggacgccgaggcatgtggatcacttgaggtcaggagttcaagaccacactgggtaacatggcaaaaccccatctctactactaaaaatagaaaacttagctgggtatggtggcgcatgcctgtagtcccagctacttgggagactgaagcacaagaattgcttgaacacgggaggtggaggttgcagtgaaccgaaatcatgcccactacactgcagcctgggtgacaaagtgagactctttcaaaaaaaca

SEQ ID NO: 378507 - DNA, 318 bp, Homo sapiens
gctcgacaagcgattctcctgcctcagtctcctgagtagctgggattacagacgtgcaccaccacacccagctaatttttgtatttttagtagagacggggtttcaccatgttggccaggatggtctcgatctcctgaccttgtgatccgcttaccttggcctcccaaagtgctgggattacaggcgtgacgacacgtgcccagcctacattatttattatgattccagtttgcctctctaaatgtacactataatcttaaagcaactacaaaaataatttttaaaaacaggtaaaagtaataaaaagaggcaaactg

SEQ ID NO: 378508 - DNA, 152 bp, Homo sapiens
tcagttcaggtctctggcactactcctggatcactgtgacagaactgagtggttcttccaacttacagggacactcttcttttattggtgacatggggtcaatgatgttggctagatatgagagaaaaacacagtagggcatatatgatggt

SEQ ID NO: 378509 - DNA, 305 bp, Homo sapiens
agcccacgggttccttaccctggggttaggagtccttggatgtatttcagtgggtctgtgaactctatgaaattgtatgtaaagttctgtgtgtatgtgcatttttctgatgagagggtcaccagtttcctttagatcatcaaatgggtcagtgattcaaaaaagctttatgccaggcatcgtggctcacgcctgtactcatagcgctttgggagattgaggcgggaggattgcttgagcccaggagttccagaccagcctgtaacatagcgagacctcgtctctacaaaacaattaaaaaaaaa

SEQ ID NO: 378510 - DNA, 780 bp, Homo sapiens
tgcgcaggcccgctccccgagccctgccaaccatggtgaacttgggtctgtcccgggtggacgacgccgtggctgccaagcacccgggactcggggagtatgccgcatgccagtcacacgccttcatgaagggcgttttcaccttcgtcacaggcaccggcatggcctttggcttgcagatgttcattcagaggaagtttccataccctttgcagtggagcctcctagtggccgtggttgcaggctctgtggtcagctacggggtgacgagagtggagtcggagaaatgcaacaacctctggctcttcctggagaccgggcagctccccaaagacaggagcacagatcagagaagctaggagagctccagcaggggcacagaggattgggggcaggaggagtctggaacacagccttcatgccccctgaccccaggccgaccctccccacaccctagggtaccccagtcgtatcctctgtccgcatgtgtggccaggcctgacaaacacctgcagatggctgctgccccaacctgggacctgcccaggaggttggagcagaaagggctctccctggggtggtgtttctcctctagggtattgggatgcatgttctgcactgccagcagagagggtgtgtctgggggccaccacctatgggacacggggtcgaaggggcctgtacactctgtcatttcctttctagcccctgcatctccaacaagtccaaggtgacagctggtgctaggggcgtggggttaataaatggcttatccttctc

SEQ ID NO: 378511 - DNA, 816 bp, Homo sapiens
ccagtgcaggtgtgagctgccggtgctgcagacccatcacaaacctccccctcaaagaaagcacatccgcctggcagagctcctaagcctcgagcagctgccaggagactcatttcaattaggacacatgtctggaggccaccccaaggtggctggcgggcagagtgaggcaggaggccctgcaattccagggttgcccaggcactgagaatcctggctgtcatcataatgggctgaggttctggggacaatctgagtggcggctctgagcaagctgagcccagggaggctttgaggtacacagggtcccttggggggcctgagagcagccatgaggaggcacagtgagacagatgtggaagagcagacccaggagctgaagaccatcactcagctccagggtgagcctgcaccgccgtgaccagtctccctttcccgtctgggggtttctgggtgcacaactttttgtggggaaaagagagatcagattgttactgtctatgtagaaaaggaagacataagaaactccattttgatctgtactaagaaaaattgtttctgctttgagatgctattaacctgtaactttagccccaactctgtgctcacagaaacatgtgctgtattgaatcaaagattaatgcatttagggccgtgcaggatgtgctttgttaacaatgtgtttgcaggcagtatgcttggtaaaagtcatccccatcctccattcttgattaaccagggacacagtgcactgcagaaagccgcagggacctctgcccaggaaagcctgggaattgtccaaggtttccccccact

SEQ ID NO: 378512 - DNA, 877 bp, Homo sapiens
ggaggctgggggcactctcttgctaaggggctcagggcgtccgggtgggcataggggaggtgggacgtgtccaagcgcccagggtctcactcctccacagccaggtgtgcccagaggagggacaggagaggcggtgaaggaagagggcaggggatcgagccttcacccgcctctgccaccccgggactcggggagtatgccgcatgccagtcacacgccttcatgaagggcgttttcaccttcgtcacaggcaccggcatggcctttggcttgcagatgttcattcagaggaagtttccataccctttgcagtggagcctcctagtggccgtggttgcaggctctgtggtcagctacggggtgacgagagtggagtcggagaaatgcaacaacctctggctcttcctggagaccgggcagctccccaaagacaggagcacagatcagagaagctaggagagctccagcaggggcacagaggattgggggcaggaggagtctggaacacagccttcatgccccctgaccccaggccgaccctccccacaccctagggtaccccagtcgtatcctctgtccgcatgtgtggccaggcctgacaaacacctgcagatggctgctgccccaacctgggacctgcccaggaggttggagcagaaagggctctccctggggtggtgtttctcctctagggtattgggatgcatgttctgcactgccagcagagagggtgtgtctgggggccaccacctatgggacacggggtcgaaggggcctgtacactctgtcatttcctttctagcccctgcatctccaacaagtccaaggtgacagctggtgctaggggcgtggggttaataaatggcttatccttctc

SEQ ID NO: 378513 - DNA, 696 bp, Homo sapiens
tgcgcaggcccgctccccgagccctgccaaccatggtgaacttgggtctgtcccgggtggacgacgccgtggctgccaagcacccgggactcggggagtatgccgcatgccagtcacacgccttcatgaagggcgttttcaccttcgtcacagttgcaggctctgtggtcagctacggggtgacgagagtggagtcggagaaatgcaacaacctctggctcttcctggagaccgggcagctccccaaagacaggagcacagatcagagaagctaggagagctccagcaggggcacagaggattgggggcaggaggagtctggaacacagccttcatgccccctgaccccaggccgaccctccccacaccctagggtaccccagtcgtatcctctgtccgcatgtgtggccaggcctgacaaacacctgcagatggctgctgccccaacctgggacctgcccaggaggttggagcagaaagggctctccctggggtggtgtttctcctctagggtattgggatgcatgttctgcactgccagcagagagggtgtgtctgggggccaccacctatgggacacggggtcgaaggggcctgtacactctgtcatttcctttctagcccctgcatctccaacaagtccaaggtgacagctggtgctaggggcgtggggttaataaatggcttatccttctc

SEQ ID NO: 378514 - DNA, 871 bp, Homo sapiens
gtcctgcatgatctttccactttttgtttgttcattcgtacttcttttcttttgctgttacatctcctctcttagttggtaagtttctttgtttctttgctgctgtgtatcgactttgtctgtttacttgtgtttctttgatacttgcgtgctcttttttcgttgttttttctcttccttttcccgcgcggggcggcatgaaatcggttgccgggacccccgtggaagatcccggtatgaccccccgacccccttcgggattggttccaaaaacgtccgttccccccggcgtttttatgggggaaaccaagcccagttccaacccgggtttccttgggaaaacctttggcccaggttacaaaacaaggggccccgcccccccaaaagaaggtttaaaaaaattttttcgggcccaagccccccaaaaatttttttttttttttttttttttttttttgtatttttagtagagacagggtttcactatgttggccaggctggtctctaactcctgacctcatgatctgcctgcctccggcctcccagtgttgggattacaggcgtgagccaccgcacctggcctatacttgtagttacaaaaaacaaaccactatagcaaagctatcctgagcacgtatgtacctggttctgggctaaataattccttttacactcaattcatcctgatggcaaccttctgaacgagccatcatcttacaaatggggacacagaggagattaagtaactttcccaatgtcacacagctaaactagctggtcagaagctgccttggccttgaatcctgactctctgaccccaagcccatgtcttgagcccctctgtttcacttcaaagcagaactgtccccaa

SEQ ID NO: 378515 - DNA, 1281 bp, Homo sapiens
tgcgcaggcccgctccccgagccctgccaaccatggtgaacttgggtctgtcccgggtggacgacgccgtggctgccaagcacccggtaggctgcgtccaggtgtctgcggctgggagagaacgcaccctcccgccctgccctgactccccagcagggggcgccaagtcacctgcccgcaggtgctgggggcctggcaaggtgggccctggctatccccgggtacaggttgatggggacctcggctctttgcaggcaccggcatggcctttggcttgcagatgttcattcagaggaagtttccataccctttgcagtggagcctcctagtggccgtggttgcaggctctgtggtcagctacggggtgacgagagtggagtcggagaaatgcaacaacctctggctcttcctggagaccgggcagctccccaaagacaggagcacagatcagagaagctaggagagctccagcaggggcacagaggattgggggcaggaggagtctggaacacagccttcatgccccctgaccccaggccgaccctccccacaccctagggtaccccagtcgtatcctctgtccgcatgtgtggccaggcctgacaaacacctgcagatggctgctgccccaacctgggacctgcccaggaggttggagcagaaagggctctccctggggtggtgtttctcctctagggtattgggatgcatgttctgcactgccagcagagagggtgtgtctgggggccaccacctatgggacacggggtcgaaggggcctgtacactctgtcatttcctttctagcccctgcatctccaacaagtccaaggtgacagctggtgctaggggcgtggggttaataaatggcttatccttctctccacccaagtttccacctgaccaggtgaaaaacaaatcagaagggtaagatgatgacaggtcacatgaaacctttattaccctacagttgatatatgaggatcacatgcaagttacatactgaggatgtacagggaagttcccagcgctgaaccccagaattagacgttcgcatcagccccgtaggccacgtgacaccaccacagcctctctgtatgggggtctgcctctgtagcacttggcatgtaggggcagagcaaaaggggccaggctggccagagcctggctgctgggagaggagggacttgtgggccacgcccacctgcctatcattccccactcatctattagccaaagtcactccccagaggcagagctagcccgttgtagccgtgtctgt

SEQ ID NO: 378516 - DNA, 1263 bp, Homo sapiens
tgcgcaggcccgctccccgagccctgccaaccatggtgaacttgggtctgtcccgggtggacgacgccgtggctgccaagcacccgccaggtgtgcccagaggagggacaggagaggcggtgaaggaagagggcaggggatcgagccttcacccgcctctgccaccccgggactcggggagtatgccgcatgccagtcacacgccttcatgaagggcgttttcaccttcgtcacaggcaccggcatggcctttggcttgcagatgttcattcagaggaagtttccataccctttgcagtggagcctcctagtggccgtggttgcaggctctgtggtcagctacggggtgacgagagtggagtcggagaaatgcaacaacctctggctcttcctggagaccgggcagctccccaaagacaggagcacagatcagagaagctaggagagctccagcaggggcacagaggattgggggcaggaggagtctggaacacagccttcatgccccctgaccccaggccgaccctccccacaccctagggtaccccagtcgtatcctctgtccgcatgtgtggccaggcctgacaaacacctgcagatggctgctgccccaacctgggacctgcccaggaggttggagcagaaagggctctccctggggtggtgtttctcctctagggtattgggatgcatgttctgcactgccagcagagagggtgtgtctgggggccaccacctatgggacacggggtcgaaggggcctgtacactctgtcatttcctttctagcccctgcatctccaacaagtccaaggtgacagctggtgctaggggcgtggggttaataaatggcttatccttctctccacccaagtttccacctgaccaggtgaaaaacaaatcagaagggtaagatgatgacaggtcacatgaaacctttattaccctacagttgatatatgaggatcacatgcaagttacatactgaggatgtacagggaagttcccagcgctgaaccccagaattagacgttcgcatcagccccgtaggccacgtgacaccaccacagcctctctgtatgggggtctgcctctgtagcacttggcatgtaggggcagagcaaaaggggccaggctggccagagcctggctgctgggagaggagggacttgtgggccacgcccacctgcctatcattccccactcatctattagccaaagtcactccccagaggcagagctagcccgttgtagccgtgtctgt

SEQ ID NO: 378517 - DNA, 1400 bp, Homo sapiens
tgcgcaggcccgctccccgagccctgccaaccatggtgaacttgggtctgtcccgggtggacgacgccgtggctgccaagcacccgggactcggggagtatgccgcatgccagtcacacgccttcatgaagggcgttttcaccttcgtcacaggcaccggcatggcctttggcttgcagatgttcattcagaggaagtttccataccctttgcagtggagcctcctagtggccgtgggtgggtactccagggcccctgcctgggctctttgaggggtgggtttctgctagggttggggctgtggttctgcgtccctgactctgacatggagccccaggtctcggcgggagccccacctgagcccacccaccacgtctgtcaggaagtagcctgtgcccggttctcttagcctgggaagcacagaggccccagccctcttccatttcctgctccacagttgcaggctctgtggtcagctacggggtgacgagagtggagtcggagaaatgcaacaacctctggctcttcctggagaccgggcagctccccaaagacaggagcacagatcagagaagctaggagagctccagcaggggcacagaggattgggggcaggaggagtctggaacacagccttcatgccccctgaccccaggccgaccctccccacaccctagggtaccccagtcgtatcctctgtccgcatgtgtggccaggcctgacaaacacctgcagatggctgctgccccaacctgggacctgcccaggaggttggagcagaaagggctctccctggggtggtgtttctcctctagggtattgggatgcatgttctgcactgccagcagagagggtgtgtctgggggccaccacctatgggacacggggtcgaaggggcctgtacactctgtcatttcctttctagcccctgcatctccaacaagtccaaggtgacagctggtgctaggggcgtggggttaataaatggcttatccttctctccacccaagtttccacctgaccaggtgaaaaacaaatcagaagggtaagatgatgacaggtcacatgaaacctttattaccctacagttgatatatgaggatcacatgcaagttacatactgaggatgtacagggaagttcccagcgctgaaccccagaattagacgttcgcatcagccccgtaggccacgtgacaccaccacagcctctctgtatgggggtctgcctctgtagcacttggcatgtaggggcagagcaaaaggggccaggctggccagagcctggctgctgggagaggagggacttgtgggccacgcccacctgcctatcattccccactcatctattagccaaagtcactccccagaggcagagctagcccgttgtagccgtgtctgt

SEQ ID NO: 378518 - DNA, 2088 bp, Homo sapiens
gggggcatgtgaggaggggctctgctaggacctgtgccctgggctccagtcaccccagcatccggtgggcaggtttcccaccacccaacccgagggcttggcatctgtgagcccacatcctgcagcaggggccccctctggctctccggccagctaggggacacccgggccctcctctgcatacccccctaccacgtcgcctccgaacttggatggccaggaaggggtcccgcggctctctgctcctcgtggaagcagggatctcgctactgggctagcgtgggatacaagaggccctggggagaatgcctggaggagccagcggctgcgggtgcgcaaagggcccgctctagctcagccgccgccgctccgcagtatgaccagtggaccatctccaaggcctgcgggaaaaacttgcctttgcgactggcgcactgccgcagcaccatggaggtaaccaggcaggaggggcctcgagacccaaccttccccacccctgccagcacccccccactagatgttgcggagccgacgagggacggagcaggtgcccagccccaggttccctgtggggttgccacgagcctccacccgcccgcctgctggcgggctccatggcggccccctacgcaaccacgagtgggcggtgcccttcccgacccaggtggtgcgggagaagctgcgcaagtacgtcttcgaccgcgtgaacatgcacaacctactgatccacctggtgcggcggcgcgggcagaagctggagagcatgcagctggagctggacagcctgcggagccagcccgacgccagcaaggaggagctgcggctgctgcagatcatccgccagctggagaacaacatcgagaagacaatgatcaagatcatcaccagccagaacatccacctgctgtatttggacctgctggattatctgaagacagtgagcccagcggcccgggaagggcgggggtcaggggctgggatctgggaggggcgggagcgtcctggggcggagccgccccgcacccgccagggagagggagctctgcctgaccaccggctacgcaggacgccgaggcatgtggaaaacgtttttttaaacttcatttttggctattccaaaaaagcatatcgtggggtatatcagaattcttcggactttcttgcacgtattaaatgatttggtattgtttgtatcttgcctgtcattttctcattgcctgggcctctgagagtcagacaggtcctgcaccctcagaaagtccttgcacctttgagggtccgctgggcctgtaagcagggcttgctgccgtcccagccagcccacccgccctgctccctgcagacgaggccaaaggcagccagcagtccgattgtgagggaagacccccttcatgggaggctgagcaccgcccctcgggctgccacaaagcagaacctactccagatgggctgtagatagggagagcacaggaggtgctaagaggagcaacctgtggatggggcggggagccagctggaaacaccctcaccctaagactgggcaaaggggagctctggagagccatgcttcgggaaggtgacagcatggaagtgcagtttaggaggagtggtggacggaggctgcatcgcagctcttttcctgctgtggtcccagcccaggtggctctcagcaccgtcctctgcttgtccctcttgccttggcccctggtcctattggctcacctggaagccctgcccctctatgcttcctgggcccacccctctccccacccctgtccatgcccctccttcgcctgggtgctttctgttcctctggtagcgccttcttctgtttagaacatacacacttaaaaaacaattattcccggcctgggcatggtggctcatgcctgtaatcccagcactttgggaggccaaggcaggcggatcacttgaggtcaggagttctagaccagcctggggtgcgtgagcaggggttagcagatgacggttttagctgcccaagggcacgctggaagaggccaggttttggggaagaggatgaatctgtcttcaggcaggctgaatgcacttccgtgagttctaggt

SEQ ID NO: 378519 - DNA, 1824 bp, Homo sapiens
tgcgcaggcccgctccccgagccctgccaaccatggtgaacttgggtctgtcccgggtggacgacgccgtggctgccaagcacccggcaccggcatggcctttggcttgcagatgttcattcagaggaagtttccataccctttgcagtggagcctcctagtggccgtggttgcaggctctgtggtcagctacggggtgacgagagtggagtcggagaaatgcaacaacctctggctcttcctggagaccgggcagctccccaaagacaggagcacagagcagtgtcgggcactccagatccaaggggtgaaagagaatatggaccagaacaaggccacgctggccctcctgcgcagcaacatccgccgcggggcccaggactgggctttggccaagaaggtggtgcgggagaagctgcgcaagtacgtcttcgaccgcgtgaacatgcacaacctactgatccacctggtgcggcggcgcgggcagaagctggagagcatgcagctggagctggacagcctgcggagccagcccgacgccagcaaggaggagctgcggctgctgcagatcatccgccagctggagaacaacatcgagaagacaatgatcaagatcatcaccagccagaacatccacctgctgtatttggacctgctggattatctgaagacagtgagcccagcggcccgggaagggcgggggtcaggggctgggatctgggaggggcgggagcgtcctggggcggagccgccccgcacccgccagggagagggagctctgcctgaccaccggctacgcaggacgccgaggcatgtggaaaacgtttttttaaacttcatttttggctattccaaaaaagcatatcgtggggtatatcagaattcttcggactttcttgcacgtattaaatgatttggtattgtttgtatcttgcctgtcattttctcattgcctgggcctctgagagtcagacaggtcctgcaccctcagaaagtccttgcacctttgagggtccgctgggcctgtaagcagggcttgctgccgtcccagccagcccacccgccctgctccctgcagacgaggccaaaggcagccagcagtccgattgtgagggaagacccccttcatgggaggctgagcaccgcccctcgggctgccacaaagcagaacctactccagatgggctgtagatagggagagcacaggaggtgctaagaggagcaacctgtggatggggcggggagccagctggaaacaccctcaccctaagactgggcaaaggggagctctggagagccatgcttcgggaaggtgacagcatggaagtgcagtttaggaggagtggtggacggaggctgcatcgcagctcttttcctgctgtggtcccagcccaggtggctctcagcaccgtcctctgcttgtccctcttgccttggcccctggtcctattggctcacctggaagccctgcccctctatgcttcctgggcccacccctctccccacccctgtccatgcccctccttcgcctgggtgctttctgttcctctggtagcgccttcttctgtttagaacatacacacttaaaaaacaattattcccggcctgggcatggtggctcatgcctgtaatcccagcactttgggaggccaaggcaggcggatcacttgaggtcaggagttctagaccagcctggggtgcgtgagcaggggttagcagatgacggttttagctgcccaagggcacgctggaagaggccaggttttggggaagaggatgaatctgtcttcaggcaggctgaatgcacttccgtgagttctaggt

SEQ ID NO: 378520 - DNA, 742 bp, Homo sapiens
tgcgcaggcccgctccccgagccctgccaaccatggtgaacttgggtctgtcccgggtggacgacgccgtggctgccaagcacccgggactcggggagtatgccgcatgccagtcacacgccttcatgaagggcgttttcaccttcgtcacaggcaccggcatggcctttggcttgcagatgttcattcagaggaagtttccataccctttgcagtggagcctcctagtggccgtggttgcaggctctgtggtcagctacggggtgacgagagtggagtcggagaaatgcaacaacctctggctcttcctggagaccgggcagctccccaaagacaggagcacagatcagagaagctaggagagctccagcaggggcacagaggattgggggcaggaggagtctggaacacagccttcatgccccctgaccccaggccgaccctccccacaccctagggtaccccagtcgtatcctctgtccgcatgtgtggccaggcctgacaaacacctgcagatggctgctgccccaacccctggggtggtgtttctcctctagggtattgggatgcatgttctgcactgccagcagagagggtgtgtctgggggccaccacctatgggacacggggtcgaaggggcctgtacactctgtcatttcctttctagcccctgcatctccaacaagtccaaggtgacagctggtgctaggggcgtggggttaataaatggcttatccttctc

SEQ ID NO: 378521 - DNA, 715 bp, Homo sapiens
cctgatggcaaccttctgaacgagccatcatcttacaaatggggacacagaggagattaagtaactttcccaatgtcacacagctaaactagctggtcagaagctgccttggccttgaatcctgactctctgaccccaagcccatgtcttgagcccctctgtttcacttcaaagcagaactgtccccaacctccccgggtttcagtcagccttttctgcagagcatttcatcacaaactctctcagtctctctgggttgttggaccctaggtggtgaaagagtccaccaggccagcactgtccactccctgtgaaacacctttcatcaccgttgtgcccagcggggagtgggggaggtggctggggccacagaggagaacctatcactgttctcagggctcttagtcgggggataaaagctcggggcaactgcagcccactctgtaggggccacaagagaaccccattcaacacaggtgctggcaggataccccattgagctggacaagctgcagaacctcgtggtcaactactgctcagagctgtcggatatgaagatcatgtcccaagatgccatgatgatcacggatgaggtcaaggtgagctcagggcccagggctgggggccccccagggccagccctcttggatcttcggatggggtcaaggtgagctcagggcccagggctgggggccccccagggccagccctcttg

SEQ ID NO: 378522 - DNA, 1180 bp, Homo sapiens
tgcgcaggcccgctccccgagccctgccaaccatggtgaacttgggtctgtcccgggtggacgacgccgtggctgccaagcacccgggactcggggagtatgccgcatgccagtcacacgccttcatgaagggcgttttcaccttcgtcacaggcaccggcatggcctttggcttgcagatgttcattcagaggaagtttccataccctttgcagtggagcctcctagtggccgtggttgcaggctctgtggtcagctacggggtgacgagagtggagtcggagaaatgcaacaacctctggctcttcctggagaccgggcagctccccaaagacaggagcacagatcagagaagctaggagagctccagcaggggcacagaggattgggggcaggaggagtctggaacacagccttcatgccccctgaccccaggccgaccctccccacaccctagggtaccccagtcgtatcctctgtccgcatgtgtggccaggcctgacaaacacctgcagatggctgctgccccaacctgggacctgcccaggaggttggagcagaaagggctctccctggggtggtgtttctcctctagggtattgggatgcatgttctgcactgccagcagagagggtgtgtctgggggccaccacctatgggacacggggtcgaaggggcctgtacactctgtcatttcctttctagcccctgcatctccaacaagtccaaggtgacagctggtgctaggggcgtggggttaataaatggcttatccttctctccacccaagtttccacctgaccaggtgaaaaacaaatcagaagggtaagatgatgacaggtcacatgaaacctttattaccctacagttgatatatgaggatcacatgcaagttacatactgaggatgtacagggaagttcccagcgctgaaccccagaattagacgttcgcatcagccccgtaggccacgtgacaccaccacagcctctctgtatgggggtctgcctctgtagcacttggcatgtaggggcagagcaaaaggggccaggctggccagagcctggctgctgggagaggagggacttgtgggccacgcccacctgcctatcattccccactcatctattagccaaagtcactccccagaggcagagctagcccgttgtagccgtgtctgt

SEQ ID NO: 378523 - DNA, 713 bp, Homo sapiens
tgcgcaggcccgctccccgagccctgccaaccatggtgaacttgggtctgtcccgggtggacgacgccgtggctgccaagcacccggcaccggcatggcctttggcttgcagatgttcattcagaggaagtttccataccctttgcagtggagcctcctagtggccgtggttgcaggctctgtggtcagctacggggtgacgagagtggagtcggagaaatgcaacaacctctggctcttcctggagaccgggcagctccccaaagacaggagcacagatcagagaagctaggagagctccagcaggggcacagaggattgggggcaggaggagtctggaacacagccttcatgccccctgaccccaggccgaccctccccacaccctagggtaccccagtcgtatcctctgtccgcatgtgtggccaggcctgacaaacacctgcagatggctgctgccccaacctgggacctgcccaggaggttggagcagaaagggctctccctggggtggtgtttctcctctagggtattgggatgcatgttctgcactgccagcagagagggtgtgtctgggggccaccacctatgggacacggggtcgaaggggcctgtacactctgtcatttcctttctagcccctgcatctccaacaagtccaaggtgacagctggtgctaggggcgtggggttaataaatggcttatccttctc

SEQ ID NO: 378524 - DNA, 1187 bp, Homo sapiens
ccagtgcaggtgtgagctgccggtgctgcagacccatcacaaacctccccctcaaagaaagcacatccgcctggcagagctcctaagcctcgagcagctgccaggagactcatttcaattaggacacatgtctggaggccaccccaaggtggctggcgggcagagtgaggcaggaggccctgcaattccagggttgcccaggcactgagaatcctggctgtcatcataatgggctgaggttctggggacaatctgagtggcggctctgagcaagctgagcccagggaggctttgaggtacacagggtcccttggggggcctgagagcagccatgaggaggcacagtgagacagatgtggaagagcagacccaggagctgaagaccatcactcagctccaggagcagtgtcgggcactccagatccaaggggtgaaagagaatatggaccagaacaaggccacgctggccctcctgcgcagcaacatccgccgcggggcccaggactgggctttggccaagaaggtggtgcgggagaagctgcgcaagtacgtcttcgaccgcgtgaacatgcacaacctactgatccacctggtgcggcggcgcgggcagaagctggagagcatgcagctggagctggacagcctgcggagccagcccgacgccagcaaggaggagctgcggctgctgcagatcatccgccagctggagaacaacatcgagaagacaatgatcaagatcatcaccagccagaacatccacctgctgtatttggacctgctggattatctgaagacagtgctggcaggataccccattgagctggacaagctgcagaacctcgtggtcaactactgctcagagctgtcggatatgaagatcatgtcccaagatgccatgatgatcacggatgaggtccacgaggaacatgaggcaaagggaaggctccttcatcgaggagcgcggcaggggaacggtcaacagagaaaagtgtcgacagacccacgagggaccgcggaatacgcgggcgagggtggattcctcgaccgtggccggactgatgggggaaaagccccccggatggacccggggaagcgggggggaggcaaggggggcccgggaacgcctgcgaaagaagaaaccaaagcaggaccacgcgaagaggcgcggccctcagaaaagaacaggc

SEQ ID NO: 378525 - DNA, 1113 bp, Homo sapiens
tgcgcaggcccgctccccgagccctgccaaccatggtgaacttgggtctgtcccgggtggacgacgccgtggctgccaagcacccggcaccggcatggcctttggcttgcagatgttcattcagaggaagtttccataccctttgcagtggagcctcctagtggccgtggttgcaggctctgtggtcagctacggggtgacgagagtggagtcggagaaatgcaacaacctctggctcttcctggagaccgggcagctccccaaagacaggagcacagatcagagaagctaggagagctccagcaggggcacagaggattgggggcaggaggagtctggaacacagccttcatgccccctgaccccaggccgaccctccccacaccctagggtaccccagtcgtatcctctgtccgcatgtgtggccaggcctgacaaacacctgcagatggctgctgccccaacctgggacctgcccaggaggttggagcagaaagggctctccctggggtggtgtttctcctctagggtattgggatgcatgttctgcactgccagcagagagggtgtgtctgggggccaccacctatgggacacggggtcgaaggggcctgtacactctgtcatttcctttctagcccctgcatctccaacaagtccaaggtgacagctggtgctaggggcgtggggttaataaatggcttatccttctctccacccaagtttccacctgaccaggtgaaaaacaaatcagaagggtaagatgatgacaggtcacatgaaacctttattaccctacagttgatatatgaggatcacatgcaagttacatactgaggatgtacagggaagttcccagcgctgaaccccagaattagacgttcgcatcagccccgtaggccacgtgacaccaccacagcctctctgtatgggggtctgcctctgtagcacttggcatgtaggggcagagcaaaaggggccaggctggccagagcctggctgctgggagaggagggacttgtgggccacgcccacctgcctatcattccccactcatctattagccaaagtcactccccagaggcagagctagcccgttgtagccgtgtctgt

SEQ ID NO: 378526 - DNA, 1096 bp, Homo sapiens
tgcgcaggcccgctccccgagccctgccaaccatggtgaacttgggtctgtcccgggtggacgacgccgtggctgccaagcacccgggactcggggagtatgccgcatgccagtcacacgccttcatgaagggcgttttcaccttcgtcacagttgcaggctctgtggtcagctacggggtgacgagagtggagtcggagaaatgcaacaacctctggctcttcctggagaccgggcagctccccaaagacaggagcacagatcagagaagctaggagagctccagcaggggcacagaggattgggggcaggaggagtctggaacacagccttcatgccccctgaccccaggccgaccctccccacaccctagggtaccccagtcgtatcctctgtccgcatgtgtggccaggcctgacaaacacctgcagatggctgctgccccaacctgggacctgcccaggaggttggagcagaaagggctctccctggggtggtgtttctcctctagggtattgggatgcatgttctgcactgccagcagagagggtgtgtctgggggccaccacctatgggacacggggtcgaaggggcctgtacactctgtcatttcctttctagcccctgcatctccaacaagtccaaggtgacagctggtgctaggggcgtggggttaataaatggcttatccttctctccacccaagtttccacctgaccaggtgaaaaacaaatcagaagggtaagatgatgacaggtcacatgaaacctttattaccctacagttgatatatgaggatcacatgcaagttacatactgaggatgtacagggaagttcccagcgctgaaccccagaattagacgttcgcatcagccccgtaggccacgtgacaccaccacagcctctctgtatgggggtctgcctctgtagcacttggcatgtaggggcagagcaaaaggggccaggctggccagagcctggctgctgggagaggagggacttgtgggccacgcccacctgcctatcattccccactcatctattagccaaagtcactccccagaggcagagctagcccgttgtagccgtgtctgt

SEQ ID NO: 378527 - DNA, 1947 bp, Homo sapiens
ccagtgcaggtgtgagctgccggtgctgcagacccatcacaaacctccccctcaaagaaagcacatccgcctggcagagctcctaagcctcgagcagctgccaggagactcatttcaattaggacacatgtctggaggccaccccaaggtggctggcgggcagagtgaggcaggaggccctgcaattccagggttgcccaggcactgagaatcctggctgtcatcataatgggctgaggttctggggacaatctgagtggcggctctgagcaagctgagcccagggaggctttgaggtacacagggtcccttggggggcctgagagcagccatgaggaggcacagtgagacagatgtggaagagcagacccaggagctgaagaccatcactcagctccaggagcagtgtcgggcactccagatccaaggggtgaaagagaatatggaccagaacaaggccacgctggccctcctgcgcagcaacatccgccgcggggcccaggactgggctttggccaagaaggtggtgcgggagaagctgcgcaagtacgtcttcgaccgcgtgaacatgcacaacctactgatccacctggtgcggcggcgcgggcagaagctggagagcatgcagctggagctggacagcctgcggagccagcccgacgccagcaaggaggagctgcggctgctgcagatcatccgccagctggagaacaacatcgagaagacaatgatcaagatcatcaccagccagaacatccacctgctgtatttggacctgctggattatctgaagacagtgagcccagcggcccgggaagggcgggggtcaggggctgggatctgggaggggcgggagcgtcctggggcggagccgccccgcacccgccagggagagggagctctgcctgaccaccggctacgcaggacgccgaggcatgtggaaaacgtttttttaaacttcatttttggctattccaaaaaagcatatcgtggggtatatcagaattcttcggactttcttgcacgtattaaatgatttggtattgtttgtatcttgcctgtcattttctcattgcctgggcctctgagagtcagacaggtcctgcaccctcagaaagtccttgcacctttgagggtccgctgggcctgtaagcagggcttgctgccgtcccagccagcccacccgccctgctccctgcagacgaggccaaaggcagccagcagtccgattgtgagggaagacccccttcatgggaggctgagcaccgcccctcgggctgccacaaagcagaacctactccagatgggctgtagatagggagagcacaggaggtgctaagaggagcaacctgtggatggggcggggagccagctggaaacaccctcaccctaagactgggcaaaggggagctctggagagccatgcttcgggaaggtgacagcatggaagtgcagtttaggaggagtggtggacggaggctgcatcgcagctcttttcctgctgtggtcccagcccaggtggctctcagcaccgtcctctgcttgtccctcttgccttggcccctggtcctattggctcacctggaagccctgcccctctatgcttcctgggcccacccctctccccacccctgtccatgcccctccttcgcctgggtgctttctgttcctctggtagcgccttcttctgtttagaacatacacacttaaaaaacaattattcccggcctgggcatggtggctcatgcctgtaatcccagcactttgggaggccaaggcaggcggatcacttgaggtcaggagttctagaccagcctggggtgcgtgagcaggggttagcagatgacggttttagctgcccaagggcacgctggaagaggccaggttttggggaagaggatgaatctgtcttcaggcaggctgaatgcacttccgtgagttctaggt

SEQ ID NO: 378528 - DNA, 650 bp, Homo sapiens
tgcgcaggcccgctccccgagccctgccaaccatggtgaacttgggtctgtcccgggtggacgacgccgtggctgccaagcacccgggactcggggagtatgccgcatgccagtcacacgccttcatgaagggcgttttcaccttcgtcacaggcaccggcatggcctttggcttgcagatgttcattcagaggaagtttccataccctttgcagtggagcctcctagtggccgtggttgcaggctctgtggtcagctacggggtgacgagagtggagtcggagaaatgcaacaacctctggctcttcctggagaccgggcagctccccaaagacaggagcacagatcagagaagctaggagagctccagcaggggcacagaggattgggggcaggaggagtctggaacacagccttcatgccccctgaccccaggccgaccctccccacaccctagggtaccccagtcgtatcctctgtccgcatgtgtggccaggcctgacaaacacctgcagatggctgctgccccaacacggggtcgaaggggcctgtacactctgtcatttcctttctagcccctgcatctccaacaagtccaaggtgacagctggtgctaggggcgtggggttaataaatggcttatccttctc

SEQ ID NO: 378529 - DNA, 416 bp, Homo sapiens
cttagagttccttgagagacagactgggaagttgggagttcttattgcagctctctttccctcaggtcctcttctgttgtctcccaaggacttgcatttcaggattctagatacatattgtatttctggagcaagacaatttcaatcaggagaagcctatttctagtcattcattcaggacttcagataaaagcctgttttaagcagaaagctgccctgcctctagacctgattataggctcctgaaatctaagccagatatcttcctctttactaactgggttacaaatggacctcacacaacttaaacaccacaaatgaccagaactttaataacattcaccttgacgtgtttcattattggtaaagatgatatgactctgtcttcagaataaatctccagtgtttgaatgtga

SEQ ID NO: 378530 - DNA, 3280 bp, Homo sapiens
tggtattcccccggtatcagcagaggcgtgtacgggcactgctttaaaactgggaaggaggaagacgaggccagggagccggagggtcaccaaggtagatttccagcagcgctagtccagctgaacactttccagccttgtttttcagcagctttgaggaaaagtatagtgatccgtatgtgaaactttcattgtacgtagcggatgagaatagagaacttgctttggtccagacaaaaacaattaaaaagacactgaacccaaaatggaatgaagaattttatttcagggtaaacccatctaatcacagactcctatttgaagtatttgacgaaaatagactgacacgagacgacttcctgggccaggtggacgtgccccttagtcaccttccgacagaagatccaaccatggagcgaccctatacatttaaggactttctcctcagaccaagaagtcataagtctcgagttaagggatttttgcgattgaaaatggcctatatgccaaaaaatggaggtcaagatgaagaaaacagtgaccagagggatgacatggagcatggatgggaagttgttgactcaaatgactcggcttctcagcaccaagaggaacttcctcctcctcctctgcctcccgggtgggaagaaaaagtggacaatttaggccgaacttactatgtcaaccacaacaaccggaccactcagtggcacagaccaagcctgatggacgtgtcctcggagtcggacaataacatcagacagatcaaccaggaggcagcacaccggcgcttccgctcccgcaggcacatcagcgaagacttggagcccgagccctcggagggcggggatgtccccgagccttgggagaccatttcagaggaagtgaatatcgctggagactctctcggtctggctctgcccccaccaccggcctccccaggatctcggaccagccctcaggagctgtcagaggaactaagcagaaggcttcagatcactccagactccaatggggaacagttcagctctttgattcaaagagaaccctcctcaaggttgaggtcatgcagtgtcaccgacgcagttgcagaacagggccatctaccaccgcccagtgccccagctgggagagcgcgttcatcaactgtcacgggtggtgaggaaccaacgccatcagtggcctatgtacataccacgccgggtctgccttcaggctgggaagaaagaaaagatgctaaggggcgcacatactatgtcaatcataacaatcgaaccacaacttggactcgacctatcatgcagcttgcagaagatggtgcgtccggatcagccacaaacagtaacaaccatctaatcgagcctcagatccgccggcctcgtagcctcagctcgccaacagtaactttatctgccccgctggagggtgccaaggactcacccgtacgtcgggctgtgaaagacaccctttccaacccacagtccccacagccatcaccttacaactcccccaaaccacaacacaaagtcacacagagcttcttgccacccggctgggaaatgaggatagcgccaaacggccggcccttcttcattgatcataacacaaagactacaacctgggaagatccacgtttgaaatttccagtacatatgcggtcaaagacatctttaaaccccaatgaccttggcccccttcctcctggctgggaagaaagaattcacttggatggccgaacgttttatattgatcataatagcaaaattactcagtgggaagacccaagactgcagaacccagctattactggtccggctgtcccttactccagagaatttaagcagaaatatgactacttcaggaagaaattaaagaaacctgctgatatccccaataggtttgaaatgaaacttcacagaaataacatatttgaagagtcctatcggagaattatgtccgtgaaaagaccagatgtcctaaaagctagactgtggattgagtttgaatcagagaaaggtcttgactatgggggtgtggccagagaatggttcttcttactgtccaaagagatgttcaacccctactacggcctctttgagtactctgccacggacaactacacccttcagatcaaccctaattcaggcctctgtaatgaggatcatttgtcctacttcacttttattggaagagttgctggtctggccgtatttcatgggaagctcttagatggtttcttcattagaccattttacaagatgatgttgggaaagcagataaccctgaatgacatggaatctgtggatagtgaatattacaactctttgaaatggatcctggagaatgaccctactgagctggacctcatgttctgcatagacgaagaaaactttggacagacatatcaagtggatttgaagcccaatgggtcagaaataatggtcacaaatgaaaacaaaagggaatatatcgacttagtcatccagtggagatttgtgaacagggtccagaagcagatgaacgccttcttggagggattcacagaactacttcctattgatttgattaaaatttttgatgaaaatgagctggagttgctcatgtgcggcctcggtgatgtggatgtgaatgactggagacagcattctatttacaagaacggctactgcccaaaccaccccgtcattcagtggttctggaaggctgtgctactcatggacgccgaaaagcgtatccggttactgcagtttgtcacagggacatcgcgagtacctatgaatggatttgccgaactttatggttccaatggtcctcagctgtttacaatagagcaatggggcagtcctgagaaactgcccagagctcacacatgctttaatcgccttgacttacctccatatgaaacctttgaagatttacgagagaaacttctcatggccgtggaaaatgctcaaggatttgaaggggtggattaagcaccctgtgcctcgggggtggttgttcttcaagcaagttctgcttgcacttttgcatttgcctaacagacttttgcagaggcgatggcagagagcagctgcaggcatggtccctggagccgagccttcaccacgcactcgtccaagttcggatgcgggaacctggtcccagcttgagttcctgcctttcccaccacaaattatcaactggttgatgtgtacactaattacatttcaggaggacttaatgctatttatgttgtgcctctgcaggcaaagcccttaataaatattttacatccttt

SEQ ID NO: 378531 - DNA, 1000 bp, Homo sapiens
gtaaggagtagcattgctgttggcgcctaacacacagaaaaccaacgaacgaaaagacgtgcctttgaaacatgcgttgctttcagtggaacatctttaacaaacaacagatgtttaatgagtagcattgctgttggcgcctaacctcgcgtgcactgcattctcaaccccgtaccagtgcatcatcagaagccttcctcgtgaccataactctgtgtctgcagatatgtgttcccgtgtaagccagttttccccttttactcagactgatttcacctagattgtcacggtttccttcatgttaactttgcgtgactttgttcttcctttactactctgtatgtaatatatatacatatatacgtacatatgctgtccaaatatatttgtatatatttgtatagcatttttacacctttattgagtaatctggtttcgaaaggaggtgagagtttagtcccttctgcagttttctccaagctgtgtcctgtgaatttcaacccttggagcctaagaaaaccctaggaagatgatgttaatttgctgtcatttcctaattcaggatctatcatcaaatgaaacatgaaaaaaacagtgacttttaaggtgaaaagagtttcaagcattccaaataaattatcaatgtttcataactttttattataaacccacctcctaataggaagccaagtactatttgatacagtggtaaaaaccaaactaccttgaatttttttaaggcaacttatgaataatgctcattttcacagtcagaatagctttaaaatatggttgaatttgatacacacaggaagttttcttgaagaacaatcctttcgcttttcttttttcttgagagatctaaagagaaactgtagattgttttcctgacagcaaaagactaatgtgacaaaatgaagtcattgtaaagaagcgatgcaacttgtcaaatatttaataaagaattatggaagctggaacattttctaaaaaaaaaata

SEQ ID NO: 378532 - DNA, 1013 bp, Homo sapiens
gagaagcagccagggtaatgcacagatgctgctggagcgtgagagaatccacaggtcccatgcgtaagactagaggggtagggaggacgactgtggcatttttatatccgatacgacatgccgtggcttgcgcaaggttcgaattgagctgccctcgtgactgctgcctctgtgatctgctatggcaggtggagcctggaacaggtgtctgccttcctctgttgttatgatttgctagcttaccttcgcggcacagtgaccacatgctggcactgagggtggtcatttctcagtgtgtgatctcgcacctttcacatcctgcttttacatctggtaaattttcttcctagttgctcatgtgcggcctcggtgatgtggatgtgaatgactggagacagcattctatttacaagaacggctactgcccaaaccaccccgtcattcagtggttctggaaggtaactccggggcccagccccagccggtgtcctccacctgaggcaggattgagggctgtgtggcgccctccattgtggtctgacttcaggactgatgctggctttggggtctgttagagcttggactgctgggggagggaagaggcaaactgagccagcagccccgtggtggctcctctgtaactgtagcagacagctagacttgaatgaagttggtccctacaaaagcacactggccttccttgaccacctcgtgaaagtgacttttatttgagggactggtcctccaatgcgtaaatagaaatggggggcttctcagggcagaaacaggcttcagggatggctttgcaagatgccactttctgttaagaagtcgttttctcaatttttaaaatatattccaacaaatattttgatctgtgtatctttcaaccaaagataacacaacatttgatttattatcttagaggccgactgttcggtgtatcctgttcagcttaggagggaagtaaaataggaatgggttagtccaaaggagatatagtaaacaaactt

SEQ ID NO: 378533 - DNA, 512 bp, Homo sapiens
gagtcacagaggaagccatttccagagaggaacaaccgtgtagactgctttcctgggagtcaagttaaaacttctctcctgtgaccttgtcacccggcagtggaaagttacccttggctgcagccacgacttccgcatactcttcagaacttgctctgcccttgagttttccagctttcctttaatgcactaaacctttaatattgtattctcctaaatgagacgtctcgcatttgagcaggtaacactcggatcttccccatttcacggagagacatggatgagaatgaaggctgctgagtgggaggggcttatggggccagttttgaagaggcctcataccttttggccacattccattggccagaactttgtcatatgactgcacctaactacaaggaagactgggaaatgtagtcaagttgcatgtccgggtagaaaagggacacttttctgtggaatagctagcatgtttgtaactcaattttataaaccattttgaaacttttctt

SEQ ID NO: 378534 - DNA, 8270 bp, Homo sapiens
  misc_feature (126)..(126): n is a, c, g, or t
gcccgggtgggtggctgcgcagggccctacctgggcgggagcggctgcagagccctgtccacgcggtgcctccccagcacggcacctcccactccaggctgttggttacctggccgggagctggcngagaccaggatttctcctcgccgccgttgctgttgttaggggaaacagaccatctgcatctagacctgcctctctctccgctccccacttcagacgagctcttcctgcctggaatctgtgatccgtatgtgaaactttcattgtacgtagcggatgagaatagagaacttgctttggtccagacaaaaacaattaaaaagacactgaacccaaaatggaatgaagaattttatttcagggtaaacccatctaatcacagactcctatttgaagtatttgacgaaaatagactgacacgagacgacttcctgggccaggtggacgtgccccttagtcaccttccgacagaagatccaaccatggagcgaccctatacatttaaggactttctcctcagaccaagaagtcataagtctcgagttaagggatttttgcgattgaaaatggcctatatgccaaaaaatggaggtcaagatgaagaaaacagtgaccagagggatgacatggagcatggatgggaagttgttgactcaaatgactcggcttctcagcaccaagaggaacttcctcctcctcctctgcctcccgggtgggaagaaaaagtggacaatttaggccgaacttactatgtcaaccacaacaaccggaccactcagtggcacagaccaagcctgatggacgtgtcctcggagtcggacaataacatcagacagatcaaccaggaggcagcacaccggcgcttccgctcccgcaggcacatcagcgaagacttggagcccgagccctcggagggcggggatgtccccgagccttgggagaccatttcagaggaagtgaatatcgctggagactctctcggtctggctctgcccccaccaccggcctccccaggatctcggaccagccctcaggagctgtcagaggaactaagcagaaggcttcagatcactccagactccaatggggaacagttcagctctttgattcaaagagaaccctcctcaaggttgaggtcatgcagtgtcaccgacgcagttgcagaacagggccatctaccaccgccatcagtggcctatgtacataccacgccgggtctgccttcaggctgggaagaaagaaaagatgctaaggggcgcacatactatgtcaatcataacaatcgaaccacaacttggactcgacctatcatgcagcttgcagaagatggtgcgtccggatcagccacaaacagtaacaaccatctaatcgagcctcagatccgccggcctcgtagcctcagctcgccaacagtaactttatctgccccgctggagggtgccaaggactcacccgtacgtcgggctgtgaaagacaccctttccaacccacagtccccacagccatcaccttacaactcccccaaaccacaacacaaagtcacacagagcttcttgccacccggctgggaaatgaggatagcgccaaacggccggcccttcttcattgatcataacacaaagactacaacctgggaagatccacgtttgaaatttccagtacatatgcggtcaaagacatctttaaaccccaatgaccttggcccccttcctcctggctgggaagaaagaattcacttggatggccgaacgttttatattgatcataatagcaaaattactcagtgggaagacccaagactgcagaacccagctattactggtccggctgtcccttactccagagaatttaagcagaaatatgactacttcaggaagaaattaaagaaacctgctgatatccccaataggtttgaaatgaaacttcacagaaataacatatttgaagagtcctatcggagaattatgtccgtgaaaagaccagatgtcctaaaagctagactgtggattgagtttgaatcagagaaaggtcttgactatgggggtgtggccagagaatggttcttcttactgtccaaagagatgttcaacccctactacggcctctttgagtactctgccacggacaactacacccttcagatcaaccctaattcaggcctctgtaatgaggatcatttgtcctacttcacttttattggaagagttgctggtctggccgtatttcatgggaagctcttagatggtttcttcattagaccattttacaagatgatgttgggaaagcagataaccctgaatgacatggaatctgtggatagtgaatattacaactctttgaaatggatcctggagaatgaccctactgagctggacctcatgttctgcatagacgaagaaaactttggacagacatatcaagtggatttgaagcccaatgggtcagaaataatggtcacaaatgaaaacaaaagggaatatatcgacttagtcatccagtggagatttgtgaacagggtccagaagcagatgaacgccttcttggagggattcacagaactacttcctattgatttgattaaaatttttgatgaaaatgagctggagttgctcatgtgcggcctcggtgatgtggatgtgaatgactggagacagcattctatttacaagaacggctactgcccaaaccaccccgtcattcagtggttctggaaggctgtgctactcatggacgccgaaaagcgtatccggttactgcagtttgtcacagggacatcgcgagtacctatgaatggatttgccgaactttatggttccaatggtcctcagctgtttacaatagagcaatggggcagtcctgagaaactgcccagagctcacacatgctttaatcgccttgacttacctccatatgaaacctttgaagatttacgagagaaacttctcatggccgtggaaaatgctcaaggatttgaaggggtggattaagcaccctgtgcctcgggggtggttgttcttcaagcaagttctgcttgcacttttgcatttgcctaacagacttttgcagaggcgatggcagagagcagctgcaggcatggtccctggagccgagccttcaccacgcactcgtccaagttcggatgcgggaacctggtcccagcttgagttcctgcctttcccaccacaaattatcaactggttgatgtgtacactaattacatttcaggaggacttaatgctatttatgttgtgcctctgcaggcaaagcccttaataaatattttacatcctttctaatgacaatgaatggaattaatcactcaacaggtatagtattacgactcatgtttactttttaaaatgatttagaccgattttcagattttatttcgttatgattaaagatgtctcatgtacttggaaaagtgagcatttttttttttttttgtatttcactttcataccaggcttaatgtcaatgacatttttatttttgaagtactctgacacctccaccctctactttattagaattggaaggcaaatttttgtccaaaaacctacagacaagtactttgagagaatttccaatataatattagacataatgataattttttccatactcagaatgaaaaactggatattacgtttttgttttggggtttttttgtacaaatttagctaatagctacaggctgagagaattgtaacatagcatgacaaattttgtgttgacttgaaaggaatcacaccattattccttagaagtaattacatgtgttctaacacatttgagacagggttggactcccatttctcatccgagaaattacttaacccttcctggcgctgtacagtcatcttttattctatttcctctttgctgtttgtagtagagacattttgaatgaaacttggcactgcttgattcaaaactgtggaaaccagatctgtttagtctcctgtttgtatgcgtttgctaatggtagctaaataaccagtttttgttgtaaatgcaccaattctgaaggcactttatgtactacatggaggtcatatctggttttgtttttatttttttatcatgaacattaaatgtgatgatgatttcttttccctgcacacatctttccggtgcaatatctatcaattgtgaatctggctgctggtgtataaaaacctggatgtaaagctgagcctacagacctgtcctcaccaactgttttgtgatttctactcaactacaaagatttatttaatgtactcttaatctaactgagttttgttaccaatgacctgttgcatgcttcaataccgtgtactgcctgagttgtgcctcttgtgtgctagattaaaagtgagacagagacttgacttgatcctctgagctcaagctattgagctggtagtggcagaggactgagggtacctgcacagtttgattcttttccacgtgtaagtctccattgcagaattgtcgtgctttgagaaaacacctgaggcagtgtgggagttgaacgaccctgctgtcctttttaacctgtgttgtcctagaccctgtcggggcagtcaggggacactagagatttgatctcatgcgagtcatcaataggacaaaaaagttgtggtttggggaggtctgtttgttacataaaaaggacctttcggtgtaagaaattgccgtttttaccctgccctggctggcatgtgagaagccatggaaggttgtggttgtaaatgagttgtctaaaggggtgcagaggcctgaggtttctaaaagaaggtagatttctacagagctgagtgttggttcctttttcttattggttgaaaattacctggtagtgatcagaaaacttagatgctatgtactaaaaaaaaaaaaaaaaaaaaaaaaaaaaaaaaaaaattcccgctcatgagttttgactattggtgagatgttttccgctacagttaacatgacaaatgtctcagtggcaaaaatcccctttttgtaagcccccatagtctagaggcagttttctttttaagaatcatgccagagcctgagtcgagcagtatgctttcttggtttttgagagtaattgtgtaattgtagagggagaaatccaattctaacctaagaactgggattcttctgtcatcttgtaaaccgtatattgaaaaaaacagaatgtcactaaatgcatattaagtcaagtattggaaagtataaaagaaaaatcattctgacaatttctaagccagaagcaaacaagaattactgaaatctaccccatgaatacttggaaggcagtaattgtgagtgacacctcagttcatcaaccccttaataatatcagcttaattttaatgacaactaaatatgctgaagtgaggatttagtattttttaaaaaagcaaaacaaggttcagtagtcctcagcaattctccaagtttctctctttgcctaaaatggtcatagatcttgatttctctgaatcgtgatgaccacacccagtcatcttcacagcataattgcaggtggcagtaaagagagtgtgctgggtaaggagcagttgctgggtcattccttgggccccgacctgcccggggagtagccctgggggagagagggcagtgttgcctatcccagaggtcccagcagtcacactgctctgcaggccgggctctctttatagccagagaaatcaccttaatgcagtctctttagttgtctgctgaagctgtagttattatgggccacttacatgaggctgagaagtacgtgccggagctcacacactgcctgttgcggttctcttaacatcagttatcacagctgcctgtgggtcccgggtatttccattcctgccccttgttggcccgaggaaggatgtggaaagagcacctggcgggatgaaggtccaacagcctgtgcctctccactgctggccctggagccggcagcagtgaggcattcattgtctgtgttgcggtgtattcccagcttcagtgctcttttcctttttgcctgaaatgtttatgcttctctgcagccagtcctctaacaaatctcaagaacaaaggtaagacacttggtttttgtttccaggacccttcagaaggtgacatcagatattccctaaattcagacaatgagggatacagagcgacttggcatgtattatttctcccatgtaaggacaaagggacagattattattgttatttctgagacagagtcttgctctgtagctcaggctggagtgcagtggctcaatctcagctcaccacaacctctgcctcctggcttcaagcgattcttctgcctcagcctccccgaatagttgggattacaggcacccaccaccacgcctggctaatttttgtatttttagtagagatggtttcaccatgctggccaggctggtcttgaactcctgacctcaggtgatcctcccgcctcagccttccaaagtgctgggattacaagcatgagccaccgcacccggcctcacagtgacagattctgagaaacagcatgcaaaacatttgaaccattttctacatctcccattgttgcatagagagtgtgcaccgctgctatcttgccagatccacactggtcctcccgaaagccaggttcatacacagcaactttttaattattctaacagttacccattaacagtcgactcctgtatttctgagagtcttgtactcacctctgaaatttaaaaacgtataaagagagcctgggttaatcagttctgcagcccctacgtgacactgtgctagttctccttcttctgtctcctccttaccctggccctgcacccctgtacttaagagggagaggtgggaggtgctgtctggtatcatttgctgcctcgccagtagagggtgccgctgtgcagggtaactgcccgcctgctcccttcctgacctcccctgaccccgaagatcactacctctgtcattcaggcattggggtacatcctgataagtcgtgtcagaactgccaatttcaggactgagatgtgtttttaaaaaacaaatccttataaactccactttgtactttagattttaaaactggggaaaaatgtgatattctttggaccacttttttaatttatataagccttaatgaacagtgtctatacatttgcatacacacacccccaccccagagtgttctcagtatgtcagagaaagtgccacagcattaggacgggagcttggagaacgttttctagaaaagggttagcttcctgttggcatgaaattttccaagcaaacctcattaaacatctgttgtttgttaaagatgttccactgaaagcaacgcatgtttcaaaggcacgtctttccgttcgttggttttctgtgtgtaaggagtagcattgctgttggcgcctaacctcgcgtgcactgcattctcaaccccgtaccagtgcatcatcagaagccttcctcgtgaccataactctgtgtctgcagatatgtgttcccgtgtaagccagttttccccttttactcagactgatttcacctagattgtcacggtttccttcatgttaactttgcgtgactttgttcttcctttactactctgtatgtaatatatatacatatatacgtacatatgctgtccaaatatatttgtatatatttgtatagcatttttacacctttattgagtaatctggtttcgaaaggaggtgagagtttagtcccttctgcagttttctccaagctgtgtcctgtgaatttcaacccttggagcctaagaaaaccctaggaagatgatgttaatttgctgtcatttcctaattcaggatctatcatcaaatgaaacatgaaaaaaacagtgacttttaaggtgaaaagagtttcaagcattccaaataaattatcaatgtttcataactttttattataaacccacctcctaataggaagccaagtactatttgatacagtggtaaaaaccaaactaccttgaatttttttaaggcaacttatgaataatgctcattttcacagtcagaatagctttaaaatatggttgaatttgatacacacaggaagttttcttgaagaacaatcctttcgcttttcttttttcttgagagatctaaagagaaactgtagattgttttcctgacagcaaaagactaatgtgacaaaatgaagtcattgtaaagaagcgatgcaacttgtcaaatatttaataaagaattatggaagctggaacattttctaaaaaaaaaata

SEQ ID NO: 378535 - DNA, 7789 bp, Homo sapiens
agcggggcgtagggagaggcgccggggctgccgcccggtgctcggcgcgctctcgggagccgcccgcccgctggtcccgcagccttccgggaggaagcggtgccggcagcgtccagggcgcgctctcgggcaccctcacctgccggcgcccggccgcttacccggcagggcagtgcgcagggtagggtgcgggaccggggggacctggaggcagaggggagaaccggccgtccgcgccgcagcacagccgctgggagcgcctcagaccccgcgcggggcgccggctccatggcgaccgggctcggggagccggtctatggactttccgaagacggggagagtcccgtattctcagagtaaaagttgtttctggaattgatctcgccaaaaaggacatctttggagccagtgatccgtatgtgaaactttcattgtacgtagcggatgagaatagagaacttgctttggtccagacaaaaacaattaaaaagacactgaacccaaaatggaatgaagaattttatttcagggtaaacccatctaatcacagactcctatttgaagtatttgacgaaaatagactgacacgagacgacttcctgggccaggtggacgtgccccttagtcaccttccgacagaagatccaaccatggagcgaccctatacatttaaggactttctcctcagaccaagaagtcataagtctcgagttaagggatttttgcgattgaaaatggcctatatgccaaaaaatggaggtcaagatgaagaaaacagtgaccagagggatgacatggagcatggatgggaagttgttgactcaaatgactcggcttctcagcaccaagaggaacttcctcctcctcctctgcctcccgggtgggaagaaaaagtggacaatttaggccgaacttactatgtcaaccacaacaaccggaccactcagtggcacagaccaagcctgatggacgtgtcctcggagtcggacaataacatcagacagatcaaccaggaggcagcacaccggcgcttccgctcccgcaggcacatcagcgaagacttggagcccgagccctcggagggcggggatgtccccgagccttgggagaccatttcagaggaagtgaatatcgctggagactctctcggtctggctctgcccccaccaccggcctccccaggatctcggaccagccctcaggagctgtcagaggaactaagcagaaggcttcagatcactccagactccaatggggaacagttcagctctttgattcaaagagaaccctcctcaaggttgaggtcatgcagtgtcaccgacgcagttgcagaacagggccatctaccaccgccatcagtggcctatgtacataccacgccgggtctgccttcaggctgggaagaaagaaaagatgctaaggggcgcacatactatgtcaatcataacaatcgaaccacaacttggactcgacctatcatgcagcttgcagaagatggtgcgtccggatcagccacaaacagtaacaaccatctaatcgagcctcagatccgccggcctcgtagcctcagctcgccaacagtaactttatctgccccgctggagggtgccaaggactcacccgtacgtcgggctgtgaaagacaccctttccaacccacagtccccacagccatcaccttacaactcccccaaaccacaacacaaagtcacacagagcttcttgccacccggctgggaaatgaggatagcgccaaacggccggcccttcttcattgatcataacacaaagactacaacctgggaagatccacgtttgaaatttccagtacatatgcggtcaaagacatctttaaaccccaatgaccttggcccccttcctcctggctgggaagaaagaattcacttggatggccgaacgttttatattgatcataatagcaaaattactcagtgggaagacccaagactgcagaacccagctattactggtccggctgtcccttactccagagaatttaagcagaaatatgactacttcaggaagaaattaaagaaacctgctgatatccccaataggtttgaaatgaaacttcacagaaataacatatttgaagagtcctatcggagaattatgtccgtgaaaagaccagatgtcctaaaagctagactgtggattgagtttgaatcagagaaaggtcttgactatgggggtgtggccagagaatggttcttcttactgtccaaagagatgttcaacccctactacggcctctttgagtactctgccacggacaactacacccttcagatcaaccctaattcaggcctctgtaatgaggatcatttgtcctacttcacttttattggaagagttgctggtctggccgtatttcatgggaagctcttagatggtttcttcattagaccattttacaagatgatgttgggaaagcagataaccctgaatgacatggaatctgtggatagtgaatattacaactctttgaaatggatcctggagaatgaccctactgagctggacctcatgttctgcatagacgaagaaaactttggacagacatatcaagtggatttgaagcccaatgggtcagaaataatggtcacaaatgaaaacaaaagggaatatatcgacttagtcatccagtggagatttgtgaacagggtccagaagcagatgaacgccttcttggagggattcacagaactacttcctattgatttgattaaaatttttgatgaaaatgagctggagttgctcatgtgcggcctcggtgatgtggatgtgaatgactggagacagcattctatttacaagaacggctactgcccaaaccaccccgtcattcagtggttctggaaggctgtgctactcatggacgccgaaaagcgtatccggttactgcagtttgtcacagggacatcgcgagtacctatgaatggatttgccgaactttatggttccaatggtcctcagctgtttacaatagagcaatggggcagtcctgagaaactgcccagagctcacacatgctttaatcgccttgacttacctccatatgaaacctttgaagatttacgagagaaacttctcatggccgtggaaaatgctcaaggatttgaaggggtggattaagcaccctgtgcctcgggggtggttgttcttcaagcaagttctgcttgcacttttgcatttgcctaacagacttttgcagaggcgatggcagagagcagctgcaggcatggtccctggagccgagccttcaccacgcactcgtccaagttcggatgcgggaacctggtcccagcttgagttcctgcctttcccaccacaaattatcaactggttgatgtgtacactaattacatttcaggaggacttaatgctatttatgttgtgcctctgcaggcaaagcccttaataaatattttacatcctttctaatgacaatgaatggaattaatcactcaacaggtatagtattacgactcatgtttactttttaaaatgatttagaccgattttcagattttatttcgttatgattaaagatgtctcatgtacttggaaaagtgagcatttttttttttttttgtatttcactttcataccaggcttaatgtcaatgacatttttatttttgaagtactctgacacctccaccctctactttattagaattggaaggcaaatttttgtccaaaaacctacagacaagtactttgagagaatttccaatataatattagacataatgataattttttccatactcagaatgaaaaactggatattacgtttttgttttggggtttttttgtacaaatttagctaatagctacaggctgagagaattgtaacatagcatgacaaattttgtgttgacttgaaaggaatcacaccattattccttagaagtaattacatgtgttctaacacatttgagacagggttggactcccatttctcatccgagaaattacttaacccttcctggcgctgtacagtcatcttttattctatttcctctttgctgtttgtagtagagacattttgaatgaaacttggcactgcttgattcaaaactgtggaaaccagatctgtttagtctcctgtttgtatgcgtttgctaatggtagctaaataaccagtttttgttgtaaatgcaccaattctgaaggcactttatgtactacatggaggtcatatctggttttgtttttatttttttatcatgaacattaaatgtgatgatgatttcttttccctgcacacatctttccggtgcaatatctatcaattgtgaatctggctgctggtgtataaaaacctggatgtaaagctgagcctacagacctgtcctcaccaactgttttgtgatttctactcaactacaaagatttatttaatgtactcttaatctaactgagttttgttaccaatgacctgttgcatgcttcaataccgtgtactgcctgagttgtgcctcttgtgtgctagattaaaagtgagacagagacttgacttgatcctctgagctcaagctattgagctggtagtggcagaggactgagggtacctgcacagtttgattcttttccacgtgtaagtctccattgcagaattgtcgtgctttgagaaaacacctgaggcagtgtgggagttgaacgaccctgctgtcctttttaacctgtgttgtcctagaccctgtcggggcagtcaggggacactagagatttgatctcatgcgagtcatcaataggacaaaaaagttgtggtttggggaggtctgtttgttacataaaaaggacctttcggtgtaagaaattgccgtttttaccctgccctggctggcatgtgagaagccatggaaggttgtggttgtaaatgagttgtctaaaggggtgcagaggcctgaggtttctaaaagaaggtagatttctacagagctgagtgttggttcctttttcttattggttgaaaattacctggtagtgatcagaaaacttagatgctatgtactaaaaaaaaaaaaaaaaaaaaaaaaaaaaaaaaaaaattcccgctcatgagttttgactattggtgagatgttttccgctacagttaacatgacaaatgtctcagtggcaaaaatcccctttttgtaagcccccatagtctagaggcagttttctttttaagaatcatgccagagcctgagtcgagcagtatgctttcttggtttttgagagtaattgtgtaattgtagagggagaaatccaattctaacctaagaactgggattcttctgtcatcttgtaaaccgtatattgaaaaaaacagaatgtcactaaatgcatattaagtcaagtattggaaagtataaaagaaaaatcattctgacaatttctaagccagaagcaaacaagaattactgaaatctaccccatgaatacttggaaggcagtaattgtgagtgacacctcagttcatcaaccccttaataatatcagcttaattttaatgacaactaaatatgctgaagtgaggatttagtattttttaaaaaagcaaaacaaggttcagtagtcctcagcaattctccaagtttctctctttgcctaaaatggtcatagatcttgatttctctgaatcgtgatgaccacacccagtcatcttcacagcataattgcaggtggcagtaaagagagtgtgctgggtaaggagcagttgctgggtcattccttgggccccgacctgcccggggagtagccctgggggagagagggcagtgttgcctatcccagaggtcccagcagtcacactgctctgcaggccgggctctctttatagccagagaaatcaccttaatgcagtctctttagttgtctgctgaagctgtagttattatgggccacttacatgaggctgagaagtacgtgccggagctcacacactgcctgttgcggttctcttaacatcagttatcacagctgcctgtgggtcccgggtatttccattcctgccccttgttggcccgaggaaggatgtggaaagagcacctggcgggatgaaggtccaacagcctgtgcctctccactgctggccctggagccggcagcagtgaggcattcattgtctgtgttgcggtgtattcccagcttcagtgctcttttcctttttgcctgaaatgtttatgcttctctgcagccagtcctctaacaaatactcacctctgaaatttaaaaacgtataaagagagcctgggttaatcagttctgcagcccctacgtgacactgtgctagttctccttcttctgtctcctccttaccctggccctgcacccctgtacttaagagggagaggtgggaggtgctgtctggtatcatttgctgcctcgccagtagagggtgccgctgtgcagggtaactgcccgcctgctcccttcctgacctcccctgaccccgaagatcactacctctgtcattcaggcattggggtacatcctgataagtcgtgtcagaactgccaatttcaggactgagatgtgtttttaaaaaacaaatccttataaactccactttgtactttagattttaaaactggggaaaaatgtgatattctttggaccacttttttaatttatataagccttaatgaacagtgtctatacatttgcatacacacacccccaccccagagtgttctcagtatgtcagagaaagtgccacagcattaggacgggagcttggagaacgttttctagaaaagggttagcttcctgttggcatgaaattttccaagcaaacctcattaaacatctgttgtttgttaaagatgttccactgaaagcaacgcatgtttcaaaggcacgtctttccgttcgttggttttctgtgtgtaaggagtagcattgctgttggcgcctaacctcgcgtgcactgcattctcaaccccgtaccagtgcatcatcagaagccttcctcgtgaccataactctgtgtctgcagatatgtgttcccgtgtaagccagttttccccttttactcagactgatttcacctagattgtcacggtttccttcatgttaactttgcgtgactttgttcttcctttactactctgtatgtaatatatatacatatatacgtacatatgctgtccaaatatatttgtatatatttgtatagcatttttacacctttattgagtaatctggtttcgaaaggaggtgagagtttagtcccttctgcagttttctccaagctgtgtcctgtgaatttcaacccttggagcctaagaaaaccctaggaagatgatgttaatttgctgtcatttcctaattcaggatctatcatcaaatgaaacatgaaaaaaacagtgacttttaaggtgaaaagagtttcaagcattccaaataaattatcaatgtttcataactttttattataaacccacctcctaataggaagccaagtactatttgatacagtggtaaaaaccaaactaccttgaatttttttaaggcaacttatgaataatgctcattttcacagtcagaatagctttaaaatatggttgaatttgatacacacaggaagttttcttgaagaacaatcctttcgcttttcttttttcttgagagatctaaagagaaactgtagattgttttcctgacagcaaaagactaatgtgacaaaatgaagtcattgtaaagaagcgatgcaacttgtcaaatatttaataaagaattatggaagctggaacattttctaaaaaaaaaata

SEQ ID NO: 378536 - DNA, 8195 bp, Homo sapiens
tggtattcccccggtatcagcagaggcgtgtacgggcactgctttaaaactgggaaggaggaagacgaggccagggagccggagggtcaccaaggtagatttccagcagcgctagtccagctgaacactttccagccttgtttttcagcagctttgaggaaaagtatagtgatccgtatgtgaaactttcattgtacgtagcggatgagaatagagaacttgctttggtccagacaaaaacaattaaaaagacactgaacccaaaatggaatgaagaattttatttcagggtaaacccatctaatcacagactcctatttgaagtatttgacgaaaatagactgacacgagacgacttcctgggccaggtggacgtgccccttagtcaccttccgacagaagatccaaccatggagcgaccctatacatttaaggactttctcctcagaccaagaagtcataagtctcgagttaagggatttttgcgattgaaaatggcctatatgccaaaaaatggaggtcaagatgaagaaaacagtgaccagagggatgacatggagcatggatgggaagttgttgactcaaatgactcggcttctcagcaccaagaggaacttcctcctcctcctctgcctcccgggtgggaagaaaaagtggacaatttaggccgaacttactatgtcaaccacaacaaccggaccactcagtggcacagaccaagcctgatggacgtgtcctcggagtcggacaataacatcagacagatcaaccaggaggcagcacaccggcgcttccgctcccgcaggcacatcagcgaagacttggagcccgagccctcggagggcggggatgtccccgagccttgggagaccatttcagaggaagtgaatatcgctggagactctctcggtctggctctgcccccaccaccggcctccccaggatctcggaccagccctcaggagctgtcagaggaactaagcagaaggcttcagatcactccagactccaatggggaacagttcagctctttgattcaaagagaaccctcctcaaggttgaggtcatgcagtgtcaccgacgcagttgcagaacagggccatctaccaccgccatcagtggcctatgtacataccacgccgggtctgccttcaggctgggaagaaagaaaagatgctaaggggcgcacatactatgtcaatcataacaatcgaaccacaacttggactcgacctatcatgcagcttgcagaagatggtgcgtccggatcagccacaaacagtaacaaccatctaatcgagcctcagatccgccggcctcgtagcctcagctcgccaacagtaactttatctgccccgctggagggtgccaaggactcacccgtacgtcgggctgtgaaagacaccctttccaacccacagtccccacagccatcaccttacaactcccccaaaccacaacacaaagtcacacagagcttcttgccacccggctgggaaatgaggatagcgccaaacggccggcccttcttcattgatcataacacaaagactacaacctgggaagatccacgtttgaaatttccagtacatatgcggtcaaagacatctttaaaccccaatgaccttggcccccttcctcctggctgggaagaaagaattcacttggatggccgaacgttttatattgatcataatagcaaaattactcagtgggaagacccaagactgcagaacccagctattactggtccggctgtcccttactccagagaatttaagcagaaatatgactacttcaggaagaaattaaagaaacctgctgatatccccaataggtttgaaatgaaacttcacagaaataacatatttgaagagtcctatcggagaattatgtccgtgaaaagaccagatgtcctaaaagctagactgtggattgagtttgaatcagagaaaggtcttgactatgggggtgtggccagagaatggttcttcttactgtccaaagagatgttcaacccctactacggcctctttgagtactctgccacggacaactacacccttcagatcaaccctaattcaggcctctgtaatgaggatcatttgtcctacttcacttttattggaagagttgctggtctggccgtatttcatgggaagctcttagatggtttcttcattagaccattttacaagatgatgttgggaaagcagataaccctgaatgacatggaatctgtggatagtgaatattacaactctttgaaatggatcctggagaatgaccctactgagctggacctcatgttctgcatagacgaagaaaactttggacagacatatcaagtggatttgaagcccaatgggtcagaaataatggtcacaaatgaaaacaaaagggaatatatcgacttagtcatccagtggagatttgtgaacagggtccagaagcagatgaacgccttcttggagggattcacagaactacttcctattgatttgattaaaatttttgatgaaaatgagctggagttgctcatgtgcggcctcggtgatgtggatgtgaatgactggagacagcattctatttacaagaacggctactgcccaaaccaccccgtcattcagtggttctggaaggctgtgctactcatggacgccgaaaagcgtatccggttactgcagtttgtcacagggacatcgcgagtacctatgaatggatttgccgaactttatggttccaatggtcctcagctgtttacaatagagcaatggggcagtcctgagaaactgcccagagctcacacatgctttaatcgccttgacttacctccatatgaaacctttgaagatttacgagagaaacttctcatggccgtggaaaatgctcaaggatttgaaggggtggattaagcaccctgtgcctcgggggtggttgttcttcaagcaagttctgcttgcacttttgcatttgcctaacagacttttgcagaggcgatggcagagagcagctgcaggcatggtccctggagccgagccttcaccacgcactcgtccaagttcggatgcgggaacctggtcccagcttgagttcctgcctttcccaccacaaattatcaactggttgatgtgtacactaattacatttcaggaggacttaatgctatttatgttgtgcctctgcaggcaaagcccttaataaatattttacatcctttctaatgacaatgaatggaattaatcactcaacaggtatagtattacgactcatgtttactttttaaaatgatttagaccgattttcagattttatttcgttatgattaaagatgtctcatgtacttggaaaagtgagcatttttttttttttttgtatttcactttcataccaggcttaatgtcaatgacatttttatttttgaagtactctgacacctccaccctctactttattagaattggaaggcaaatttttgtccaaaaacctacagacaagtactttgagagaatttccaatataatattagacataatgataattttttccatactcagaatgaaaaactggatattacgtttttgttttggggtttttttgtacaaatttagctaatagctacaggctgagagaattgtaacatagcatgacaaattttgtgttgacttgaaaggaatcacaccattattccttagaagtaattacatgtgttctaacacatttgagacagggttggactcccatttctcatccgagaaattacttaacccttcctggcgctgtacagtcatcttttattctatttcctctttgctgtttgtagtagagacattttgaatgaaacttggcactgcttgattcaaaactgtggaaaccagatctgtttagtctcctgtttgtatgcgtttgctaatggtagctaaataaccagtttttgttgtaaatgcaccaattctgaaggcactttatgtactacatggaggtcatatctggttttgtttttatttttttatcatgaacattaaatgtgatgatgatttcttttccctgcacacatctttccggtgcaatatctatcaattgtgaatctggctgctggtgtataaaaacctggatgtaaagctgagcctacagacctgtcctcaccaactgttttgtgatttctactcaactacaaagatttatttaatgtactcttaatctaactgagttttgttaccaatgacctgttgcatgcttcaataccgtgtactgcctgagttgtgcctcttgtgtgctagattaaaagtgagacagagacttgacttgatcctctgagctcaagctattgagctggtagtggcagaggactgagggtacctgcacagtttgattcttttccacgtgtaagtctccattgcagaattgtcgtgctttgagaaaacacctgaggcagtgtgggagttgaacgaccctgctgtcctttttaacctgtgttgtcctagaccctgtcggggcagtcaggggacactagagatttgatctcatgcgagtcatcaataggacaaaaaagttgtggtttggggaggtctgtttgttacataaaaaggacctttcggtgtaagaaattgccgtttttaccctgccctggctggcatgtgagaagccatggaaggttgtggttgtaaatgagttgtctaaaggggtgcagaggcctgaggtttctaaaagaaggtagatttctacagagctgagtgttggttcctttttcttattggttgaaaattacctggtagtgatcagaaaacttagatgctatgtactaaaaaaaaaaaaaaaaaaaaaaaaaaaaaaaaaaaattcccgctcatgagttttgactattggtgagatgttttccgctacagttaacatgacaaatgtctcagtggcaaaaatcccctttttgtaagcccccatagtctagaggcagttttctttttaagaatcatgccagagcctgagtcgagcagtatgctttcttggtttttgagagtaattgtgtaattgtagagggagaaatccaattctaacctaagaactgggattcttctgtcatcttgtaaaccgtatattgaaaaaaacagaatgtcactaaatgcatattaagtcaagtattggaaagtataaaagaaaaatcattctgacaatttctaagccagaagcaaacaagaattactgaaatctaccccatgaatacttggaaggcagtaattgtgagtgacacctcagttcatcaaccccttaataatatcagcttaattttaatgacaactaaatatgctgaagtgaggatttagtattttttaaaaaagcaaaacaaggttcagtagtcctcagcaattctccaagtttctctctttgcctaaaatggtcatagatcttgatttctctgaatcgtgatgaccacacccagtcatcttcacagcataattgcaggtggcagtaaagagagtgtgctgggtaaggagcagttgctgggtcattccttgggccccgacctgcccggggagtagccctgggggagagagggcagtgttgcctatcccagaggtcccagcagtcacactgctctgcaggccgggctctctttatagccagagaaatcaccttaatgcagtctctttagttgtctgctgaagctgtagttattatgggccacttacatgaggctgagaagtacgtgccggagctcacacactgcctgttgcggttctcttaacatcagttatcacagctgcctgtgggtcccgggtatttccattcctgccccttgttggcccgaggaaggatgtggaaagagcacctggcgggatgaaggtccaacagcctgtgcctctccactgctggccctggagccggcagcagtgaggcattcattgtctgtgttgcggtgtattcccagcttcagtgctcttttcctttttgcctgaaatgtttatgcttctctgcagccagtcctctaacaaatctcaagaacaaaggtaagacacttggtttttgtttccaggacccttcagaaggtgacatcagatattccctaaattcagacaatgagggatacagagcgacttggcatgtattatttctcccatgtaaggacaaagggacagattattattgttatttctgagacagagtcttgctctgtagctcaggctggagtgcagtggctcaatctcagctcaccacaacctctgcctcctggcttcaagcgattcttctgcctcagcctccccgaatagttgggattacaggcacccaccaccacgcctggctaatttttgtatttttagtagagatggtttcaccatgctggccaggctggtcttgaactcctgacctcaggtgatcctcccgcctcagccttccaaagtgctgggattacaagcatgagccaccgcacccggcctcacagtgacagattctgagaaacagcatgcaaaacatttgaaccattttctacatctcccattgttgcatagagagtgtgcaccgctgctatcttgccagatccacactggtcctcccgaaagccaggttcatacacagcaactttttaattattctaacagttacccattaacagtcgactcctgtatttctgagagtcttgtactcacctctgaaatttaaaaacgtataaagagagcctgggttaatcagttctgcagcccctacgtgacactgtgctagttctccttcttctgtctcctccttaccctggccctgcacccctgtacttaagagggagaggtgggaggtgctgtctggtatcatttgctgcctcgccagtagagggtgccgctgtgcagggtaactgcccgcctgctcccttcctgacctcccctgaccccgaagatcactacctctgtcattcaggcattggggtacatcctgataagtcgtgtcagaactgccaatttcaggactgagatgtgtttttaaaaaacaaatccttataaactccactttgtactttagattttaaaactggggaaaaatgtgatattctttggaccacttttttaatttatataagccttaatgaacagtgtctatacatttgcatacacacacccccaccccagagtgttctcagtatgtcagagaaagtgccacagcattaggacgggagcttggagaacgttttctagaaaagggttagcttcctgttggcatgaaattttccaagcaaacctcattaaacatctgttgtttgttaaagatgttccactgaaagcaacgcatgtttcaaaggcacgtctttccgttcgttggttttctgtgtgtaaggagtagcattgctgttggcgcctaacctcgcgtgcactgcattctcaaccccgtaccagtgcatcatcagaagccttcctcgtgaccataactctgtgtctgcagatatgtgttcccgtgtaagccagttttccccttttactcagactgatttcacctagattgtcacggtttccttcatgttaactttgcgtgactttgttcttcctttactactctgtatgtaatatatatacatatatacgtacatatgctgtccaaatatatttgtatatatttgtatagcatttttacacctttattgagtaatctggtttcgaaaggaggtgagagtttagtcccttctgcagttttctccaagctgtgtcctgtgaatttcaacccttggagcctaagaaaaccctaggaagatgatgttaatttgctgtcatttcctaattcaggatctatcatcaaatgaaacatgaaaaaaacagtgacttttaaggtgaaaagagtttcaagcattccaaataaattatcaatgtttcataactttttattataaacccacctcctaataggaagccaagtactatttgatacagtggtaaaaaccaaactaccttgaatttttttaaggcaacttatgaataatgctcattttcacagtcagaatagctttaaaatatggttgaatttgatacacacaggaagttttcttgaagaacaatcctttcgcttttcttttttcttgagagatctaaagagaaactgtagattgttttcctgacagcaaaagactaatgtgacaaaatgaagtcattgtaaagaagcgatgcaacttgtcaaatatttaataaagaattatggaagctggaacattttctaaaaaaaaaata

SEQ ID NO: 378537 - DNA, 8352 bp, Homo sapiens
gagtcacagaggaagccatttccagagaggaacaaccgtgtagactgctttcctgggagtcaagttaaaacttctctcctgtgaccttgtcacccggcagtggaaagttacccttggctgcagccacgacttccgcatactcttcagaacttgctctgcccttgagttttccagctttcctttaatgcactaaacctttaatattgtattctcctaaatgagacgtctcgcatttgagcaggtaacactcggggagagtcccgtattctcagagtaaaagttgtttctggaattgatctcgccaaaaaggacatctttggagccagtgatccgtatgtgaaactttcattgtacgtagcggatgagaatagagaacttgctttggtccagacaaaaacaattaaaaagacactgaacccaaaatggaatgaagaattttatttcagggtaaacccatctaatcacagactcctatttgaagtatttgacgaaaatagactgacacgagacgacttcctgggccaggtggacgtgccccttagtcaccttccgacagaagatccaaccatggagcgaccctatacatttaaggactttctcctcagaccaagaagtcataagtctcgagttaagggatttttgcgattgaaaatggcctatatgccaaaaaatggaggtcaagatgaagaaaacagtgaccagagggatgacatggagcatggatgggaagttgttgactcaaatgactcggcttctcagcaccaagaggaacttcctcctcctcctctgcctcccgggtgggaagaaaaagtggacaatttaggccgaacttactatgtcaaccacaacaaccggaccactcagtggcacagaccaagcctgatggacgtgtcctcggagtcggacaataacatcagacagatcaaccaggaggcagcacaccggcgcttccgctcccgcaggcacatcagcgaagacttggagcccgagccctcggagggcggggatgtccccgagccttgggagaccatttcagaggaagtgaatatcgctggagactctctcggtctggctctgcccccaccaccggcctccccaggatctcggaccagccctcaggagctgtcagaggaactaagcagaaggcttcagatcactccagactccaatggggaacagttcagctctttgattcaaagagaaccctcctcaaggttgaggtcatgcagtgtcaccgacgcagttgcagaacagggccatctaccaccgccatcagtggcctatgtacataccacgccgggtctgccttcaggctgggaagaaagaaaagatgctaaggggcgcacatactatgtcaatcataacaatcgaaccacaacttggactcgacctatcatgcagcttgcagaagatggtgcgtccggatcagccacaaacagtaacaaccatctaatcgagcctcagatccgccggcctcgtagcctcagctcgccaacagtaactttatctgccccgctggagggtgccaaggactcacccgtacgtcgggctgtgaaagacaccctttccaacccacagtccccacagccatcaccttacaactcccccaaaccacaacacaaagtcacacagagcttcttgccacccggctgggaaatgaggatagcgccaaacggccggcccttcttcattgatcataacacaaagactacaacctgggaagatccacgtttgaaatttccagtacatatgcggtcaaagacatctttaaaccccaatgaccttggcccccttcctcctggctgggaagaaagaattcacttggatggccgaacgttttatattgatcataatagcaaaattactcagtgggaagacccaagactgcagaacccagctattactggtccggctgtcccttactccagagaatttaagcagaaatatgactacttcaggaagaaattaaagaaacctgctgatatccccaataggtttgaaatgaaacttcacagaaataacatatttgaagagtcctatcggagaattatgtccgtgaaaagaccagatgtcctaaaagctagactgtggattgagtttgaatcagagaaaggtcttgactatgggggtgtggccagagaatggttcttcttactgtccaaagagatgttcaacccctactacggcctctttgagtactctgccacggacaactacacccttcagatcaaccctaattcaggcctctgtaatgaggatcatttgtcctacttcacttttattggaagagttgctggtctggccgtatttcatgggaagctcttagatggtttcttcattagaccattttacaagatgatgttgggaaagcagataaccctgaatgacatggaatctgtggatagtgaatattacaactctttgaaatggatcctggagaatgaccctactgagctggacctcatgttctgcatagacgaagaaaactttggacagacatatcaagtggatttgaagcccaatgggtcagaaataatggtcacaaatgaaaacaaaagggaatatatcgacttagtcatccagtggagatttgtgaacagggtccagaagcagatgaacgccttcttggagggattcacagaactacttcctattgatttgattaaaatttttgatgaaaatgagctggagttgctcatgtgcggcctcggtgatgtggatgtgaatgactggagacagcattctatttacaagaacggctactgcccaaaccaccccgtcattcagtggttctggaaggctgtgctactcatggacgccgaaaagcgtatccggttactgcagtttgtcacagggacatcgcgagtacctatgaatggatttgccgaactttatggttccaatggtcctcagctgtttacaatagagcaatggggcagtcctgagaaactgcccagagctcacacatgctttaatcgccttgacttacctccatatgaaacctttgaagatttacgagagaaacttctcatggccgtggaaaatgctcaaggatttgaaggggtggattaagcaccctgtgcctcgggggtggttgttcttcaagcaagttctgcttgcacttttgcatttgcctaacagacttttgcagaggcgatggcagagagcagctgcaggcatggtccctggagccgagccttcaccacgcactcgtccaagttcggatgcgggaacctggtcccagcttgagttcctgcctttcccaccacaaattatcaactggttgatgtgtacactaattacatttcaggaggacttaatgctatttatgttgtgcctctgcaggcaaagcccttaataaatattttacatcctttctaatgacaatgaatggaattaatcactcaacaggtatagtattacgactcatgtttactttttaaaatgatttagaccgattttcagattttatttcgttatgattaaagatgtctcatgtacttggaaaagtgagcatttttttttttttttgtatttcactttcataccaggcttaatgtcaatgacatttttatttttgaagtactctgacacctccaccctctactttattagaattggaaggcaaatttttgtccaaaaacctacagacaagtactttgagagaatttccaatataatattagacataatgataattttttccatactcagaatgaaaaactggatattacgtttttgttttggggtttttttgtacaaatttagctaatagctacaggctgagagaattgtaacatagcatgacaaattttgtgttgacttgaaaggaatcacaccattattccttagaagtaattacatgtgttctaacacatttgagacagggttggactcccatttctcatccgagaaattacttaacccttcctggcgctgtacagtcatcttttattctatttcctctttgctgtttgtagtagagacattttgaatgaaacttggcactgcttgattcaaaactgtggaaaccagatctgtttagtctcctgtttgtatgcgtttgctaatggtagctaaataaccagtttttgttgtaaatgcaccaattctgaaggcactttatgtactacatggaggtcatatctggttttgtttttatttttttatcatgaacattaaatgtgatgatgatttcttttccctgcacacatctttccggtgcaatatctatcaattgtgaatctggctgctggtgtataaaaacctggatgtaaagctgagcctacagacctgtcctcaccaactgttttgtgatttctactcaactacaaagatttatttaatgtactcttaatctaactgagttttgttaccaatgacctgttgcatgcttcaataccgtgtactgcctgagttgtgcctcttgtgtgctagattaaaagtgagacagagacttgacttgatcctctgagctcaagctattgagctggtagtggcagaggactgagggtacctgcacagtttgattcttttccacgtgtaagtctccattgcagaattgtcgtgctttgagaaaacacctgaggcagtgtgggagttgaacgaccctgctgtcctttttaacctgtgttgtcctagaccctgtcggggcagtcaggggacactagagatttgatctcatgcgagtcatcaataggacaaaaaagttgtggtttggggaggtctgtttgttacataaaaaggacctttcggtgtaagaaattgccgtttttaccctgccctggctggcatgtgagaagccatggaaggttgtggttgtaaatgagttgtctaaaggggtgcagaggcctgaggtttctaaaagaaggtagatttctacagagctgagtgttggttcctttttcttattggttgaaaattacctggtagtgatcagaaaacttagatgctatgtactaaaaaaaaaaaaaaaaaaaaaaaaaaaaaaaaaaaattcccgctcatgagttttgactattggtgagatgttttccgctacagttaacatgacaaatgtctcagtggcaaaaatcccctttttgtaagcccccatagtctagaggcagttttctttttaagaatcatgccagagcctgagtcgagcagtatgctttcttggtttttgagagtaattgtgtaattgtagagggagaaatccaattctaacctaagaactgggattcttctgtcatcttgtaaaccgtatattgaaaaaaacagaatgtcactaaatgcatattaagtcaagtattggaaagtataaaagaaaaatcattctgacaatttctaagccagaagcaaacaagaattactgaaatctaccccatgaatacttggaaggcagtaattgtgagtgacacctcagttcatcaaccccttaataatatcagcttaattttaatgacaactaaatatgctgaagtgaggatttagtattttttaaaaaagcaaaacaaggttcagtagtcctcagcaattctccaagtttctctctttgcctaaaatggtcatagatcttgatttctctgaatcgtgatgaccacacccagtcatcttcacagcataattgcaggtggcagtaaagagagtgtgctgggtaaggagcagttgctgggtcattccttgggccccgacctgcccggggagtagccctgggggagagagggcagtgttgcctatcccagaggtcccagcagtcacactgctctgcaggccgggctctctttatagccagagaaatcaccttaatgcagtctctttagttgtctgctgaagctgtagttattatgggccacttacatgaggctgagaagtacgtgccggagctcacacactgcctgttgcggttctcttaacatcagttatcacagctgcctgtgggtcccgggtatttccattcctgccccttgttggcccgaggaaggatgtggaaagagcacctggcgggatgaaggtccaacagcctgtgcctctccactgctggccctggagccggcagcagtgaggcattcattgtctgtgttgcggtgtattcccagcttcagtgctcttttcctttttgcctgaaatgtttatgcttctctgcagccagtcctctaacaaatctcaagaacaaaggtaagacacttggtttttgtttccaggacccttcagaaggtgacatcagatattccctaaattcagacaatgagggatacagagcgacttggcatgtattatttctcccatgtaaggacaaagggacagattattattgttatttctgagacagagtcttgctctgtagctcaggctggagtgcagtggctcaatctcagctcaccacaacctctgcctcctggcttcaagcgattcttctgcctcagcctccccgaatagttgggattacaggcacccaccaccacgcctggctaatttttgtatttttagtagagatggtttcaccatgctggccaggctggtcttgaactcctgacctcaggtgatcctcccgcctcagccttccaaagtgctgggattacaagcatgagccaccgcacccggcctcacagtgacagattctgagaaacagcatgcaaaacatttgaaccattttctacatctcccattgttgcatagagagtgtgcaccgctgctatcttgccagatccacactggtcctcccgaaagccaggttcatacacagcaactttttaattattctaacagttacccattaacagtcgactcctgtatttctgagagtcttgtactcacctctgaaatttaaaaacgtataaagagagcctgggttaatcagttctgcagcccctacgtgacactgtgctagttctccttcttctgtctcctccttaccctggccctgcacccctgtacttaagagggagaggtgggaggtgctgtctggtatcatttgctgcctcgccagtagagggtgccgctgtgcagggtaactgcccgcctgctcccttcctgacctcccctgaccccgaagatcactacctctgtcattcaggcattggggtacatcctgataagtcgtgtcagaactgccaatttcaggactgagatgtgtttttaaaaaacaaatccttataaactccactttgtactttagattttaaaactggggaaaaatgtgatattctttggaccacttttttaatttatataagccttaatgaacagtgtctatacatttgcatacacacacccccaccccagagtgttctcagtatgtcagagaaagtgccacagcattaggacgggagcttggagaacgttttctagaaaagggttagcttcctgttggcatgaaattttccaagcaaacctcattaaacatctgttgtttgttaaagatgttccactgaaagcaacgcatgtttcaaaggcacgtctttccgttcgttggttttctgtgtgtaaggagtagcattgctgttggcgcctaacctcgcgtgcactgcattctcaaccccgtaccagtgcatcatcagaagccttcctcgtgaccataactctgtgtctgcagatatgtgttcccgtgtaagccagttttccccttttactcagactgatttcacctagattgtcacggtttccttcatgttaactttgcgtgactttgttcttcctttactactctgtatgtaatatatatacatatatacgtacatatgctgtccaaatatatttgtatatatttgtatagcatttttacacctttattgagtaatctggtttcgaaaggaggtgagagtttagtcccttctgcagttttctccaagctgtgtcctgtgaatttcaacccttggagcctaagaaaaccctaggaagatgatgttaatttgctgtcatttcctaattcaggatctatcatcaaatgaaacatgaaaaaaacagtgacttttaaggtgaaaagagtttcaagcattccaaataaattatcaatgtttcataactttttattataaacccacctcctaataggaagccaagtactatttgatacagtggtaaaaaccaaactaccttgaatttttttaaggcaacttatgaataatgctcattttcacagtcagaatagctttaaaatatggttgaatttgatacacacaggaagttttcttgaagaacaatcctttcgcttttcttttttcttgagagatctaaagagaaactgtagattgttttcctgacagcaaaagactaatgtgacaaaatgaagtcattgtaaagaagcgatgcaacttgtcaaatatttaataaagaattatggaagctggaacattttctaaaaaaaaaata

SEQ ID NO: 378538 - DNA, 7875 bp, Homo sapiens
actatataggcggccgggtctatttcatccgggctgcgtctactgtagcaggtggcgtggcctcatcaccttccgacagaagatccaaccatggagcgaccctatacatttaaggactttctcctcagaccaagaagtcataagtctcgagttaagggatttttgcgattgaaaatggcctatatgccaaaaaatggaggtcaagatgaagaaaacagtgaccagagggatgacatggagcatggatgggaagttgttgactcaaatgactcggcttctcagcaccaagaggaacttcctcctcctcctctgcctcccgggtgggaagaaaaagtggacaatttaggccgaacttactatgtcaaccacaacaaccggaccactcagtggcacagaccaagcctgatggacgtgtcctcggagtcggacaataacatcagacagatcaaccaggaggcagcacaccggcgcttccgctcccgcaggcacatcagcgaagacttggagcccgagccctcggagggcggggatgtccccgagccttgggagaccatttcagaggaagtgaatatcgctggagactctctcggtctggctctgcccccaccaccggcctccccaggatctcggaccagccctcaggagctgtcagaggaactaagcagaaggcttcagatcactccagactccaatggggaacagttcagctctttgattcaaagagaaccctcctcaaggttgaggtcatgcagtgtcaccgacgcagttgcagaacagggccatctaccaccgccatcagtggcctatgtacataccacgccgggtctgccttcaggctgggaagaaagaaaagatgctaaggggcgcacatactatgtcaatcataacaatcgaaccacaacttggactcgacctatcatgcagcttgcagaagatggtgcgtccggatcagccacaaacagtaacaaccatctaatcgagcctcagatccgccggcctcgtagcctcagctcgccaacagtaactttatctgccccgctggagggtgccaaggactcacccgtacgtcgggctgtgaaagacaccctttccaacccacagtccccacagccatcaccttacaactcccccaaaccacaacacaaagtcacacagagcttcttgccacccggctgggaaatgaggatagcgccaaacggccggcccttcttcattgatcataacacaaagactacaacctgggaagatccacgtttgaaatttccagtacatatgcggtcaaagacatctttaaaccccaatgaccttggcccccttcctcctggctgggaagaaagaattcacttggatggccgaacgttttatattgatcataatagcaaaattactcagtgggaagacccaagactgcagaacccagctattactggtccggctgtcccttactccagagaatttaagcagaaatatgactacttcaggaagaaattaaagaaacctgctgatatccccaataggtttgaaatgaaacttcacagaaataacatatttgaagagtcctatcggagaattatgtccgtgaaaagaccagatgtcctaaaagctagactgtggattgagtttgaatcagagaaaggtcttgactatgggggtgtggccagagaatggttcttcttactgtccaaagagatgttcaacccctactacggcctctttgagtactctgccacggacaactacacccttcagatcaaccctaattcaggcctctgtaatgaggatcatttgtcctacttcacttttattggaagagttgctggtctggccgtatttcatgggaagctcttagatggtttcttcattagaccattttacaagatgatgttgggaaagcagataaccctgaatgacatggaatctgtggatagtgaatattacaactctttgaaatggatcctggagaatgaccctactgagctggacctcatgttctgcatagacgaagaaaactttggacagacatatcaagtggatttgaagcccaatgggtcagaaataatggtcacaaatgaaaacaaaagggaatatatcgacttagtcatccagtggagatttgtgaacagggtccagaagcagatgaacgccttcttggagggattcacagaactacttcctattgatttgattaaaatttttgatgaaaatgagctggagttgctcatgtgcggcctcggtgatgtggatgtgaatgactggagacagcattctatttacaagaacggctactgcccaaaccaccccgtcattcagtggttctggaaggctgtgctactcatggacgccgaaaagcgtatccggttactgcagtttgtcacagggacatcgcgagtacctatgaatggatttgccgaactttatggttccaatggtcctcagctgtttacaatagagcaatggggcagtcctgagaaactgcccagagctcacacatgctttaatcgccttgacttacctccatatgaaacctttgaagatttacgagagaaacttctcatggccgtggaaaatgctcaaggatttgaaggggtggattaagcaccctgtgcctcgggggtggttgttcttcaagcaagttctgcttgcacttttgcatttgcctaacagacttttgcagaggcgatggcagagagcagctgcaggcatggtccctggagccgagccttcaccacgcactcgtccaagttcggatgcgggaacctggtcccagcttgagttcctgcctttcccaccacaaattatcaactggttgatgtgtacactaattacatttcaggaggacttaatgctatttatgttgtgcctctgcaggcaaagcccttaataaatattttacatcctttctaatgacaatgaatggaattaatcactcaacaggtatagtattacgactcatgtttactttttaaaatgatttagaccgattttcagattttatttcgttatgattaaagatgtctcatgtacttggaaaagtgagcatttttttttttttttgtatttcactttcataccaggcttaatgtcaatgacatttttatttttgaagtactctgacacctccaccctctactttattagaattggaaggcaaatttttgtccaaaaacctacagacaagtactttgagagaatttccaatataatattagacataatgataattttttccatactcagaatgaaaaactggatattacgtttttgttttggggtttttttgtacaaatttagctaatagctacaggctgagagaattgtaacatagcatgacaaattttgtgttgacttgaaaggaatcacaccattattccttagaagtaattacatgtgttctaacacatttgagacagggttggactcccatttctcatccgagaaattacttaacccttcctggcgctgtacagtcatcttttattctatttcctctttgctgtttgtagtagagacattttgaatgaaacttggcactgcttgattcaaaactgtggaaaccagatctgtttagtctcctgtttgtatgcgtttgctaatggtagctaaataaccagtttttgttgtaaatgcaccaattctgaaggcactttatgtactacatggaggtcatatctggttttgtttttatttttttatcatgaacattaaatgtgatgatgatttcttttccctgcacacatctttccggtgcaatatctatcaattgtgaatctggctgctggtgtataaaaacctggatgtaaagctgagcctacagacctgtcctcaccaactgttttgtgatttctactcaactacaaagatttatttaatgtactcttaatctaactgagttttgttaccaatgacctgttgcatgcttcaataccgtgtactgcctgagttgtgcctcttgtgtgctagattaaaagtgagacagagacttgacttgatcctctgagctcaagctattgagctggtagtggcagaggactgagggtacctgcacagtttgattcttttccacgtgtaagtctccattgcagaattgtcgtgctttgagaaaacacctgaggcagtgtgggagttgaacgaccctgctgtcctttttaacctgtgttgtcctagaccctgtcggggcagtcaggggacactagagatttgatctcatgcgagtcatcaataggacaaaaaagttgtggtttggggaggtctgtttgttacataaaaaggacctttcggtgtaagaaattgccgtttttaccctgccctggctggcatgtgagaagccatggaaggttgtggttgtaaatgagttgtctaaaggggtgcagaggcctgaggtttctaaaagaaggtagatttctacagagctgagtgttggttcctttttcttattggttgaaaattacctggtagtgatcagaaaacttagatgctatgtactaaaaaaaaaaaaaaaaaaaaaaaaaaaaaaaaaaaattcccgctcatgagttttgactattggtgagatgttttccgctacagttaacatgacaaatgtctcagtggcaaaaatcccctttttgtaagcccccatagtctagaggcagttttctttttaagaatcatgccagagcctgagtcgagcagtatgctttcttggtttttgagagtaattgtgtaattgtagagggagaaatccaattctaacctaagaactgggattcttctgtcatcttgtaaaccgtatattgaaaaaaacagaatgtcactaaatgcatattaagtcaagtattggaaagtataaaagaaaaatcattctgacaatttctaagccagaagcaaacaagaattactgaaatctaccccatgaatacttggaaggcagtaattgtgagtgacacctcagttcatcaaccccttaataatatcagcttaattttaatgacaactaaatatgctgaagtgaggatttagtattttttaaaaaagcaaaacaaggttcagtagtcctcagcaattctccaagtttctctctttgcctaaaatggtcatagatcttgatttctctgaatcgtgatgaccacacccagtcatcttcacagcataattgcaggtggcagtaaagagagtgtgctgggtaaggagcagttgctgggtcattccttgggccccgacctgcccggggagtagccctgggggagagagggcagtgttgcctatcccagaggtcccagcagtcacactgctctgcaggccgggctctctttatagccagagaaatcaccttaatgcagtctctttagttgtctgctgaagctgtagttattatgggccacttacatgaggctgagaagtacgtgccggagctcacacactgcctgttgcggttctcttaacatcagttatcacagctgcctgtgggtcccgggtatttccattcctgccccttgttggcccgaggaaggatgtggaaagagcacctggcgggatgaaggtccaacagcctgtgcctctccactgctggccctggagccggcagcagtgaggcattcattgtctgtgttgcggtgtattcccagcttcagtgctcttttcctttttgcctgaaatgtttatgcttctctgcagccagtcctctaacaaatctcaagaacaaaggtaagacacttggtttttgtttccaggacccttcagaaggtgacatcagatattccctaaattcagacaatgagggatacagagcgacttggcatgtattatttctcccatgtaaggacaaagggacagattattattgttatttctgagacagagtcttgctctgtagctcaggctggagtgcagtggctcaatctcagctcaccacaacctctgcctcctggcttcaagcgattcttctgcctcagcctccccgaatagttgggattacaggcacccaccaccacgcctggctaatttttgtatttttagtagagatggtttcaccatgctggccaggctggtcttgaactcctgacctcaggtgatcctcccgcctcagccttccaaagtgctgggattacaagcatgagccaccgcacccggcctcacagtgacagattctgagaaacagcatgcaaaacatttgaaccattttctacatctcccattgttgcatagagagtgtgcaccgctgctatcttgccagatccacactggtcctcccgaaagccaggttcatacacagcaactttttaattattctaacagttacccattaacagtcgactcctgtatttctgagagtcttgtactcacctctgaaatttaaaaacgtataaagagagcctgggttaatcagttctgcagcccctacgtgacactgtgctagttctccttcttctgtctcctccttaccctggccctgcacccctgtacttaagagggagaggtgggaggtgctgtctggtatcatttgctgcctcgccagtagagggtgccgctgtgcagggtaactgcccgcctgctcccttcctgacctcccctgaccccgaagatcactacctctgtcattcaggcattggggtacatcctgataagtcgtgtcagaactgccaatttcaggactgagatgtgtttttaaaaaacaaatccttataaactccactttgtactttagattttaaaactggggaaaaatgtgatattctttggaccacttttttaatttatataagccttaatgaacagtgtctatacatttgcatacacacacccccaccccagagtgttctcagtatgtcagagaaagtgccacagcattaggacgggagcttggagaacgttttctagaaaagggttagcttcctgttggcatgaaattttccaagcaaacctcattaaacatctgttgtttgttaaagatgttccactgaaagcaacgcatgtttcaaaggcacgtctttccgttcgttggttttctgtgtgtaaggagtagcattgctgttggcgcctaacctcgcgtgcactgcattctcaaccccgtaccagtgcatcatcagaagccttcctcgtgaccataactctgtgtctgcagatatgtgttcccgtgtaagccagttttccccttttactcagactgatttcacctagattgtcacggtttccttcatgttaactttgcgtgactttgttcttcctttactactctgtatgtaatatatatacatatatacgtacatatgctgtccaaatatatttgtatatatttgtatagcatttttacacctttattgagtaatctggtttcgaaaggaggtgagagtttagtcccttctgcagttttctccaagctgtgtcctgtgaatttcaacccttggagcctaagaaaaccctaggaagatgatgttaatttgctgtcatttcctaattcaggatctatcatcaaatgaaacatgaaaaaaacagtgacttttaaggtgaaaagagtttcaagcattccaaataaattatcaatgtttcataactttttattataaacccacctcctaataggaagccaagtactatttgatacagtggtaaaaaccaaactaccttgaatttttttaaggcaacttatgaataatgctcattttcacagtcagaatagctttaaaatatggttgaatttgatacacacaggaagttttcttgaagaacaatcctttcgcttttcttttttcttgagagatctaaagagaaactgtagattgttttcctgacagcaaaagactaatgtgacaaaatgaagtcattgtaaagaagcgatgcaacttgtcaaatatttaataaagaattatggaagctggaacattttctaaaaaaaaaata

SEQ ID NO: 378539 - DNA, 8255 bp, Homo sapiens
tggtattcccccggtatcagcagaggcgtgtacgggcactgctttaaaactgggaaggaggaagacgaggccagggagccggagggtcaccaaggtagatttccagcagcgctagtccagctgaacactttccagccttgtttttcagcagctttgaggaaaagtatagtgatccgtatgtgaaactttcattgtacgtagcggatgagaatagagaacttgctttggtccagacaaaaacaattaaaaagacactgaacccaaaatggaatgaagaattttatttcagggtaaacccatctaatcacagactcctatttgaagtatttgacgaaaatagactgacacgagacgacttcctgggccaggtggacgtgccccttagtcaccttccgacagaagatccaaccatggagcgaccctatacatttaaggactttctcctcagaccaagaagtcataagtctcgagttaagggatttttgcgattgaaaatggcctatatgccaaaaaatggaggtcaagatgaagaaaacagtgaccagagggatgacatggagcatggatgggaagttgttgactcaaatgactcggcttctcagcaccaagaggaacttcctcctcctcctctgcctcccgggtgggaagaaaaagtggacaatttaggccgaacttactatgtcaaccacaacaaccggaccactcagtggcacagaccaagcctgatggacgtgtcctcggagtcggacaataacatcagacagatcaaccaggaggcagcacaccggcgcttccgctcccgcaggcacatcagcgaagacttggagcccgagccctcggagggcggggatgtccccgagccttgggagaccatttcagaggaagtgaatatcgctggagactctctcggtctggctctgcccccaccaccggcctccccaggatctcggaccagccctcaggagctgtcagaggaactaagcagaaggcttcagatcactccagactccaatggggaacagttcagctctttgattcaaagagaaccctcctcaaggttgaggtcatgcagtgtcaccgacgcagttgcagaacagggccatctaccaccgcccagtgccccagctgggagagcgcgttcatcaactgtcacgggtggtgaggaaccaacgccatcagtggcctatgtacataccacgccgggtctgccttcaggctgggaagaaagaaaagatgctaaggggcgcacatactatgtcaatcataacaatcgaaccacaacttggactcgacctatcatgcagcttgcagaagatggtgcgtccggatcagccacaaacagtaacaaccatctaatcgagcctcagatccgccggcctcgtagcctcagctcgccaacagtaactttatctgccccgctggagggtgccaaggactcacccgtacgtcgggctgtgaaagacaccctttccaacccacagtccccacagccatcaccttacaactcccccaaaccacaacacaaagtcacacagagcttcttgccacccggctgggaaatgaggatagcgccaaacggccggcccttcttcattgatcataacacaaagactacaacctgggaagatccacgtttgaaatttccagtacatatgcggtcaaagacatctttaaaccccaatgaccttggcccccttcctcctggctgggaagaaagaattcacttggatggccgaacgttttatattgatcataatagcaaaattactcagtgggaagacccaagactgcagaacccagctattactggtccggctgtcccttactccagagaatttaagcagaaatatgactacttcaggaagaaattaaagaaacctgctgatatccccaataggtttgaaatgaaacttcacagaaataacatatttgaagagtcctatcggagaattatgtccgtgaaaagaccagatgtcctaaaagctagactgtggattgagtttgaatcagagaaaggtcttgactatgggggtgtggccagagaatggttcttcttactgtccaaagagatgttcaacccctactacggcctctttgagtactctgccacggacaactacacccttcagatcaaccctaattcaggcctctgtaatgaggatcatttgtcctacttcacttttattggaagagttgctggtctggccgtatttcatgggaagctcttagatggtttcttcattagaccattttacaagatgatgttgggaaagcagataaccctgaatgacatggaatctgtggatagtgaatattacaactctttgaaatggatcctggagaatgaccctactgagctggacctcatgttctgcatagacgaagaaaactttggacagacatatcaagtggatttgaagcccaatgggtcagaaataatggtcacaaatgaaaacaaaagggaatatatcgacttagtcatccagtggagatttgtgaacagggtccagaagcagatgaacgccttcttggagggattcacagaactacttcctattgatttgattaaaatttttgatgaaaatgagctggagttgctcatgtgcggcctcggtgatgtggatgtgaatgactggagacagcattctatttacaagaacggctactgcccaaaccaccccgtcattcagtggttctggaaggctgtgctactcatggacgccgaaaagcgtatccggttactgcagtttgtcacagggacatcgcgagtacctatgaatggatttgccgaactttatggttccaatggtcctcagctgtttacaatagagcaatggggcagtcctgagaaactgcccagagctcacacatgctttaatcgccttgacttacctccatatgaaacctttgaagatttacgagagaaacttctcatggccgtggaaaatgctcaaggatttgaaggggtggattaagcaccctgtgcctcgggggtggttgttcttcaagcaagttctgcttgcacttttgcatttgcctaacagacttttgcagaggcgatggcagagagcagctgcaggcatggtccctggagccgagccttcaccacgcactcgtccaagttcggatgcgggaacctggtcccagcttgagttcctgcctttcccaccacaaattatcaactggttgatgtgtacactaattacatttcaggaggacttaatgctatttatgttgtgcctctgcaggcaaagcccttaataaatattttacatcctttctaatgacaatgaatggaattaatcactcaacaggtatagtattacgactcatgtttactttttaaaatgatttagaccgattttcagattttatttcgttatgattaaagatgtctcatgtacttggaaaagtgagcatttttttttttttttgtatttcactttcataccaggcttaatgtcaatgacatttttatttttgaagtactctgacacctccaccctctactttattagaattggaaggcaaatttttgtccaaaaacctacagacaagtactttgagagaatttccaatataatattagacataatgataattttttccatactcagaatgaaaaactggatattacgtttttgttttggggtttttttgtacaaatttagctaatagctacaggctgagagaattgtaacatagcatgacaaattttgtgttgacttgaaaggaatcacaccattattccttagaagtaattacatgtgttctaacacatttgagacagggttggactcccatttctcatccgagaaattacttaacccttcctggcgctgtacagtcatcttttattctatttcctctttgctgtttgtagtagagacattttgaatgaaacttggcactgcttgattcaaaactgtggaaaccagatctgtttagtctcctgtttgtatgcgtttgctaatggtagctaaataaccagtttttgttgtaaatgcaccaattctgaaggcactttatgtactacatggaggtcatatctggttttgtttttatttttttatcatgaacattaaatgtgatgatgatttcttttccctgcacacatctttccggtgcaatatctatcaattgtgaatctggctgctggtgtataaaaacctggatgtaaagctgagcctacagacctgtcctcaccaactgttttgtgatttctactcaactacaaagatttatttaatgtactcttaatctaactgagttttgttaccaatgacctgttgcatgcttcaataccgtgtactgcctgagttgtgcctcttgtgtgctagattaaaagtgagacagagacttgacttgatcctctgagctcaagctattgagctggtagtggcagaggactgagggtacctgcacagtttgattcttttccacgtgtaagtctccattgcagaattgtcgtgctttgagaaaacacctgaggcagtgtgggagttgaacgaccctgctgtcctttttaacctgtgttgtcctagaccctgtcggggcagtcaggggacactagagatttgatctcatgcgagtcatcaataggacaaaaaagttgtggtttggggaggtctgtttgttacataaaaaggacctttcggtgtaagaaattgccgtttttaccctgccctggctggcatgtgagaagccatggaaggttgtggttgtaaatgagttgtctaaaggggtgcagaggcctgaggtttctaaaagaaggtagatttctacagagctgagtgttggttcctttttcttattggttgaaaattacctggtagtgatcagaaaacttagatgctatgtactaaaaaaaaaaaaaaaaaaaaaaaaaaaaaaaaaaaattcccgctcatgagttttgactattggtgagatgttttccgctacagttaacatgacaaatgtctcagtggcaaaaatcccctttttgtaagcccccatagtctagaggcagttttctttttaagaatcatgccagagcctgagtcgagcagtatgctttcttggtttttgagagtaattgtgtaattgtagagggagaaatccaattctaacctaagaactgggattcttctgtcatcttgtaaaccgtatattgaaaaaaacagaatgtcactaaatgcatattaagtcaagtattggaaagtataaaagaaaaatcattctgacaatttctaagccagaagcaaacaagaattactgaaatctaccccatgaatacttggaaggcagtaattgtgagtgacacctcagttcatcaaccccttaataatatcagcttaattttaatgacaactaaatatgctgaagtgaggatttagtattttttaaaaaagcaaaacaaggttcagtagtcctcagcaattctccaagtttctctctttgcctaaaatggtcatagatcttgatttctctgaatcgtgatgaccacacccagtcatcttcacagcataattgcaggtggcagtaaagagagtgtgctgggtaaggagcagttgctgggtcattccttgggccccgacctgcccggggagtagccctgggggagagagggcagtgttgcctatcccagaggtcccagcagtcacactgctctgcaggccgggctctctttatagccagagaaatcaccttaatgcagtctctttagttgtctgctgaagctgtagttattatgggccacttacatgaggctgagaagtacgtgccggagctcacacactgcctgttgcggttctcttaacatcagttatcacagctgcctgtgggtcccgggtatttccattcctgccccttgttggcccgaggaaggatgtggaaagagcacctggcgggatgaaggtccaacagcctgtgcctctccactgctggccctggagccggcagcagtgaggcattcattgtctgtgttgcggtgtattcccagcttcagtgctcttttcctttttgcctgaaatgtttatgcttctctgcagccagtcctctaacaaatctcaagaacaaaggtaagacacttggtttttgtttccaggacccttcagaaggtgacatcagatattccctaaattcagacaatgagggatacagagcgacttggcatgtattatttctcccatgtaaggacaaagggacagattattattgttatttctgagacagagtcttgctctgtagctcaggctggagtgcagtggctcaatctcagctcaccacaacctctgcctcctggcttcaagcgattcttctgcctcagcctccccgaatagttgggattacaggcacccaccaccacgcctggctaatttttgtatttttagtagagatggtttcaccatgctggccaggctggtcttgaactcctgacctcaggtgatcctcccgcctcagccttccaaagtgctgggattacaagcatgagccaccgcacccggcctcacagtgacagattctgagaaacagcatgcaaaacatttgaaccattttctacatctcccattgttgcatagagagtgtgcaccgctgctatcttgccagatccacactggtcctcccgaaagccaggttcatacacagcaactttttaattattctaacagttacccattaacagtcgactcctgtatttctgagagtcttgtactcacctctgaaatttaaaaacgtataaagagagcctgggttaatcagttctgcagcccctacgtgacactgtgctagttctccttcttctgtctcctccttaccctggccctgcacccctgtacttaagagggagaggtgggaggtgctgtctggtatcatttgctgcctcgccagtagagggtgccgctgtgcagggtaactgcccgcctgctcccttcctgacctcccctgaccccgaagatcactacctctgtcattcaggcattggggtacatcctgataagtcgtgtcagaactgccaatttcaggactgagatgtgtttttaaaaaacaaatccttataaactccactttgtactttagattttaaaactggggaaaaatgtgatattctttggaccacttttttaatttatataagccttaatgaacagtgtctatacatttgcatacacacacccccaccccagagtgttctcagtatgtcagagaaagtgccacagcattaggacgggagcttggagaacgttttctagaaaagggttagcttcctgttggcatgaaattttccaagcaaacctcattaaacatctgttgtttgttaaagatgttccactgaaagcaacgcatgtttcaaaggcacgtctttccgttcgttggttttctgtgtgtaaggagtagcattgctgttggcgcctaacctcgcgtgcactgcattctcaaccccgtaccagtgcatcatcagaagccttcctcgtgaccataactctgtgtctgcagatatgtgttcccgtgtaagccagttttccccttttactcagactgatttcacctagattgtcacggtttccttcatgttaactttgcgtgactttgttcttcctttactactctgtatgtaatatatatacatatatacgtacatatgctgtccaaatatatttgtatatatttgtatagcatttttacacctttattgagtaatctggtttcgaaaggaggtgagagtttagtcccttctgcagttttctccaagctgtgtcctgtgaatttcaacccttggagcctaagaaaaccctaggaagatgatgttaatttgctgtcatttcctaattcaggatctatcatcaaatgaaacatgaaaaaaacagtgacttttaaggtgaaaagagtttcaagcattccaaataaattatcaatgtttcataactttttattataaacccacctcctaataggaagccaagtactatttgatacagtggtaaaaaccaaactaccttgaatttttttaaggcaacttatgaataatgctcattttcacagtcagaatagctttaaaatatggttgaatttgatacacacaggaagttttcttgaagaacaatcctttcgcttttcttttttcttgagagatctaaagagaaactgtagattgttttcctgacagcaaaagactaatgtgacaaaatgaagtcattgtaaagaagcgatgcaacttgtcaaatatttaataaagaattatggaagctggaacattttctaaaaaaaaaata

SEQ ID NO: 378540 - DNA, 7451 bp, Homo sapiens
acagtttgaaatacctttaagctctacctggtttggcagtggaatttagtagctagaacagatgataatgtttttccctttccctgtgatcaccttggcagcaaccctttacgtttgagactacggggtcttagaaccaagttctgtaagaatttggactctgcaactgtatggggttcatttcacagtagatttgaagctgttggaaatctattgctgttttccagacacttgtaagtgttttctatataaatagatctaattaactttgtctagagaaaataattatctgggtgtaccttactttattaaactgatcagaaaacaaatgcaaggtattaaataataatgatttcttgcacaaacagccatcagtggcctatgtacataccacgccgggtctgccttcaggctgggaagaaagaaaagatgctaaggggcgcacatactatgtcaatcataacaatcgaaccacaacttggactcgacctatcatgcagcttgcagaagatggtgcgtccggatcagccacaaacagtaacaaccatctaatcgagcctcagatccgccggcctcgtagcctcagctcgccaacagtaactttatctgccccgctggagggtgccaaggactcacccgtacgtcgggctgtgaaagacaccctttccaacccacagtccccacagccatcaccttacaactcccccaaaccacaacacaaagtcacacagagcttcttgccacccggctgggaaatgaggatagcgccaaacggccggcccttcttcattgatcataacacaaagactacaacctgggaagatccacgtttgaaatttccagtacatatgcggtcaaagacatctttaaaccccaatgaccttggcccccttcctcctggctgggaagaaagaattcacttggatggccgaacgttttatattgatcataatagcaaaattactcagtgggaagacccaagactgcagaacccagctattactggtccggctgtcccttactccagagaatttaagcagaaatatgactacttcaggaagaaattaaagaaacctgctgatatccccaataggtttgaaatgaaacttcacagaaataacatatttgaagagtcctatcggagaattatgtccgtgaaaagaccagatgtcctaaaagctagactgtggattgagtttgaatcagagaaaggtcttgactatgggggtgtggccagagaatggttcttcttactgtccaaagagatgttcaacccctactacggcctctttgagtactctgccacggacaactacacccttcagatcaaccctaattcaggcctctgtaatgaggatcatttgtcctacttcacttttattggaagagttgctggtctggccgtatttcatgggaagctcttagatggtttcttcattagaccattttacaagatgatgttgggaaagcagataaccctgaatgacatggaatctgtggatagtgaatattacaactctttgaaatggatcctggagaatgaccctactgagctggacctcatgttctgcatagacgaagaaaactttggacagacatatcaagtggatttgaagcccaatgggtcagaaataatggtcacaaatgaaaacaaaagggaatatatcgacttagtcatccagtggagatttgtgaacagggtccagaagcagatgaacgccttcttggagggattcacagaactacttcctattgatttgattaaaatttttgatgaaaatgagctggagttgctcatgtgcggcctcggtgatgtggatgtgaatgactggagacagcattctatttacaagaacggctactgcccaaaccaccccgtcattcagtggttctggaaggctgtgctactcatggacgccgaaaagcgtatccggttactgcagtttgtcacagggacatcgcgagtacctatgaatggatttgccgaactttatggttccaatggtcctcagctgtttacaatagagcaatggggcagtcctgagaaactgcccagagctcacacatgctttaatcgccttgacttacctccatatgaaacctttgaagatttacgagagaaacttctcatggccgtggaaaatgctcaaggatttgaaggggtggattaagcaccctgtgcctcgggggtggttgttcttcaagcaagttctgcttgcacttttgcatttgcctaacagacttttgcagaggcgatggcagagagcagctgcaggcatggtccctggagccgagccttcaccacgcactcgtccaagttcggatgcgggaacctggtcccagcttgagttcctgcctttcccaccacaaattatcaactggttgatgtgtacactaattacatttcaggaggacttaatgctatttatgttgtgcctctgcaggcaaagcccttaataaatattttacatcctttctaatgacaatgaatggaattaatcactcaacaggtatagtattacgactcatgtttactttttaaaatgatttagaccgattttcagattttatttcgttatgattaaagatgtctcatgtacttggaaaagtgagcatttttttttttttttgtatttcactttcataccaggcttaatgtcaatgacatttttatttttgaagtactctgacacctccaccctctactttattagaattggaaggcaaatttttgtccaaaaacctacagacaagtactttgagagaatttccaatataatattagacataatgataattttttccatactcagaatgaaaaactggatattacgtttttgttttggggtttttttgtacaaatttagctaatagctacaggctgagagaattgtaacatagcatgacaaattttgtgttgacttgaaaggaatcacaccattattccttagaagtaattacatgtgttctaacacatttgagacagggttggactcccatttctcatccgagaaattacttaacccttcctggcgctgtacagtcatcttttattctatttcctctttgctgtttgtagtagagacattttgaatgaaacttggcactgcttgattcaaaactgtggaaaccagatctgtttagtctcctgtttgtatgcgtttgctaatggtagctaaataaccagtttttgttgtaaatgcaccaattctgaaggcactttatgtactacatggaggtcatatctggttttgtttttatttttttatcatgaacattaaatgtgatgatgatttcttttccctgcacacatctttccggtgcaatatctatcaattgtgaatctggctgctggtgtataaaaacctggatgtaaagctgagcctacagacctgtcctcaccaactgttttgtgatttctactcaactacaaagatttatttaatgtactcttaatctaactgagttttgttaccaatgacctgttgcatgcttcaataccgtgtactgcctgagttgtgcctcttgtgtgctagattaaaagtgagacagagacttgacttgatcctctgagctcaagctattgagctggtagtggcagaggactgagggtacctgcacagtttgattcttttccacgtgtaagtctccattgcagaattgtcgtgctttgagaaaacacctgaggcagtgtgggagttgaacgaccctgctgtcctttttaacctgtgttgtcctagaccctgtcggggcagtcaggggacactagagatttgatctcatgcgagtcatcaataggacaaaaaagttgtggtttggggaggtctgtttgttacataaaaaggacctttcggtgtaagaaattgccgtttttaccctgccctggctggcatgtgagaagccatggaaggttgtggttgtaaatgagttgtctaaaggggtgcagaggcctgaggtttctaaaagaaggtagatttctacagagctgagtgttggttcctttttcttattggttgaaaattacctggtagtgatcagaaaacttagatgctatgtactaaaaaaaaaaaaaaaaaaaaaaaaaaaaaaaaaaaattcccgctcatgagttttgactattggtgagatgttttccgctacagttaacatgacaaatgtctcagtggcaaaaatcccctttttgtaagcccccatagtctagaggcagttttctttttaagaatcatgccagagcctgagtcgagcagtatgctttcttggtttttgagagtaattgtgtaattgtagagggagaaatccaattctaacctaagaactgggattcttctgtcatcttgtaaaccgtatattgaaaaaaacagaatgtcactaaatgcatattaagtcaagtattggaaagtataaaagaaaaatcattctgacaatttctaagccagaagcaaacaagaattactgaaatctaccccatgaatacttggaaggcagtaattgtgagtgacacctcagttcatcaaccccttaataatatcagcttaattttaatgacaactaaatatgctgaagtgaggatttagtattttttaaaaaagcaaaacaaggttcagtagtcctcagcaattctccaagtttctctctttgcctaaaatggtcatagatcttgatttctctgaatcgtgatgaccacacccagtcatcttcacagcataattgcaggtggcagtaaagagagtgtgctgggtaaggagcagttgctgggtcattccttgggccccgacctgcccggggagtagccctgggggagagagggcagtgttgcctatcccagaggtcccagcagtcacactgctctgcaggccgggctctctttatagccagagaaatcaccttaatgcagtctctttagttgtctgctgaagctgtagttattatgggccacttacatgaggctgagaagtacgtgccggagctcacacactgcctgttgcggttctcttaacatcagttatcacagctgcctgtgggtcccgggtatttccattcctgccccttgttggcccgaggaaggatgtggaaagagcacctggcgggatgaaggtccaacagcctgtgcctctccactgctggccctggagccggcagcagtgaggcattcattgtctgtgttgcggtgtattcccagcttcagtgctcttttcctttttgcctgaaatgtttatgcttctctgcagccagtcctctaacaaatctcaagaacaaaggtaagacacttggtttttgtttccaggacccttcagaaggtgacatcagatattccctaaattcagacaatgagggatacagagcgacttggcatgtattatttctcccatgtaaggacaaagggacagattattattgttatttctgagacagagtcttgctctgtagctcaggctggagtgcagtggctcaatctcagctcaccacaacctctgcctcctggcttcaagcgattcttctgcctcagcctccccgaatagttgggattacaggcacccaccaccacgcctggctaatttttgtatttttagtagagatggtttcaccatgctggccaggctggtcttgaactcctgacctcaggtgatcctcccgcctcagccttccaaagtgctgggattacaagcatgagccaccgcacccggcctcacagtgacagattctgagaaacagcatgcaaaacatttgaaccattttctacatctcccattgttgcatagagagtgtgcaccgctgctatcttgccagatccacactggtcctcccgaaagccaggttcatacacagcaactttttaattattctaacagttacccattaacagtcgactcctgtatttctgagagtcttgtactcacctctgaaatttaaaaacgtataaagagagcctgggttaatcagttctgcagcccctacgtgacactgtgctagttctccttcttctgtctcctccttaccctggccctgcacccctgtacttaagagggagaggtgggaggtgctgtctggtatcatttgctgcctcgccagtagagggtgccgctgtgcagggtaactgcccgcctgctcccttcctgacctcccctgaccccgaagatcactacctctgtcattcaggcattggggtacatcctgataagtcgtgtcagaactgccaatttcaggactgagatgtgtttttaaaaaacaaatccttataaactccactttgtactttagattttaaaactggggaaaaatgtgatattctttggaccacttttttaatttatataagccttaatgaacagtgtctatacatttgcatacacacacccccaccccagagtgttctcagtatgtcagagaaagtgccacagcattaggacgggagcttggagaacgttttctagaaaagggttagcttcctgttggcatgaaattttccaagcaaacctcattaaacatctgttgtttgttaaagatgttccactgaaagcaacgcatgtttcaaaggcacgtctttccgttcgttggttttctgtgtgtaaggagtagcattgctgttggcgcctaacctcgcgtgcactgcattctcaaccccgtaccagtgcatcatcagaagccttcctcgtgaccataactctgtgtctgcagatatgtgttcccgtgtaagccagttttccccttttactcagactgatttcacctagattgtcacggtttccttcatgttaactttgcgtgactttgttcttcctttactactctgtatgtaatatatatacatatatacgtacatatgctgtccaaatatatttgtatatatttgtatagcatttttacacctttattgagtaatctggtttcgaaaggaggtgagagtttagtcccttctgcagttttctccaagctgtgtcctgtgaatttcaacccttggagcctaagaaaaccctaggaagatgatgttaatttgctgtcatttcctaattcaggatctatcatcaaatgaaacatgaaaaaaacagtgacttttaaggtgaaaagagtttcaagcattccaaataaattatcaatgtttcataactttttattataaacccacctcctaataggaagccaagtactatttgatacagtggtaaaaaccaaactaccttgaatttttttaaggcaacttatgaataatgctcattttcacagtcagaatagctttaaaatatggttgaatttgatacacacaggaagttttcttgaagaacaatcctttcgcttttcttttttcttgagagatctaaagagaaactgtagattgttttcctgacagcaaaagactaatgtgacaaaatgaagtcattgtaaagaagcgatgcaacttgtcaaatatttaataaagaattatggaagctggaacattttctaaaaaaaaaata

SEQ ID NO: 378541 - DNA, 6390 bp, Homo sapiens
  misc_feature (20)..(20): n is a, c, g, or t
  misc_feature (22)..(22): n is a, c, g, or t
  misc_feature (24)..(24): n is a, c, g, or t
  misc_feature (27)..(27): n is a, c, g, or t
  misc_feature (45)..(45): n is a, c, g, or t
gaacgtagggacctacgaangntntgntcaaaaaacccgcacggngttttttatatacgagcagtacttacgtctagtacagccgtgcgatcgaacagaaagacagatgtcctaaaagctagactgtggattgagtttgaatcagagaaaggtcttgactatgggggtgtggccagagaatggttcttcttactgtccaaagagatgttcaacccctactacggcctctttgagtactctgccacggacaactacacccttcagatcaaccctaattcaggcctctgtaatgaggatcatttgtcctacttcacttttattggaagagttgctggtctggccgtatttcatgggaagctcttagatggtttcttcattagaccattttacaagatgatgttgggaaagcagataaccctgaatgacatggaatctgtggatagtgaatattacaactctttgaaatggatcctggagaatgaccctactgagctggacctcatgttctgcatagacgaagaaaactttggacagacatatcaagtggatttgaagcccaatgggtcagaaataatggtcacaaatgaaaacaaaagggaatatatcgacttagtcatccagtggagatttgtgaacagggtccagaagcagatgaacgccttcttggagggattcacagaactacttcctattgatttgattaaaatttttgatgaaaatgagctggagttgctcatgtgcggcctcggtgatgtggatgtgaatgactggagacagcattctatttacaagaacggctactgcccaaaccaccccgtcattcagtggttctggaaggctgtgctactcatggacgccgaaaagcgtatccggttactgcagtttgtcacagggacatcgcgagtacctatgaatggatttgccgaactttatggttccaatggtcctcagctgtttacaatagagcaatggggcagtcctgagaaactgcccagagctcacacatgctttaatcgccttgacttacctccatatgaaacctttgaagatttacgagagaaacttctcatggccgtggaaaatgctcaaggatttgaaggggtggattaagcaccctgtgcctcgggggtggttgttcttcaagcaagttctgcttgcacttttgcatttgcctaacagacttttgcagaggcgatggcagagagcagctgcaggcatggtccctggagccgagccttcaccacgcactcgtccaagttcggatgcgggaacctggtcccagcttgagttcctgcctttcccaccacaaattatcaactggttgatgtgtacactaattacatttcaggaggacttaatgctatttatgttgtgcctctgcaggcaaagcccttaataaatattttacatcctttctaatgacaatgaatggaattaatcactcaacaggtatagtattacgactcatgtttactttttaaaatgatttagaccgattttcagattttatttcgttatgattaaagatgtctcatgtacttggaaaagtgagcatttttttttttttttgtatttcactttcataccaggcttaatgtcaatgacatttttatttttgaagtactctgacacctccaccctctactttattagaattggaaggcaaatttttgtccaaaaacctacagacaagtactttgagagaatttccaatataatattagacataatgataattttttccatactcagaatgaaaaactggatattacgtttttgttttggggtttttttgtacaaatttagctaatagctacaggctgagagaattgtaacatagcatgacaaattttgtgttgacttgaaaggaatcacaccattattccttagaagtaattacatgtgttctaacacatttgagacagggttggactcccatttctcatccgagaaattacttaacccttcctggcgctgtacagtcatcttttattctatttcctctttgctgtttgtagtagagacattttgaatgaaacttggcactgcttgattcaaaactgtggaaaccagatctgtttagtctcctgtttgtatgcgtttgctaatggtagctaaataaccagtttttgttgtaaatgcaccaattctgaaggcactttatgtactacatggaggtcatatctggttttgtttttatttttttatcatgaacattaaatgtgatgatgatttcttttccctgcacacatctttccggtgcaatatctatcaattgtgaatctggctgctggtgtataaaaacctggatgtaaagctgagcctacagacctgtcctcaccaactgttttgtgatttctactcaactacaaagatttatttaatgtactcttaatctaactgagttttgttaccaatgacctgttgcatgcttcaataccgtgtactgcctgagttgtgcctcttgtgtgctagattaaaagtgagacagagacttgacttgatcctctgagctcaagctattgagctggtagtggcagaggactgagggtacctgcacagtttgattcttttccacgtgtaagtctccattgcagaattgtcgtgctttgagaaaacacctgaggcagtgtgggagttgaacgaccctgctgtcctttttaacctgtgttgtcctagaccctgtcggggcagtcaggggacactagagatttgatctcatgcgagtcatcaataggacaaaaaagttgtggtttggggaggtctgtttgttacataaaaaggacctttcggtgtaagaaattgccgtttttaccctgccctggctggcatgtgagaagccatggaaggttgtggttgtaaatgagttgtctaaaggggtgcagaggcctgaggtttctaaaagaaggtagatttctacagagctgagtgttggttcctttttcttattggttgaaaattacctggtagtgatcagaaaacttagatgctatgtactaaaaaaaaaaaaaaaaaaaaaaaaaaaaaaaaaaaattcccgctcatgagttttgactattggtgagatgttttccgctacagttaacatgacaaatgtctcagtggcaaaaatcccctttttgtaagcccccatagtctagaggcagttttctttttaagaatcatgccagagcctgagtcgagcagtatgctttcttggtttttgagagtaattgtgtaattgtagagggagaaatccaattctaacctaagaactgggattcttctgtcatcttgtaaaccgtatattgaaaaaaacagaatgtcactaaatgcatattaagtcaagtattggaaagtataaaagaaaaatcattctgacaatttctaagccagaagcaaacaagaattactgaaatctaccccatgaatacttggaaggcagtaattgtgagtgacacctcagttcatcaaccccttaataatatcagcttaattttaatgacaactaaatatgctgaagtgaggatttagtattttttaaaaaagcaaaacaaggttcagtagtcctcagcaattctccaagtttctctctttgcctaaaatggtcatagatcttgatttctctgaatcgtgatgaccacacccagtcatcttcacagcataattgcaggtggcagtaaagagagtgtgctgggtaaggagcagttgctgggtcattccttgggccccgacctgcccggggagtagccctgggggagagagggcagtgttgcctatcccagaggtcccagcagtcacactgctctgcaggccgggctctctttatagccagagaaatcaccttaatgcagtctctttagttgtctgctgaagctgtagttattatgggccacttacatgaggctgagaagtacgtgccggagctcacacactgcctgttgcggttctcttaacatcagttatcacagctgcctgtgggtcccgggtatttccattcctgccccttgttggcccgaggaaggatgtggaaagagcacctggcgggatgaaggtccaacagcctgtgcctctccactgctggccctggagccggcagcagtgaggcattcattgtctgtgttgcggtgtattcccagcttcagtgctcttttcctttttgcctgaaatgtttatgcttctctgcagccagtcctctaacaaatctcaagaacaaaggtaagacacttggtttttgtttccaggacccttcagaaggtgacatcagatattccctaaattcagacaatgagggatacagagcgacttggcatgtattatttctcccatgtaaggacaaagggacagattattattgttatttctgagacagagtcttgctctgtagctcaggctggagtgcagtggctcaatctcagctcaccacaacctctgcctcctggcttcaagcgattcttctgcctcagcctccccgaatagttgggattacaggcacccaccaccacgcctggctaatttttgtatttttagtagagatggtttcaccatgctggccaggctggtcttgaactcctgacctcaggtgatcctcccgcctcagccttccaaagtgctgggattacaagcatgagccaccgcacccggcctcacagtgacagattctgagaaacagcatgcaaaacatttgaaccattttctacatctcccattgttgcatagagagtgtgcaccgctgctatcttgccagatccacactggtcctcccgaaagccaggttcatacacagcaactttttaattattctaacagttacccattaacagtcgactcctgtatttctgagagtcttgtactcacctctgaaatttaaaaacgtataaagagagcctgggttaatcagttctgcagcccctacgtgacactgtgctagttctccttcttctgtctcctccttaccctggccctgcacccctgtacttaagagggagaggtgggaggtgctgtctggtatcatttgctgcctcgccagtagagggtgccgctgtgcagggtaactgcccgcctgctcccttcctgacctcccctgaccccgaagatcactacctctgtcattcaggcattggggtacatcctgataagtcgtgtcagaactgccaatttcaggactgagatgtgtttttaaaaaacaaatccttataaactccactttgtactttagattttaaaactggggaaaaatgtgatattctttggaccacttttttaatttatataagccttaatgaacagtgtctatacatttgcatacacacacccccaccccagagtgttctcagtatgtcagagaaagtgccacagcattaggacgggagcttggagaacgttttctagaaaagggttagcttcctgttggcatgaaattttccaagcaaacctcattaaacatctgttgtttgttaaagatgttccactgaaagcaacgcatgtttcaaaggcacgtctttccgttcgttggttttctgtgtgtaaggagtagcattgctgttggcgcctaacctcgcgtgcactgcattctcaaccccgtaccagtgcatcatcagaagccttcctcgtgaccataactctgtgtctgcagatatgtgttcccgtgtaagccagttttccccttttactcagactgatttcacctagattgtcacggtttccttcatgttaactttgcgtgactttgttcttcctttactactctgtatgtaatatatatacatatatacgtacatatgctgtccaaatatatttgtatatatttgtatagcatttttacacctttattgagtaatctggtttcgaaaggaggtgagagtttagtcccttctgcagttttctccaagctgtgtcctgtgaatttcaacccttggagcctaagaaaaccctaggaagatgatgttaatttgctgtcatttcctaattcaggatctatcatcaaatgaaacatgaaaaaaacagtgacttttaaggtgaaaagagtttcaagcattccaaataaattatcaatgtttcataactttttattataaacccacctcctaataggaagccaagtactatttgatacagtggtaaaaaccaaactaccttgaatttttttaaggcaacttatgaataatgctcattttcacagtcagaatagctttaaaatatggttgaatttgatacacacaggaagttttcttgaagaacaatcctttcgcttttcttttttcttgagagatctaaagagaaactgtagattgttttcctgacagcaaaagactaatgtgacaaaatgaagtcattgtaaagaagcgatgcaacttgtcaaatatttaataaagaattatggaagctggaacattttctaaaaaaaaaata

SEQ ID NO: 378542 - DNA, 6279 bp, Homo sapiens
cggcacgaggaggtctcctgtgtaaaggcaaattatacccccaccccggaggaatcagtctgtgatcccagtttgaaaactactgatccacatgattgtgaaccaagcaagatcatttggacaaatctaaaaatggacaactacacccttcagatcaaccctaattcaggcctctgtaatgaggatcatttgtcctacttcacttttattggaagagttgctggtctggccgtatttcatgggaagctcttagatggtttcttcattagaccattttacaagatgatgttgggaaagcagataaccctgaatgacatggaatctgtggatagtgaatattacaactctttgaaatggatcctggagaatgaccctactgagctggacctcatgttctgcatagacgaagaaaactttggacagacatatcaagtggatttgaagcccaatgggtcagaaataatggtcacaaatgaaaacaaaagggaatatatcgacttagtcatccagtggagatttgtgaacagggtccagaagcagatgaacgccttcttggagggattcacagaactacttcctattgatttgattaaaatttttgatgaaaatgagctggagttgctcatgtgcggcctcggtgatgtggatgtgaatgactggagacagcattctatttacaagaacggctactgcccaaaccaccccgtcattcagtggttctggaaggctgtgctactcatggacgccgaaaagcgtatccggttactgcagtttgtcacagggacatcgcgagtacctatgaatggatttgccgaactttatggttccaatggtcctcagctgtttacaatagagcaatggggcagtcctgagaaactgcccagagctcacacatgctttaatcgccttgacttacctccatatgaaacctttgaagatttacgagagaaacttctcatggccgtggaaaatgctcaaggatttgaaggggtggattaagcaccctgtgcctcgggggtggttgttcttcaagcaagttctgcttgcacttttgcatttgcctaacagacttttgcagaggcgatggcagagagcagctgcaggcatggtccctggagccgagccttcaccacgcactcgtccaagttcggatgcgggaacctggtcccagcttgagttcctgcctttcccaccacaaattatcaactggttgatgtgtacactaattacatttcaggaggacttaatgctatttatgttgtgcctctgcaggcaaagcccttaataaatattttacatcctttctaatgacaatgaatggaattaatcactcaacaggtatagtattacgactcatgtttactttttaaaatgatttagaccgattttcagattttatttcgttatgattaaagatgtctcatgtacttggaaaagtgagcatttttttttttttttgtatttcactttcataccaggcttaatgtcaatgacatttttatttttgaagtactctgacacctccaccctctactttattagaattggaaggcaaatttttgtccaaaaacctacagacaagtactttgagagaatttccaatataatattagacataatgataattttttccatactcagaatgaaaaactggatattacgtttttgttttggggtttttttgtacaaatttagctaatagctacaggctgagagaattgtaacatagcatgacaaattttgtgttgacttgaaaggaatcacaccattattccttagaagtaattacatgtgttctaacacatttgagacagggttggactcccatttctcatccgagaaattacttaacccttcctggcgctgtacagtcatcttttattctatttcctctttgctgtttgtagtagagacattttgaatgaaacttggcactgcttgattcaaaactgtggaaaccagatctgtttagtctcctgtttgtatgcgtttgctaatggtagctaaataaccagtttttgttgtaaatgcaccaattctgaaggcactttatgtactacatggaggtcatatctggttttgtttttatttttttatcatgaacattaaatgtgatgatgatttcttttccctgcacacatctttccggtgcaatatctatcaattgtgaatctggctgctggtgtataaaaacctggatgtaaagctgagcctacagacctgtcctcaccaactgttttgtgatttctactcaactacaaagatttatttaatgtactcttaatctaactgagttttgttaccaatgacctgttgcatgcttcaataccgtgtactgcctgagttgtgcctcttgtgtgctagattaaaagtgagacagagacttgacttgatcctctgagctcaagctattgagctggtagtggcagaggactgagggtacctgcacagtttgattcttttccacgtgtaagtctccattgcagaattgtcgtgctttgagaaaacacctgaggcagtgtgggagttgaacgaccctgctgtcctttttaacctgtgttgtcctagaccctgtcggggcagtcaggggacactagagatttgatctcatgcgagtcatcaataggacaaaaaagttgtggtttggggaggtctgtttgttacataaaaaggacctttcggtgtaagaaattgccgtttttaccctgccctggctggcatgtgagaagccatggaaggttgtggttgtaaatgagttgtctaaaggggtgcagaggcctgaggtttctaaaagaaggtagatttctacagagctgagtgttggttcctttttcttattggttgaaaattacctggtagtgatcagaaaacttagatgctatgtactaaaaaaaaaaaaaaaaaaaaaaaaaaaaaaaaaaaattcccgctcatgagttttgactattggtgagatgttttccgctacagttaacatgacaaatgtctcagtggcaaaaatcccctttttgtaagcccccatagtctagaggcagttttctttttaagaatcatgccagagcctgagtcgagcagtatgctttcttggtttttgagagtaattgtgtaattgtagagggagaaatccaattctaacctaagaactgggattcttctgtcatcttgtaaaccgtatattgaaaaaaacagaatgtcactaaatgcatattaagtcaagtattggaaagtataaaagaaaaatcattctgacaatttctaagccagaagcaaacaagaattactgaaatctaccccatgaatacttggaaggcagtaattgtgagtgacacctcagttcatcaaccccttaataatatcagcttaattttaatgacaactaaatatgctgaagtgaggatttagtattttttaaaaaagcaaaacaaggttcagtagtcctcagcaattctccaagtttctctctttgcctaaaatggtcatagatcttgatttctctgaatcgtgatgaccacacccagtcatcttcacagcataattgcaggtggcagtaaagagagtgtgctgggtaaggagcagttgctgggtcattccttgggccccgacctgcccggggagtagccctgggggagagagggcagtgttgcctatcccagaggtcccagcagtcacactgctctgcaggccgggctctctttatagccagagaaatcaccttaatgcagtctctttagttgtctgctgaagctgtagttattatgggccacttacatgaggctgagaagtacgtgccggagctcacacactgcctgttgcggttctcttaacatcagttatcacagctgcctgtgggtcccgggtatttccattcctgccccttgttggcccgaggaaggatgtggaaagagcacctggcgggatgaaggtccaacagcctgtgcctctccactgctggccctggagccggcagcagtgaggcattcattgtctgtgttgcggtgtattcccagcttcagtgctcttttcctttttgcctgaaatgtttatgcttctctgcagccagtcctctaacaaatctcaagaacaaaggtaagacacttggtttttgtttccaggacccttcagaaggtgacatcagatattccctaaattcagacaatgagggatacagagcgacttggcatgtattatttctcccatgtaaggacaaagggacagattattattgttatttctgagacagagtcttgctctgtagctcaggctggagtgcagtggctcaatctcagctcaccacaacctctgcctcctggcttcaagcgattcttctgcctcagcctccccgaatagttgggattacaggcacccaccaccacgcctggctaatttttgtatttttagtagagatggtttcaccatgctggccaggctggtcttgaactcctgacctcaggtgatcctcccgcctcagccttccaaagtgctgggattacaagcatgagccaccgcacccggcctcacagtgacagattctgagaaacagcatgcaaaacatttgaaccattttctacatctcccattgttgcatagagagtgtgcaccgctgctatcttgccagatccacactggtcctcccgaaagccaggttcatacacagcaactttttaattattctaacagttacccattaacagtcgactcctgtatttctgagagtcttgtactcacctctgaaatttaaaaacgtataaagagagcctgggttaatcagttctgcagcccctacgtgacactgtgctagttctccttcttctgtctcctccttaccctggccctgcacccctgtacttaagagggagaggtgggaggtgctgtctggtatcatttgctgcctcgccagtagagggtgccgctgtgcagggtaactgcccgcctgctcccttcctgacctcccctgaccccgaagatcactacctctgtcattcaggcattggggtacatcctgataagtcgtgtcagaactgccaatttcaggactgagatgtgtttttaaaaaacaaatccttataaactccactttgtactttagattttaaaactggggaaaaatgtgatattctttggaccacttttttaatttatataagccttaatgaacagtgtctatacatttgcatacacacacccccaccccagagtgttctcagtatgtcagagaaagtgccacagcattaggacgggagcttggagaacgttttctagaaaagggttagcttcctgttggcatgaaattttccaagcaaacctcattaaacatctgttgtttgttaaagatgttccactgaaagcaacgcatgtttcaaaggcacgtctttccgttcgttggttttctgtgtgtaaggagtagcattgctgttggcgcctaacctcgcgtgcactgcattctcaaccccgtaccagtgcatcatcagaagccttcctcgtgaccataactctgtgtctgcagatatgtgttcccgtgtaagccagttttccccttttactcagactgatttcacctagattgtcacggtttccttcatgttaactttgcgtgactttgttcttcctttactactctgtatgtaatatatatacatatatacgtacatatgctgtccaaatatatttgtatatatttgtatagcatttttacacctttattgagtaatctggtttcgaaaggaggtgagagtttagtcccttctgcagttttctccaagctgtgtcctgtgaatttcaacccttggagcctaagaaaaccctaggaagatgatgttaatttgctgtcatttcctaattcaggatctatcatcaaatgaaacatgaaaaaaacagtgacttttaaggtgaaaagagtttcaagcattccaaataaattatcaatgtttcataactttttattataaacccacctcctaataggaagccaagtactatttgatacagtggtaaaaaccaaactaccttgaatttttttaaggcaacttatgaataatgctcattttcacagtcagaatagctttaaaatatggttgaatttgatacacacaggaagttttcttgaagaacaatcctttcgcttttcttttttcttgagagatctaaagagaaactgtagattgttttcctgacagcaaaagactaatgtgacaaaatgaagtcattgtaaagaagcgatgcaacttgtcaaatatttaataaagaattatggaagctggaacattttctaaaaaaaaaata

SEQ ID NO: 378543 - DNA, 6236 bp, Homo sapiens
cggcacgaggaggtctcctgtgtaaaggcaaattatacccccaccccggaggaatcagtctgtgatcccagtttgaaaactactgatccacatgattgtgaaccaagcaagatcatttggacaaatctaaaaataatgaggatcatttgtcctacttcacttttattggaagagttgctggtctggccgtatttcatgggaagctcttagatggtttcttcattagaccattttacaagatgatgttgggaaagcagataaccctgaatgacatggaatctgtggatagtgaatattacaactctttgaaatggatcctggagaatgaccctactgagctggacctcatgttctgcatagacgaagaaaactttggacagacatatcaagtggatttgaagcccaatgggtcagaaataatggtcacaaatgaaaacaaaagggaatatatcgacttagtcatccagtggagatttgtgaacagggtccagaagcagatgaacgccttcttggagggattcacagaactacttcctattgatttgattaaaatttttgatgaaaatgagctggagttgctcatgtgcggcctcggtgatgtggatgtgaatgactggagacagcattctatttacaagaacggctactgcccaaaccaccccgtcattcagtggttctggaaggctgtgctactcatggacgccgaaaagcgtatccggttactgcagtttgtcacagggacatcgcgagtacctatgaatggatttgccgaactttatggttccaatggtcctcagctgtttacaatagagcaatggggcagtcctgagaaactgcccagagctcacacatgctttaatcgccttgacttacctccatatgaaacctttgaagatttacgagagaaacttctcatggccgtggaaaatgctcaaggatttgaaggggtggattaagcaccctgtgcctcgggggtggttgttcttcaagcaagttctgcttgcacttttgcatttgcctaacagacttttgcagaggcgatggcagagagcagctgcaggcatggtccctggagccgagccttcaccacgcactcgtccaagttcggatgcgggaacctggtcccagcttgagttcctgcctttcccaccacaaattatcaactggttgatgtgtacactaattacatttcaggaggacttaatgctatttatgttgtgcctctgcaggcaaagcccttaataaatattttacatcctttctaatgacaatgaatggaattaatcactcaacaggtatagtattacgactcatgtttactttttaaaatgatttagaccgattttcagattttatttcgttatgattaaagatgtctcatgtacttggaaaagtgagcatttttttttttttttgtatttcactttcataccaggcttaatgtcaatgacatttttatttttgaagtactctgacacctccaccctctactttattagaattggaaggcaaatttttgtccaaaaacctacagacaagtactttgagagaatttccaatataatattagacataatgataattttttccatactcagaatgaaaaactggatattacgtttttgttttggggtttttttgtacaaatttagctaatagctacaggctgagagaattgtaacatagcatgacaaattttgtgttgacttgaaaggaatcacaccattattccttagaagtaattacatgtgttctaacacatttgagacagggttggactcccatttctcatccgagaaattacttaacccttcctggcgctgtacagtcatcttttattctatttcctctttgctgtttgtagtagagacattttgaatgaaacttggcactgcttgattcaaaactgtggaaaccagatctgtttagtctcctgtttgtatgcgtttgctaatggtagctaaataaccagtttttgttgtaaatgcaccaattctgaaggcactttatgtactacatggaggtcatatctggttttgtttttatttttttatcatgaacattaaatgtgatgatgatttcttttccctgcacacatctttccggtgcaatatctatcaattgtgaatctggctgctggtgtataaaaacctggatgtaaagctgagcctacagacctgtcctcaccaactgttttgtgatttctactcaactacaaagatttatttaatgtactcttaatctaactgagttttgttaccaatgacctgttgcatgcttcaataccgtgtactgcctgagttgtgcctcttgtgtgctagattaaaagtgagacagagacttgacttgatcctctgagctcaagctattgagctggtagtggcagaggactgagggtacctgcacagtttgattcttttccacgtgtaagtctccattgcagaattgtcgtgctttgagaaaacacctgaggcagtgtgggagttgaacgaccctgctgtcctttttaacctgtgttgtcctagaccctgtcggggcagtcaggggacactagagatttgatctcatgcgagtcatcaataggacaaaaaagttgtggtttggggaggtctgtttgttacataaaaaggacctttcggtgtaagaaattgccgtttttaccctgccctggctggcatgtgagaagccatggaaggttgtggttgtaaatgagttgtctaaaggggtgcagaggcctgaggtttctaaaagaaggtagatttctacagagctgagtgttggttcctttttcttattggttgaaaattacctggtagtgatcagaaaacttagatgctatgtactaaaaaaaaaaaaaaaaaaaaaaaaaaaaaaaaaaaattcccgctcatgagttttgactattggtgagatgttttccgctacagttaacatgacaaatgtctcagtggcaaaaatcccctttttgtaagcccccatagtctagaggcagttttctttttaagaatcatgccagagcctgagtcgagcagtatgctttcttggtttttgagagtaattgtgtaattgtagagggagaaatccaattctaacctaagaactgggattcttctgtcatcttgtaaaccgtatattgaaaaaaacagaatgtcactaaatgcatattaagtcaagtattggaaagtataaaagaaaaatcattctgacaatttctaagccagaagcaaacaagaattactgaaatctaccccatgaatacttggaaggcagtaattgtgagtgacacctcagttcatcaaccccttaataatatcagcttaattttaatgacaactaaatatgctgaagtgaggatttagtattttttaaaaaagcaaaacaaggttcagtagtcctcagcaattctccaagtttctctctttgcctaaaatggtcatagatcttgatttctctgaatcgtgatgaccacacccagtcatcttcacagcataattgcaggtggcagtaaagagagtgtgctgggtaaggagcagttgctgggtcattccttgggccccgacctgcccggggagtagccctgggggagagagggcagtgttgcctatcccagaggtcccagcagtcacactgctctgcaggccgggctctctttatagccagagaaatcaccttaatgcagtctctttagttgtctgctgaagctgtagttattatgggccacttacatgaggctgagaagtacgtgccggagctcacacactgcctgttgcggttctcttaacatcagttatcacagctgcctgtgggtcccgggtatttccattcctgccccttgttggcccgaggaaggatgtggaaagagcacctggcgggatgaaggtccaacagcctgtgcctctccactgctggccctggagccggcagcagtgaggcattcattgtctgtgttgcggtgtattcccagcttcagtgctcttttcctttttgcctgaaatgtttatgcttctctgcagccagtcctctaacaaatctcaagaacaaaggtaagacacttggtttttgtttccaggacccttcagaaggtgacatcagatattccctaaattcagacaatgagggatacagagcgacttggcatgtattatttctcccatgtaaggacaaagggacagattattattgttatttctgagacagagtcttgctctgtagctcaggctggagtgcagtggctcaatctcagctcaccacaacctctgcctcctggcttcaagcgattcttctgcctcagcctccccgaatagttgggattacaggcacccaccaccacgcctggctaatttttgtatttttagtagagatggtttcaccatgctggccaggctggtcttgaactcctgacctcaggtgatcctcccgcctcagccttccaaagtgctgggattacaagcatgagccaccgcacccggcctcacagtgacagattctgagaaacagcatgcaaaacatttgaaccattttctacatctcccattgttgcatagagagtgtgcaccgctgctatcttgccagatccacactggtcctcccgaaagccaggttcatacacagcaactttttaattattctaacagttacccattaacagtcgactcctgtatttctgagagtcttgtactcacctctgaaatttaaaaacgtataaagagagcctgggttaatcagttctgcagcccctacgtgacactgtgctagttctccttcttctgtctcctccttaccctggccctgcacccctgtacttaagagggagaggtgggaggtgctgtctggtatcatttgctgcctcgccagtagagggtgccgctgtgcagggtaactgcccgcctgctcccttcctgacctcccctgaccccgaagatcactacctctgtcattcaggcattggggtacatcctgataagtcgtgtcagaactgccaatttcaggactgagatgtgtttttaaaaaacaaatccttataaactccactttgtactttagattttaaaactggggaaaaatgtgatattctttggaccacttttttaatttatataagccttaatgaacagtgtctatacatttgcatacacacacccccaccccagagtgttctcagtatgtcagagaaagtgccacagcattaggacgggagcttggagaacgttttctagaaaagggttagcttcctgttggcatgaaattttccaagcaaacctcattaaacatctgttgtttgttaaagatgttccactgaaagcaacgcatgtttcaaaggcacgtctttccgttcgttggttttctgtgtgtaaggagtagcattgctgttggcgcctaacctcgcgtgcactgcattctcaaccccgtaccagtgcatcatcagaagccttcctcgtgaccataactctgtgtctgcagatatgtgttcccgtgtaagccagttttccccttttactcagactgatttcacctagattgtcacggtttccttcatgttaactttgcgtgactttgttcttcctttactactctgtatgtaatatatatacatatatacgtacatatgctgtccaaatatatttgtatatatttgtatagcatttttacacctttattgagtaatctggtttcgaaaggaggtgagagtttagtcccttctgcagttttctccaagctgtgtcctgtgaatttcaacccttggagcctaagaaaaccctaggaagatgatgttaatttgctgtcatttcctaattcaggatctatcatcaaatgaaacatgaaaaaaacagtgacttttaaggtgaaaagagtttcaagcattccaaataaattatcaatgtttcataactttttattataaacccacctcctaataggaagccaagtactatttgatacagtggtaaaaaccaaactaccttgaatttttttaaggcaacttatgaataatgctcattttcacagtcagaatagctttaaaatatggttgaatttgatacacacaggaagttttcttgaagaacaatcctttcgcttttcttttttcttgagagatctaaagagaaactgtagattgttttcctgacagcaaaagactaatgtgacaaaatgaagtcattgtaaagaagcgatgcaacttgtcaaatatttaataaagaattatggaagctggaacattttctaaaaaaaaaata

SEQ ID NO: 378544 - DNA, 7988 bp, Homo sapiens
tggtattcccccggtatcagcagaggcgtgtacgggcactgctttaaaactgggaaggaggaagacgaggccagggagccggagggtcaccaaggtagatttccagcagcgctagtccagctgaacactttccagccttgtttttcagcagctttgaggaaaagtatagtgatccgtatgtgaaactttcattgtacgtagcggatgagaatagagaacttgctttggtccagacaaaaacaattaaaaagacactgaacccaaaatggaatgaagaattttatttcagggtaaacccatctaatcacagactcctatttgaagtatttgacgaaaatagactgacacgagacgacttcctgggccaggtggacgtgccccttagtcaccttccgacagaagatccaaccatggagcgaccctatacatttaaggactttctcctcagaccaagaagtcataagtctcgagttaagggatttttgcgattgaaaatggcctatatgccaaaaaatggaggtcaagatgaagaaaacagtgaccagagggatgacatggagcatggatgggaagttgttgactcaaatgactcggcttctcagcaccaagaggaacttcctcctcctcctctgcctcccgggtgggaagaaaaagtggacaatttaggccgaacttactatgtcaaccacaacaaccggaccactcagtggcacagaccaagcctgatggacgtgtcctcggagtcggacaataacatcagacagatcaaccaggaggcagcacaccggcgcttccgctcccgcaggcacatcagcgaagacttggagcccgagccctcggagggcggggatgtccccgagccttgggagaccatttcagaggaagtgaatatcgctggagactctctcggtctggctctgcccccaccaccggcctccccaggatctcggaccagccctcaggagctgtcagaggaactaagcagaaggcttcagatcactccagactccaatggggaacagttcagctctttgattcaaagagaaccctcctcaaggttgaggtcatgcagtgtcaccgacgcagttgcagaacagggccatctaccaccgccatcagtggcctatgtacataccacgccgggtctgccttcaggctgggaagaaagaaaagatgctaaggggcgcacatactatgtcaatcataacaatcgaaccacaacttggactcgacctatcatgcagcttgcagaagatggtgcgtccggatcagccacaaacagtaacaaccatctaatcgagcctcagatccgccggcctcgtagcctcagctcgccaacagtaactttatctgccccgctggagggtgccaaggactcacccgtacgtcgggctgtgaaagacaccctttccaacccacagtccccacagccatcaccttacaactcccccaaaccacaacacaaagtcacacagagcttcttgccacccggctgggaaatgaggatagcgccaaacggccggcccttcttcattgatcataacacaaagactacaacctgggaagatccacgtttgaaatttccagtacatatgcggtcaaagacatctttaaaccccaatgaccttggcccccttcctcctggctgggaagaaagaattcacttggatggccgaacgttttatattgatcataatagcaaaattactcagtgggaagacccaagactgcagaacccagctattactggtccggctgtcccttactccagagaatttaagcagaaatatgactacttcaggaagaaattaaagaaacctgctgatatccccaataggtttgaaatgaaacttcacagaaataacatatttgaagagtcctatcggagaattatgtccgtgaaaagaccagatgtcctaaaagctagactgtggattgagtttgaatcagagaaaggtcttgactatgggggtgtggccagagaatggttcttcttactgtccaaagagatgttcaacccctactacggcctctttgagtactctgccacggacaactacacccttcagatcaaccctaattcaggcctctgtaatgaggatcatttgtcctacttcacttttattggaagagttgctggtctggccgtatttcatgggaagctcttagatggtttcttcattagaccattttacaagatgatgttgggaaagcagataaccctgaatgacatggaatctgtggatagtgaatattacaactctttgaaatggatcctggagaatgaccctactgagctggacctcatgttctgcatagacgaagaaaactttggacagacatatcaagtggatttgaagcccaatgggtcagaaataatggtcacaaatgaaaacaaaagggaatatatcgacttagtcatccagtggagatttgtgaacagggtccagaagcagatgaacgccttcttggagggattcacagaactacttcctattgatttgattaaaatttttgatgaaaatgagctggagttgctcatgtgcggcctcggtgatgtggatgtgaatgactggagacagcattctatttacaagaacggctactgcccaaaccaccccgtcattcagtggttctggaaggctgtgctactcatggacgccgaaaagcgtatccggttactgcagtttgtcacagggacatcgcgagtaccctgtgcctcgggggtggttgttcttcaagcaagttctgcttgcacttttgcatttgcctaacagacttttgcagaggcgatggcagagagcagctgcaggcatggtccctggagccgagccttcaccacgcactcgtccaagttcggatgcgggaacctggtcccagcttgagttcctgcctttcccaccacaaattatcaactggttgatgtgtacactaattacatttcaggaggacttaatgctatttatgttgtgcctctgcaggcaaagcccttaataaatattttacatcctttctaatgacaatgaatggaattaatcactcaacaggtatagtattacgactcatgtttactttttaaaatgatttagaccgattttcagattttatttcgttatgattaaagatgtctcatgtacttggaaaagtgagcatttttttttttttttgtatttcactttcataccaggcttaatgtcaatgacatttttatttttgaagtactctgacacctccaccctctactttattagaattggaaggcaaatttttgtccaaaaacctacagacaagtactttgagagaatttccaatataatattagacataatgataattttttccatactcagaatgaaaaactggatattacgtttttgttttggggtttttttgtacaaatttagctaatagctacaggctgagagaattgtaacatagcatgacaaattttgtgttgacttgaaaggaatcacaccattattccttagaagtaattacatgtgttctaacacatttgagacagggttggactcccatttctcatccgagaaattacttaacccttcctggcgctgtacagtcatcttttattctatttcctctttgctgtttgtagtagagacattttgaatgaaacttggcactgcttgattcaaaactgtggaaaccagatctgtttagtctcctgtttgtatgcgtttgctaatggtagctaaataaccagtttttgttgtaaatgcaccaattctgaaggcactttatgtactacatggaggtcatatctggttttgtttttatttttttatcatgaacattaaatgtgatgatgatttcttttccctgcacacatctttccggtgcaatatctatcaattgtgaatctggctgctggtgtataaaaacctggatgtaaagctgagcctacagacctgtcctcaccaactgttttgtgatttctactcaactacaaagatttatttaatgtactcttaatctaactgagttttgttaccaatgacctgttgcatgcttcaataccgtgtactgcctgagttgtgcctcttgtgtgctagattaaaagtgagacagagacttgacttgatcctctgagctcaagctattgagctggtagtggcagaggactgagggtacctgcacagtttgattcttttccacgtgtaagtctccattgcagaattgtcgtgctttgagaaaacacctgaggcagtgtgggagttgaacgaccctgctgtcctttttaacctgtgttgtcctagaccctgtcggggcagtcaggggacactagagatttgatctcatgcgagtcatcaataggacaaaaaagttgtggtttggggaggtctgtttgttacataaaaaggacctttcggtgtaagaaattgccgtttttaccctgccctggctggcatgtgagaagccatggaaggttgtggttgtaaatgagttgtctaaaggggtgcagaggcctgaggtttctaaaagaaggtagatttctacagagctgagtgttggttcctttttcttattggttgaaaattacctggtagtgatcagaaaacttagatgctatgtactaaaaaaaaaaaaaaaaaaaaaaaaaaaaaaaaaaaattcccgctcatgagttttgactattggtgagatgttttccgctacagttaacatgacaaatgtctcagtggcaaaaatcccctttttgtaagcccccatagtctagaggcagttttctttttaagaatcatgccagagcctgagtcgagcagtatgctttcttggtttttgagagtaattgtgtaattgtagagggagaaatccaattctaacctaagaactgggattcttctgtcatcttgtaaaccgtatattgaaaaaaacagaatgtcactaaatgcatattaagtcaagtattggaaagtataaaagaaaaatcattctgacaatttctaagccagaagcaaacaagaattactgaaatctaccccatgaatacttggaaggcagtaattgtgagtgacacctcagttcatcaaccccttaataatatcagcttaattttaatgacaactaaatatgctgaagtgaggatttagtattttttaaaaaagcaaaacaaggttcagtagtcctcagcaattctccaagtttctctctttgcctaaaatggtcatagatcttgatttctctgaatcgtgatgaccacacccagtcatcttcacagcataattgcaggtggcagtaaagagagtgtgctgggtaaggagcagttgctgggtcattccttgggccccgacctgcccggggagtagccctgggggagagagggcagtgttgcctatcccagaggtcccagcagtcacactgctctgcaggccgggctctctttatagccagagaaatcaccttaatgcagtctctttagttgtctgctgaagctgtagttattatgggccacttacatgaggctgagaagtacgtgccggagctcacacactgcctgttgcggttctcttaacatcagttatcacagctgcctgtgggtcccgggtatttccattcctgccccttgttggcccgaggaaggatgtggaaagagcacctggcgggatgaaggtccaacagcctgtgcctctccactgctggccctggagccggcagcagtgaggcattcattgtctgtgttgcggtgtattcccagcttcagtgctcttttcctttttgcctgaaatgtttatgcttctctgcagccagtcctctaacaaatctcaagaacaaaggtaagacacttggtttttgtttccaggacccttcagaaggtgacatcagatattccctaaattcagacaatgagggatacagagcgacttggcatgtattatttctcccatgtaaggacaaagggacagattattattgttatttctgagacagagtcttgctctgtagctcaggctggagtgcagtggctcaatctcagctcaccacaacctctgcctcctggcttcaagcgattcttctgcctcagcctccccgaatagttgggattacaggcacccaccaccacgcctggctaatttttgtatttttagtagagatggtttcaccatgctggccaggctggtcttgaactcctgacctcaggtgatcctcccgcctcagccttccaaagtgctgggattacaagcatgagccaccgcacccggcctcacagtgacagattctgagaaacagcatgcaaaacatttgaaccattttctacatctcccattgttgcatagagagtgtgcaccgctgctatcttgccagatccacactggtcctcccgaaagccaggttcatacacagcaactttttaattattctaacagttacccattaacagtcgactcctgtatttctgagagtcttgtactcacctctgaaatttaaaaacgtataaagagagcctgggttaatcagttctgcagcccctacgtgacactgtgctagttctccttcttctgtctcctccttaccctggccctgcacccctgtacttaagagggagaggtgggaggtgctgtctggtatcatttgctgcctcgccagtagagggtgccgctgtgcagggtaactgcccgcctgctcccttcctgacctcccctgaccccgaagatcactacctctgtcattcaggcattggggtacatcctgataagtcgtgtcagaactgccaatttcaggactgagatgtgtttttaaaaaacaaatccttataaactccactttgtactttagattttaaaactggggaaaaatgtgatattctttggaccacttttttaatttatataagccttaatgaacagtgtctatacatttgcatacacacacccccaccccagagtgttctcagtatgtcagagaaagtgccacagcattaggacgggagcttggagaacgttttctagaaaagggttagcttcctgttggcatgaaattttccaagcaaacctcattaaacatctgttgtttgttaaagatgttccactgaaagcaacgcatgtttcaaaggcacgtctttccgttcgttggttttctgtgtgtaaggagtagcattgctgttggcgcctaacctcgcgtgcactgcattctcaaccccgtaccagtgcatcatcagaagccttcctcgtgaccataactctgtgtctgcagatatgtgttcccgtgtaagccagttttccccttttactcagactgatttcacctagattgtcacggtttccttcatgttaactttgcgtgactttgttcttcctttactactctgtatgtaatatatatacatatatacgtacatatgctgtccaaatatatttgtatatatttgtatagcatttttacacctttattgagtaatctggtttcgaaaggaggtgagagtttagtcccttctgcagttttctccaagctgtgtcctgtgaatttcaacccttggagcctaagaaaaccctaggaagatgatgttaatttgctgtcatttcctaattcaggatctatcatcaaatgaaacatgaaaaaaacagtgacttttaaggtgaaaagagtttcaagcattccaaataaattatcaatgtttcataactttttattataaacccacctcctaataggaagccaagtactatttgatacagtggtaaaaaccaaactaccttgaatttttttaaggcaacttatgaataatgctcattttcacagtcagaatagctttaaaatatggttgaatttgatacacacaggaagttttcttgaagaacaatcctttcgcttttcttttttcttgagagatctaaagagaaactgtagattgttttcctgacagcaaaagactaatgtgacaaaatgaagtcattgtaaagaagcgatgcaacttgtcaaatatttaataaagaattatggaagctggaacattttctaaaaaaaaaata

SEQ ID NO: 378545 - DNA, 6011 bp, Homo sapiens
gagaagcagccagggtaatgcacagatgctgctggagcgtgagagaatccacaggtcccatgcgtaagactagaggggtagggaggacgactgtggcatttttatatccgatacgacatgccgtggcttgcgcaaggttcgaattgagctgccctcgtgactgctgcctctgtgatctgctatggcaggtggagcctggaacaggtgtctgccttcctctgttgttatgatttgctagcttaccttcgcggcacagtgaccacatgctggcactgagggtggtcatttctcagtgtgtgatctcgcacctttcacatcctgcttttacatctggtaaattttcttcctagttgctcatgtgcggcctcggtgatgtggatgtgaatgactggagacagcattctatttacaagaacggctactgcccaaaccaccccgtcattcagtggttctggaaggctgtgctactcatggacgccgaaaagcgtatccggttactgcagtttgtcacagggacatcgcgagtacctatgaatggatttgccgaactttatggttccaatggtcctcagctgtttacaatagagcaatggggcagtcctgagaaactgcccagagctcacacatgctttaatcgccttgacttacctccatatgaaacctttgaagatttacgagagaaacttctcatggccgtggaaaatgctcaaggatttgaaggggtggattaagcaccctgtgcctcgggggtggttgttcttcaagcaagttctgcttgcacttttgcatttgcctaacagacttttgcagaggcgatggcagagagcagctgcaggcatggtccctggagccgagccttcaccacgcactcgtccaagttcggatgcgggaacctggtcccagcttgagttcctgcctttcccaccacaaattatcaactggttgatgtgtacactaattacatttcaggaggacttaatgctatttatgttgtgcctctgcaggcaaagcccttaataaatattttacatcctttctaatgacaatgaatggaattaatcactcaacaggtatagtattacgactcatgtttactttttaaaatgatttagaccgattttcagattttatttcgttatgattaaagatgtctcatgtacttggaaaagtgagcatttttttttttttttgtatttcactttcataccaggcttaatgtcaatgacatttttatttttgaagtactctgacacctccaccctctactttattagaattggaaggcaaatttttgtccaaaaacctacagacaagtactttgagagaatttccaatataatattagacataatgataattttttccatactcagaatgaaaaactggatattacgtttttgttttggggtttttttgtacaaatttagctaatagctacaggctgagagaattgtaacatagcatgacaaattttgtgttgacttgaaaggaatcacaccattattccttagaagtaattacatgtgttctaacacatttgagacagggttggactcccatttctcatccgagaaattacttaacccttcctggcgctgtacagtcatcttttattctatttcctctttgctgtttgtagtagagacattttgaatgaaacttggcactgcttgattcaaaactgtggaaaccagatctgtttagtctcctgtttgtatgcgtttgctaatggtagctaaataaccagtttttgttgtaaatgcaccaattctgaaggcactttatgtactacatggaggtcatatctggttttgtttttatttttttatcatgaacattaaatgtgatgatgatttcttttccctgcacacatctttccggtgcaatatctatcaattgtgaatctggctgctggtgtataaaaacctggatgtaaagctgagcctacagacctgtcctcaccaactgttttgtgatttctactcaactacaaagatttatttaatgtactcttaatctaactgagttttgttaccaatgacctgttgcatgcttcaataccgtgtactgcctgagttgtgcctcttgtgtgctagattaaaagtgagacagagacttgacttgatcctctgagctcaagctattgagctggtagtggcagaggactgagggtacctgcacagtttgattcttttccacgtgtaagtctccattgcagaattgtcgtgctttgagaaaacacctgaggcagtgtgggagttgaacgaccctgctgtcctttttaacctgtgttgtcctagaccctgtcggggcagtcaggggacactagagatttgatctcatgcgagtcatcaataggacaaaaaagttgtggtttggggaggtctgtttgttacataaaaaggacctttcggtgtaagaaattgccgtttttaccctgccctggctggcatgtgagaagccatggaaggttgtggttgtaaatgagttgtctaaaggggtgcagaggcctgaggtttctaaaagaaggtagatttctacagagctgagtgttggttcctttttcttattggttgaaaattacctggtagtgatcagaaaacttagatgctatgtactaaaaaaaaaaaaaaaaaaaaaaaaaaaaaaaaaaaattcccgctcatgagttttgactattggtgagatgttttccgctacagttaacatgacaaatgtctcagtggcaaaaatcccctttttgtaagcccccatagtctagaggcagttttctttttaagaatcatgccagagcctgagtcgagcagtatgctttcttggtttttgagagtaattgtgtaattgtagagggagaaatccaattctaacctaagaactgggattcttctgtcatcttgtaaaccgtatattgaaaaaaacagaatgtcactaaatgcatattaagtcaagtattggaaagtataaaagaaaaatcattctgacaatttctaagccagaagcaaacaagaattactgaaatctaccccatgaatacttggaaggcagtaattgtgagtgacacctcagttcatcaaccccttaataatatcagcttaattttaatgacaactaaatatgctgaagtgaggatttagtattttttaaaaaagcaaaacaaggttcagtagtcctcagcaattctccaagtttctctctttgcctaaaatggtcatagatcttgatttctctgaatcgtgatgaccacacccagtcatcttcacagcataattgcaggtggcagtaaagagagtgtgctgggtaaggagcagttgctgggtcattccttgggccccgacctgcccggggagtagccctgggggagagagggcagtgttgcctatcccagaggtcccagcagtcacactgctctgcaggccgggctctctttatagccagagaaatcaccttaatgcagtctctttagttgtctgctgaagctgtagttattatgggccacttacatgaggctgagaagtacgtgccggagctcacacactgcctgttgcggttctcttaacatcagttatcacagctgcctgtgggtcccgggtatttccattcctgccccttgttggcccgaggaaggatgtggaaagagcacctggcgggatgaaggtccaacagcctgtgcctctccactgctggccctggagccggcagcagtgaggcattcattgtctgtgttgcggtgtattcccagcttcagtgctcttttcctttttgcctgaaatgtttatgcttctctgcagccagtcctctaacaaatctcaagaacaaaggtaagacacttggtttttgtttccaggacccttcagaaggtgacatcagatattccctaaattcagacaatgagggatacagagcgacttggcatgtattatttctcccatgtaaggacaaagggacagattattattgttatttctgagacagagtcttgctctgtagctcaggctggagtgcagtggctcaatctcagctcaccacaacctctgcctcctggcttcaagcgattcttctgcctcagcctccccgaatagttgggattacaggcacccaccaccacgcctggctaatttttgtatttttagtagagatggtttcaccatgctggccaggctggtcttgaactcctgacctcaggtgatcctcccgcctcagccttccaaagtgctgggattacaagcatgagccaccgcacccggcctcacagtgacagattctgagaaacagcatgcaaaacatttgaaccattttctacatctcccattgttgcatagagagtgtgcaccgctgctatcttgccagatccacactggtcctcccgaaagccaggttcatacacagcaactttttaattattctaacagttacccattaacagtcgactcctgtatttctgagagtcttgtactcacctctgaaatttaaaaacgtataaagagagcctgggttaatcagttctgcagcccctacgtgacactgtgctagttctccttcttctgtctcctccttaccctggccctgcacccctgtacttaagagggagaggtgggaggtgctgtctggtatcatttgctgcctcgccagtagagggtgccgctgtgcagggtaactgcccgcctgctcccttcctgacctcccctgaccccgaagatcactacctctgtcattcaggcattggggtacatcctgataagtcgtgtcagaactgccaatttcaggactgagatgtgtttttaaaaaacaaatccttataaactccactttgtactttagattttaaaactggggaaaaatgtgatattctttggaccacttttttaatttatataagccttaatgaacagtgtctatacatttgcatacacacacccccaccccagagtgttctcagtatgtcagagaaagtgccacagcattaggacgggagcttggagaacgttttctagaaaagggttagcttcctgttggcatgaaattttccaagcaaacctcattaaacatctgttgtttgttaaagatgttccactgaaagcaacgcatgtttcaaaggcacgtctttccgttcgttggttttctgtgtgtaaggagtagcattgctgttggcgcctaacctcgcgtgcactgcattctcaaccccgtaccagtgcatcatcagaagccttcctcgtgaccataactctgtgtctgcagatatgtgttcccgtgtaagccagttttccccttttactcagactgatttcacctagattgtcacggtttccttcatgttaactttgcgtgactttgttcttcctttactactctgtatgtaatatatatacatatatacgtacatatgctgtccaaatatatttgtatatatttgtatagcatttttacacctttattgagtaatctggtttcgaaaggaggtgagagtttagtcccttctgcagttttctccaagctgtgtcctgtgaatttcaacccttggagcctaagaaaaccctaggaagatgatgttaatttgctgtcatttcctaattcaggatctatcatcaaatgaaacatgaaaaaaacagtgacttttaaggtgaaaagagtttcaagcattccaaataaattatcaatgtttcataactttttattataaacccacctcctaataggaagccaagtactatttgatacagtggtaaaaaccaaactaccttgaatttttttaaggcaacttatgaataatgctcattttcacagtcagaatagctttaaaatatggttgaatttgatacacacaggaagttttcttgaagaacaatcctttcgcttttcttttttcttgagagatctaaagagaaactgtagattgttttcctgacagcaaaagactaatgtgacaaaatgaagtcattgtaaagaagcgatgcaacttgtcaaatatttaataaagaattatggaagctggaacattttctaaaaaaaaaata

SEQ ID NO: 378546 - DNA, 3348 bp, Homo sapiens
tggtattcccccggtatcagcagaggcgtgtacgggcactgctttaaaactgggaaggaggaagacgaggccagggagccggagggtcaccaaggtagatttccagcagcgctagtccagctgaacactttccagccttgtttttcagcagctttgaggaaaagtatagtgatccgtatgtgaaactttcattgtacgtagcggatgagaatagagaacttgctttggtccagacaaaaacaattaaaaagacactgaacccaaaatggaatgaagaattttatttcagggtaaacccatctaatcacagactcctatttgaagtatttgacgaaaatagactgacacgagacgacttcctgggccaggtggacgtgccccttagtcaccttccgacagaagatccaaccatggagcgaccctatacatttaaggactttctcctcagaccaagaagtcataagtctcgagttaagggatttttgcgattgaaaatggcctatatgccaaaaaatggaggtcaagatgaagaaaacagtgaccagagggatgacatggagcatggatgggaagttgttgactcaaatgactcggcttctcagcaccaagaggaacttcctcctcctcctctgcctcccgggtgggaagaaaaagtggacaatttaggccgaacttactatgtcaaccacaacaaccggaccactcagtggcacagaccaagcctgatggacgtgtcctcggagtcggacaataacatcagacagatcaaccaggaggcagcacaccggcgcttccgctcccgcaggcacatcagcgaagacttggagcccgagccctcggagggcggggatgtccccgagccttgggagaccatttcagaggaagtgaatatcgctggagactctctcggtctggctctgcccccaccaccggcctccccaggatctcggaccagccctcaggagctgtcagaggaactaagcagaaggcttcagatcactccagactccaatggggaacagttcagctctttgattcaaagagaaccctcctcaaggttgaggtcatgcagtgtcaccgacgcagttgcagaacagggccatctaccaccgccatcagtggcctatgtacataccacgccgggtctgccttcaggctgggaagaaagaaaagatgctaaggggcgcacatactatgtcaatcataacaatcgaaccacaacttggactcgacctatcatgcagcttgcagaagatggtgcgtccggatcagccacaaacagtaacaaccatctaatcgagcctcagatccgccggcctcgtagcctcagctcgccaacagtaactttatctgccccgctggagggtgccaaggactcacccgtacgtcgggctgtgaaagacaccctttccaacccacagtccccacagccatcaccttacaactcccccaaaccacaacacaaagtcacacagagcttcttgccacccggctgggaaatgaggatagcgccaaacggccggcccttcttcattgatcataacacaaagactacaacctgggaagatccacgtttgaaatttccagtacatatgcggtcaaagacatctttaaaccccaatgaccttggcccccttcctcctggctgggaagaaagaattcacttggatggccgaacgttttatattgatcataatagcaaaattactcagtgggaagacccaagactgcagaacccagctattactggtccggctgtcccttactccagagaatttaagcagaaatatgactacttcaggaagaaattaaagaaacctgctgatatccccaataggtttgaaatgaaacttcacagaaataacatatttgaagagtcctatcggagaattatgtccgtgaaaagaccagatgtcctaaaagctagactgtggattgagtttgaatcagagaaaggtcttgactatgggggtgtggccagagaatggttcttcttactgtccaaagagatgttcaacccctactacggcctctttgagtactctgccacggacaactacacccttcagatcaaccctaattcaggcctctgtaatgaggatcatttgtcctacttcacttttattggaagagttgctggtctggccgtatttcatgggaagctcttagatggtttcttcattagaccattttacaagatgatgttgggaaagcagataaccctgaatgacatggaatctgtggatagtgaatattacaactctttgaaatggatcctggagaatgaccctactgagctggacctcatgttctgcatagacgaagaaaactttggacagacatatcaagtggatttgaagcccaatgggtcagaaataatggtcacaaatgaaaacaaaagggaatatatcgacttagtcatccagtggagatttgtgaacagggtccagaagcagatgaacgccttcttggagggattcacagaactacttcctattgatttgattaaaatttttgatgaaaatgagctggagttgctcatgtgcggcctcggtgatgtggatgtgaatgactggagacagcattctatttacaagaacggctactgcccaaaccaccccgtcattcagtggttctggaaggctgtgctactcatggacgccgaaaagcgtatccggttactgcagtttgtcacagggacatcgcgagtacctatgaatggatttgccgaactttatggttccaatggtcctcagctgtttacaatagagcaatggggcagtcctgagaaactgcccagagctcacacatgctttaatcgccttgacttacctccatatgaaacctttgaagatttacgagagaaacttctcatggccgtggaaaatgctcaaggatttgaaggggtggattaagcaccctgtgcctcgggggtggttgttcttcaagcaagttctgcttgcacttttgcatttgcctaacagacttttgcagaggcgatggcagagagcagctgcaggcatggtccctggagccgagccttcaccacgcactcgtccaagttcggatgcgggaacctggtcccagcttgagttcctgcctttcccaccacaaattatcaactggttgatgtgtacactaattacatttcaggaggacttaatgctatttatgttgtgcctctgcaggcaaagcccttaataaatattttacatcctttctaatgacaatgaatggaattaatcactcaacaggtatagtattacgactcatgtttactttttaaaatgatttagaccgattttcagattttatttcgttatgattaaagatgtctcatgtacttgg

SEQ ID NO: 378547 - DNA, 4516 bp, Homo sapiens
tggtattcccccggtatcagcagaggcgtgtacgggcactgctttaaaactgggaaggaggaagacgaggccagggagccggagggtcaccaaggtagatttccagcagcgctagtccagctgaacactttccagccttgtttttcagcagctttgaggaaaagtatagtgatccgtatgtgaaactttcattgtacgtagcggatgagaatagagaacttgctttggtccagacaaaaacaattaaaaagacactgaacccaaaatggaatgaagaattttatttcagggtaaacccatctaatcacagactcctatttgaagtatttgacgaaaatagactgacacgagacgacttcctgggccaggtggacgtgccccttagtcaccttccgacagaagatccaaccatggagcgaccctatacatttaaggactttctcctcagaccaagaagtcataagtctcgagttaagggatttttgcgattgaaaatggcctatatgccaaaaaatggaggtcaagatgaagaaaacagtgaccagagggatgacatggagcatggatgggaagttgttgactcaaatgactcggcttctcagcaccaagaggaacttcctcctcctcctctgcctcccgggtgggaagaaaaagtggacaatttaggccgaacttactatgtcaaccacaacaaccggaccactcagtggcacagaccaagcctgatggacgtgtcctcggagtcggacaataacatcagacagatcaaccaggaggcagcacaccggcgcttccgctcccgcaggcacatcagcgaagacttggagcccgagccctcggagggcggggatgtccccgagccttgggagaccatttcagaggaagtgaatatcgctggagactctctcggtctggctctgcccccaccaccggcctccccaggatctcggaccagccctcaggagctgtcagaggaactaagcagaaggcttcagatcactccagactccaatggggaacagttcagctctttgattcaaagagaaccctcctcaaggttgaggtcatgcagtgtcaccgacgcagttgcagaacagggccatctaccaccgccatcagtggcctatgtacataccacgccgggtctgccttcaggctgggaagaaagaaaagatgctaaggggcgcacatactatgtcaatcataacaatcgaaccacaacttggactcgacctatcatgcagcttgcagaagatggtgcgtccggatcagccacaaacagtaacaaccatctaatcgagcctcagatccgccggcctcgtagcctcagctcgccaacagtaactttatctgccccgctggagggtgccaaggactcacccgtacgtcgggctgtgaaagacaccctttccaacccacagtccccacagccatcaccttacaactcccccaaaccacaacacaaagtcacacagagcttcttgccacccggctgggaaatgaggatagcgccaaacggccggcccttcttcattgatcataacacaaagactacaacctgggaagatccacgtttgaaatttccagtacatatgcggtcaaagacatctttaaaccccaatgaccttggcccccttcctcctggctgggaagaaagaattcacttggatggccgaacgttttatattgatcataatagcaaaattactcagtgggaagacccaagactgcagaacccagctattactggtccggctgtcccttactccagagaatttaagcagaaatatgactacttcaggaagaaattaaagaaacctgctgatatccccaataggtttgaaatgaaacttcacagaaataacatatttgaagagtcctatcggagaattatgtccgtgaaaagaccagatgtcctaaaagctagactgtggattgagtttgaatcagagaaaggtcttgactatgggggtgtggccagagaatggttcttcttactgtccaaagagatgttcaacccctactacggcctctttgagtactctgccacggacaactacacccttcagatcaaccctaattcaggcctctgtaatgaggatcatttgtcctacttcacttttattggaagagttgctggtctggccgtatttcatgggaagctcttagatggtttcttcattagaccattttacaagatgatgttgggaaagcagataaccctgaatgacatggaatctgtggatagtgaatattacaactctttgaaatggatcctggagaatgaccctactgagctggacctcatgttctgcatagacgaagaaaactttggacagacatatcaagtggatttgaagcccaatgggtcagaaataatggtcacaaatgaaaacaaaagggaatatatcgacttagtcatccagtggagatttgtgaacagggtccagaagcagatgaacgccttcttggagggattcacagaactacttcctattgatttgattaaaatttttgatgaaaatgagctggagttgctcatgtgcggcctcggtgatgtggatgtgaatgactggagacagcattctatttacaagaacggctactgcccaaaccaccccgtcattcagtggttctggaaggctgtgctactcatggacgccgaaaagcgtatccggttactgcagtttgtcacagggacatcgcgagtacctatgaatggatttgccgaactttatggttccaatggtcctcagctgtttacaatagagcaatggggcagtcctgagaaactgcccagagctcacacatgctttaatcgccttgacttacctccatatgaaacctttgaagatttacgagagaaacttctcatggccgtggaaaatgctcaaggatttgaaggggtggattaagcaccctgtgcctcgggggtggttgttcttcaagcaagttctgcttgcacttttgcatttgcctaacagacttttgcagaggcgatggcagagagcagctgcaggcatggtccctggagccgagccttcaccacgcactcgtccaagttcggatgcgggaacctggtcccagcttgagttcctgcctttcccaccacaaattatcaactggttgatgtgtacactaattacatttcaggaggacttaatgctatttatgttgtgcctctgcaggcaaagcccttaataaatattttacatcctttctaatgacaatgaatggaattaatcactcaacaggtatagtattacgactcatgtttactttttaaaatgatttagaccgattttcagattttatttcgttatgattaaagatgtctcatgtacttggaaaagtgagcatttttttttttttttgtatttcactttcataccaggcttaatgtcaatgacatttttatttttgaagtactctgacacctccaccctctactttattagaattggaaggcaaatttttgtccaaaaacctacagacaagtactttgagagaatttccaatataatattagacataatgataattttttccatactcagaatgaaaaactggatattacgtttttgttttggggtttttttgtacaaatttagctaatagctacaggctgagagaattgtaacatagcatgacaaattttgtgttgacttgaaaggaatcacaccattattccttagaagtaattacatgtgttctaacacatttgagacagggttggactcccatttctcatccgagaaattacttaacccttcctggcgctgtacagtcatcttttattctatttcctctttgctgtttgtagtagagacattttgaatgaaacttggcactgcttgattcaaaactgtggaaaccagatctgtttagtctcctgtttgtatgcgtttgctaatggtagctaaataaccagtttttgttgtaaatgcaccaattctgaaggcactttatgtactacatggaggtcatatctggttttgtttttatttttttatcatgaacattaaatgtgatgatgatttcttttccctgcacacatctttccggtgcaatatctatcaattgtgaatctggctgctggtgtataaaaacctggatgtaaagctgagcctacagacctgtcctcaccaactgttttgtgatttctactcaactacaaagatttatttaatgtactcttaatctaactgagttttgttaccaatgacctgttgcatgcttcaataccgtgtactgcctgagttgtgcctcttgtgtgctagattaaaagtgagacagagacttgacttgatcctctgagctcaagctattgagctggtagtggcagaggactgagggtaaaaaacaaataaaagtttttcgcgcatacctacttatcctgcacgtgtaatcctaatttcctcgagggggggcccggcacccatttcccccaatagggagccgtattacaatacacgggccgttgtatacaacggcttgagtgaaaaaacccgtgccc

SEQ ID NO: 378548 - DNA, 4052 bp, Homo sapiens
gagtcacagaggaagccatttccagagaggaacaaccgtgtagactgctttcctgggagtcaagttaaaacttctctcctgtgaccttgtcacccggcagtggaaagttacccttggctgcagccacgacttccgcatactcttcagaacttgctctgcccttgagttttccagctttcctttaatgcactaaacctttaatattgtattctcctaaatgagacgtctcgcatttgagcaggtaacactcggggagagtcccgtattctcagagtaaaagttgtttctggaattgatctcgccaaaaaggacatctttggagccagtgatccgtatgtgaaactttcattgtacgtagcggatgagaatagagaacttgctttggtccagacaaaaacaattaaaaagacactgaacccaaaatggaatgaagaattttatttcagggtaaacccatctaatcacagactcctatttgaagtatttgacgaaaatagactgacacgagacgacttcctgggccaggtggacgtgccccttagtcaccttccgacagaagatccaaccatggagcgaccctatacatttaaggactttctcctcagaccaagaagtcataagtctcgagttaagggatttttgcgattgaaaatggcctatatgccaaaaaaaaaaaaaaaaaaaaaaaaaaaaaaattcccgctcatgagttttgactattggtgagatgttttccgctacagttaacatgacaaatgtctcagtggcaaaaatcccctttttgtaagcccccatagtctagaggcagttttctttttaagaatcatgccagagcctgagtcgagcagtatgctttcttggtttttgagagtaattgtgtaattgtagagggagaaatccaattctaacctaagaactgggattcttctgtcatcttgtaaaccgtatattgaaaaaaacagaatgtcactaaatgcatattaagtcaagtattggaaagtataaaagaaaaatcattctgacaatttctaagccagaagcaaacaagaattactgaaatctaccccatgaatacttggaaggcagtaattgtgagtgacacctcagttcatcaaccccttaataatatcagcttaattttaatgacaactaaatatgctgaagtgaggatttagtattttttaaaaaagcaaaacaaggttcagtagtcctcagcaattctccaagtttctctctttgcctaaaatggtcatagatcttgatttctctgaatcgtgatgaccacacccagtcatcttcacagcataattgcaggtggcagtaaagagagtgtgctgggtaaggagcagttgctgggtcattccttgggccccgacctgcccggggagtagccctgggggagagagggcagtgttgcctatcccagaggtcccagcagtcacactgctctgcaggccgggctctctttatagccagagaaatcaccttaatgcagtctctttagttgtctgctgaagctgtagttattatgggccacttacatgaggctgagaagtacgtgccggagctcacacactgcctgttgcggttctcttaacatcagttatcacagctgcctgtgggtcccgggtatttccattcctgccccttgttggcccgaggaaggatgtggaaagagcacctggcgggatgaaggtccaacagcctgtgcctctccactgctggccctggagccggcagcagtgaggcattcattgtctgtgttgcggtgtattcccagcttcagtgctcttttcctttttgcctgaaatgtttatgcttctctgcagccagtcctctaacaaatctcaagaacaaaggtaagacacttggtttttgtttccaggacccttcagaaggtgacatcagatattccctaaattcagacaatgagggatacagagcgacttggcatgtattatttctcccatgtaaggacaaagggacagattattattgttatttctgagacagagtcttgctctgtagctcaggctggagtgcagtggctcaatctcagctcaccacaacctctgcctcctggcttcaagcgattcttctgcctcagcctccccgaatagttgggattacaggcacccaccaccacgcctggctaatttttgtatttttagtagagatggtttcaccatgctggccaggctggtcttgaactcctgacctcaggtgatcctcccgcctcagccttccaaagtgctgggattacaagcatgagccaccgcacccggcctcacagtgacagattctgagaaacagcatgcaaaacatttgaaccattttctacatctcccattgttgcatagagagtgtgcaccgctgctatcttgccagatccacactggtcctcccgaaagccaggttcatacacagcaactttttaattattctaacagttacccattaacagtcgactcctgtatttctgagagtcttgtactcacctctgaaatttaaaaacgtataaagagagcctgggttaatcagttctgcagcccctacgtgacactgtgctagttctccttcttctgtctcctccttaccctggccctgcacccctgtacttaagagggagaggtgggaggtgctgtctggtatcatttgctgcctcgccagtagagggtgccgctgtgcagggtaactgcccgcctgctcccttcctgacctcccctgaccccgaagatcactacctctgtcattcaggcattggggtacatcctgataagtcgtgtcagaactgccaatttcaggactgagatgtgtttttaaaaaacaaatccttataaactccactttgtactttagattttaaaactggggaaaaatgtgatattctttggaccacttttttaatttatataagccttaatgaacagtgtctatacatttgcatacacacacccccaccccagagtgttctcagtatgtcagagaaagtgccacagcattaggacgggagcttggagaacgttttctagaaaagggttagcttcctgttggcatgaaattttccaagcaaacctcattaaacatctgttgtttgttaaagatgttccactgaaagcaacgcatgtttcaaaggcacgtctttccgttcgttggttttctgtgtgtaaggagtagcattgctgttggcgcctaacctcgcgtgcactgcattctcaaccccgtaccagtgcatcatcagaagccttcctcgtgaccataactctgtgtctgcagatatgtgttcccgtgtaagccagttttccccttttactcagactgatttcacctagattgtcacggtttccttcatgttaactttgcgtgactttgttcttcctttactactctgtatgtaatatatatacatatatacgtacatatgctgtccaaatatatttgtatatatttgtatagcatttttacacctttattgagtaatctggtttcgaaaggaggtgagagtttagtcccttctgcagttttctccaagctgtgtcctgtgaatttcaacccttggagcctaagaaaaccctaggaagatgatgttaatttgctgtcatttcctaattcaggatctatcatcaaatgaaacatgaaaaaaacagtgacttttaaggtgaaaagagtttcaagcattccaaataaattatcaatgtttcataactttttattataaacccacctcctaataggaagccaagtactatttgatacagtggtaaaaaccaaactaccttgaatttttttaaggcaacttatgaataatgctcattttcacagtcagaatagctttaaaatatggttgaatttgatacacacaggaagttttcttgaagaacaatcctttcgcttttcttttttcttgagagatctaaagagaaactgtagattgttttcctgacagcaaaagactaatgtgacaaaatgaagtcattgtaaagaagcgatgcaacttgtcaaatatttaataaagaattatggaagctggaacattttctaaaaaaaaaata

SEQ ID NO: 378549 - DNA, 3209 bp, Homo sapiens
tggtattcccccggtatcagcagaggcgtgtacgggcactgctttaaaactgggaaggaggaagacgaggccagggagccggagggtcaccaaggtagatttccagcagcgctagtccagctgaacactttccagccttgtttttcagcagctttgaggaaaagtatagtgatccgtatgtgaaactttcattgtacgtagcggatgagaatagagaacttgctttggtccagacaaaaacaattaaaaagacactgaacccaaaatggaatgaagaattttatttcagggtaaacccatctaatcacagactcctatttgaagtatttgacgaaaatagactgacacgagacgacttcctgggccaggtggacgtgccccttagtcaccttccgacagaagatccaaccatggagcgaccctatacatttaaggactttctcctcagaccaagaagtcataagtctcgagttaagggatttttgcgattgaaaatggcctatatgccaaaaaatggaggtcaagatgaagaaaacagtgaccagagggatgacatggagcatggatgggaagttgttgactcaaatgactcggcttctcagcaccaagaggaacttcctcctcctcctctgcctcccgggtgggaagaaaaagtggacaatttaggccgaacttactatgtcaaccacaacaaccggaccactcagtggcacagaccaagcctgatggacgtgtcctcggagtcggacaataacatcagacagatcaaccaggaggcagcacaccggcgcttccgctcccgcaggcacatcagcgaagacttggagcccgagccctcggagggcggggatgtccccgagccttgggagaccatttcagaggaagtgaatatcgctggagactctctcggtctggctctgcccccaccaccggcctccccaggatctcggaccagccctcaggagctgtcagaggaactaagcagaaggcttcagatcactccagactccaatggggaacagttcagctctttgattcaaagagaaccctcctcaaggttgaggtcatgcagtgtcaccgacgcagttgcagaacagggccatctaccaccgccatcagtggcctatgtacataccacgccgggtctgccttcaggctgggaagaaagaaaagatgctaaggggcgcacatactatgtcaatcataacaatcgaaccacaacttggactcgacctatcatgcagcttgcagaagatggtgcgtccggatcagccacaaacagtaacaaccatctaatcgagcctcagatccgccggcctcgtagcctcagctcgccaacagtaactttatctgccccgctggagggtgccaaggactcacccgtacgtcgggctgtgaaagacaccctttccaacccacagtccccacagccatcaccttacaactcccccaaaccacaacacaaagtcacacagagcttcttgccacccggctgggaaatgaggatagcgccaaacggccggcccttcttcattgatcataacacaaagactacaacctgggaagatccacgtttgaaatttccagtacatatgcggtcaaagacatctttaaaccccaatgaccttggcccccttcctcctggctgggaagaaagaattcacttggatggccgaacgttttatattgatcataatagcaaaattactcagtgggaagacccaagactgcagaacccagctattactggtccggctgtcccttactccagagaatttaagcagaaatatgactacttcaggaagaaattaaagaaacctgctgatatccccaataggtttgaaatgaaacttcacagaaataacatatttgaagagtcctatcggagaattatgtccgtgaaaagaccagatgtcctaaaagctagactgtggattgagtttgaatcagagaaaggtcttgactatgggggtgtggccagagaatggttcttcttactgtccaaagagatgttcaacccctactacggcctctttgagtactctgccacggacaactacacccttcagatcaaccctaattcaggcctctgtaatgaggatcatttgtcctacttcacttttattggaagagttgctggtctggccgtatttcatgggaagctcttagatggtttcttcattagaccattttacaagatgatgttgggaaagcagataaccctgaatgacatggaatctgtggatagtgaatattacaactctttgaaatggatcctggagaatgaccctactgagctggacctcatgttctgcatagacgaagaaaactttggacagacatatcaagtggatttgaagcccaatgggtcagaaataatggtcacaaatgaaaacaaaagggaatatatcgacttagtcatccagtggagatttgtgaacagggtccagaagcagatgaacgccttcttggagggattcacagaactacttcctattgatttgattaaaatttttgatgaaaatgagctggagttgctcatgtgcggcctcggtgatgtggatgtgaatgactggagacagcattctatttacaagaacggctactgcccaaaccaccccgtcattcagtggttctggaaggctgtgctactcatggacgccgaaaagcgtatccggttactgcagtttgtcacagggacatcgcgagtacctatgaatggatttgccgaactttatggttccaatggtcctcagctgtttacaatagagcaatggggcagtcctgagaaactgcccagagctcacacatgctttaatcgccttgacttacctccatatgaaacctttgaagatttacgagagaaacttctcatggccgtggaaaatgctcaaggatttgaaggggtggattaagcaccctgtgcctcggtataccaccaaaaatgtatggttataccttatcctaaaaaggcaccatgcaggcatttaagactgaaccagtgaactctaaatatgtagtagtagaaaatatcactaatcaaaacttccagcatcagatggtacaaaaccccaagaggactggtgacatgtaccccgggatggcaaccccagcttctggcaaccccacagcccagcgggagcttcagctctggtcaggtgcacggctgccaaagtctgcacaccttggggacaaggaaaggagacact

SEQ ID NO: 378550 - DNA, 3197 bp, Homo sapiens
tggtattcccccggtatcagcagaggcgtgtacgggcactgctttaaaactgggaaggaggaagacgaggccagggagccggagggtcaccaaggtagatttccagcagcgctagtccagctgaacactttccagccttgtttttcagcagctttgaggaaaagtatagtgatccgtatgtgaaactttcattgtacgtagcggatgagaatagagaacttgctttggtccagacaaaaacaattaaaaagacactgaacccaaaatggaatgaagaattttatttcagggtaaacccatctaatcacagactcctatttgaagtatttgacgaaaatagactgacacgagacgacttcctgggccaggtggacgtgccccttagtcaccttccgacagaagatccaaccatggagcgaccctatacatttaaggactttctcctcagaccaagaagtcataagtctcgagttaagggatttttgcgattgaaaatggcctatatgccaaaaaatggaggtcaagatgaagaaaacagtgaccagagggatgacatggagcatggatgggaagttgttgactcaaatgactcggcttctcagcaccaagaggaacttcctcctcctcctctgcctcccgggtgggaagaaaaagtggacaatttaggccgaacttactatgtcaaccacaacaaccggaccactcagtggcacagaccaagcctgatggacgtgtcctcggagtcggacaataacatcagacagatcaaccaggaggcagcacaccggcgcttccgctcccgcaggcacatcagcgaagacttggagcccgagccctcggagggcggggatgtccccgagccttgggagaccatttcagaggaagtgaatatcgctggagactctctcggtctggctctgcccccaccaccggcctccccaggatctcggaccagccctcaggagctgtcagaggaactaagcagaaggcttcagatcactccagactccaatggggaacagttcagctctttgattcaaagagaaccctcctcaaggttgaggtcatgcagtgtcaccgacgcagttgcagaacagggccatctaccaccgccatcagtggcctatgtacataccacgccgggtctgccttcaggctgggaagaaagaaaagatgctaaggggcgcacatactatgtcaatcataacaatcgaaccacaacttggactcgacctatcatgcagcttgcagaagatggtgcgtccggatcagccacaaacagtaacaaccatctaatcgagcctcagatccgccggcctcgtagcctcagctcgccaacagtaactttatctgccccgctggagggtgccaaggactcacccgtacgtcgggctgtgaaagacaccctttccaacccacagtccccacagccatcaccttacaactcccccaaaccacaacacaaagtcacacagagcttcttgccacccggctgggaaatgaggatagcgccaaacggccggcccttcttcattgatcataacacaaagactacaacctgggaagatccacgtttgaaatttccagtacatatgcggtcaaagacatctttaaaccccaatgaccttggcccccttcctcctggctgggaagaaagaattcacttggatggccgaacgttttatattgatcataatagcaaaattactcagtgggaagacccaagactgcagaacccagctattactggtccggctgtcccttactccagagaatttaagcagaaatatgactacttcaggaagaaattaaagaaacctgctgatatccccaataggtttgaaatgaaacttcacagaaataacatatttgaagagtcctatcggagaattatgtccgtgaaaagaccagatgtcctaaaagctagactgtggattgagtttgaatcagagaaaggtcttgactatgggggtgtggccagagaatggttcttcttactgtccaaagagatgttcaacccctactacggcctctttgagtactctgccacggacaactacacccttcagatcaaccctaattcaggcctctgtaatgaggatcatttgtcctacttcacttttattggaagagttgctggtctggccgtatttcatgggaagctcttagatggtttcttcattagaccattttacaagatgatgttgggaaagcagataaccctgaatgacatggaatctgtggatagtgaatattacaactctttgaaatggatcctggagaatgaccctactgagctggacctcatgttctgcatagacgaagaaaactttggacagacatatcaagtggatttgaagcccaatgggtcagaaataatggtcacaaatgaaaacaaaagggaatatatcgacttagtcatccagtggagatttgtgaacagggtccagaagcagatgaacgccttcttggagggattcacagaactacttcctattgatttgattaaaatttttgatgaaaatgagctggagttgctcatgtgcggcctcggtgatgtggatgtgaatgactggagacagcattctatttacaagaacggctactgcccaaaccaccccgtcattcagtggttctggaaggtaactccggggcccagccccagccggtgtcctccacctgaggcaggattgagggctgtgtggcgccctccattgtggtctgacttcaggactgatgctggctttggggtctgttagagcttggactgctgggggagggaagaggcaaactgagccagcagccccgtggtggctcctctgtaactgtagcagacagctagacttgaatgaagttggtccctacaaaagcacactggccttccttgaccacctcgtgaaagtgacttttatttgagggactggtcctccaatgcgtaaatagaaatggggggcttctcagggcagaaacaggcttcagggatggctttgcaagatgccactttctgttaagaagtcgttttctcaatttttaaaatatattccaacaaatattttgatctgtgtatctttcaaccaaagataacacaacatttgatttattatcttagaggccgactgttcggtgtatcctgttcagcttaggagggaagtaaaataggaatgggttagtccaaaggagatatagtaaacaaactt

SEQ ID NO: 378551 - DNA, 1710 bp, Homo sapiens
tggtattcccccggtatcagcagaggcgtgtacgggcactgctttaaaactgggaaggaggaagacgaggccagggagccggagggtcaccaaggtagatttccagcagcgctagtccagctgaacactttccagccttgtttttcagcagctttgaggaaaagtatagtgatccgtatgtgaaactttcattgtacgtagcggatgagaatagagaacttgctttggtccagacaaaaacaattaaaaagacactgaacccaaaatggaatgaagaattttatttcagggtaaacccatctaatcacagactcctatttgaagtatttgacgaaaatagactgacacgagacgacttcctgggccaggtggacgtgccccttagtcaccttccgacagaagatccaaccatggagcgaccctatacatttaaggactttctcctcagaccaagaagtcataagtctcgagttaagggatttttgcgattgaaaatggcctatatgccaaaaaatggaggtcaagatgaagaaaacagtgaccagagggatgacatggagcatggatgggaagttgttgactcaaatgactcggcttctcagcaccaagaggaacttcctcctcctcctctgcctcccgggtgggaagaaaaagtggacaatttaggccgaacttactatgtcaaccacaacaaccggaccactcagtggcacagaccaagcctgatggacgtgtcctcggagtcggacaataacatcagacagatcaaccaggaggcagcacaccggcgcttccgctcccgcaggcacatcagcgaagacttggagcccgagccctcggagggcggggatgtccccgagccttgggagaccatttcagaggaagtgaatatcgctggagactctctcggtctggctctgcccccaccaccggcctccccaggatctcggaccagccctcaggagctgtcagaggaactaagcagaaggcttcagatcactccagactccaatggggaacagttcagctctttgattcaaagagaaccctcctcaaggttgaggtcatgcagtgtcaccgacgcagttgcagaacagggccatctaccaccgcccagtgccccagctgggagagcgcgttcatcaactgtcacgggtggtgaggaaccaacggtaatgatccactttatcagacatcaatagcaagaggccgtgaggcagttttaatatttcgtgtagtggtgaatatacgctgtttttaaaaataagattagctcctttgtgctacagagctgcacacgtttcttattttaagcttctcatttggggattgtttaaaggtactgggtaaaatagaatgatttttttagtcccacataattttattaggaatactatcaggctttggttaagtgcatttaacttgaccatttagaagatatttttgacttttagtgtttgtactcctgataagtttttccatttcattagaatgcttggttaaagtaatttggttggaagatcatcaaagaagccacaggaattgcatgagactgtgtgtgtgattcctggatgtgcccagggcccttctcttttctgtatctcccctaccacatttttcacagggggttagacttttcttgtccccagaatgcaccatgaccctttctctgccaccaggggctctcctcacacaatgaacaagtttccg

SEQ ID NO: 378552 - DNA, 576 bp, Homo sapiens
tctgacaaaagtcacttggaaagcatgtttagtttgtgtagtgtaccccaaatggtttctcaaatagcagtatagctgttttcaggggtgaaagctgcattcaaagctgattagccctcatcagttctaggactttcccctgtgctgtgtagacattatctaatttttccatggataatctgagaagtgagaatttacggtttatgactcatgaaattctcttgaatgttgcctcagtatacataaaatttcaggtgtattgtttgcattatctatatttataaatttatcttccaggctgtcccttactccagagaatttaagcagaaatatgactacttcaggaagaaattaaagaaacctgtgagtaatcatgccttccaaaaatgctttgtgttagtcatttgtaagttaccacagtcacttcagtgagaacaacttggttgttacttttatatgaatgctaaaaatattaccttccttttctctctgcactttgatcctcctggttctaaaatctgaattttctttttaacagaaatggtaagtgaaaattaactcagtgttacatatcaa

SEQ ID NO: 378553 - DNA, 620 bp, Homo sapiens
gcctttctagaattgatatatatatatttttttggccttcatttgggaatttactcaaatgtggccccgaagccatggctagagccagagagccccagagcaaggagaagggcatgcagggcatgctgtgatgacctcttactcacagccgaagaaccaacctcataatcgtccctttaactttattccgcagcatggatgggaagttgttgactcaaatgactcggcttctcagcaccaagaggaacttcctcctcctcctctgcctcccgggtgggaagaaaaagtggacaatttaggccgaacttactatgtcaaccacaacaaccggaccactcagtggcacagaccaagcctgatgtgagtaccgtgtgatggtcaggaacacgtgcacgtgcactgcacagctagggacaaatatggcggccctttgggacaaggctgggaaataaatcatatgtctataagagcagatggtggtgtggtacgagattcctctccatttacgtaaagcatgcaagagcagtcagaacttgtatattgtaagcgattgcctttgagtcacatgctgctgttttcaatatgagctgatttattttctatgtcttcttttatgtcga

SEQ ID NO: 378554 - DNA, 7707 bp, Homo sapiens
agcggggcgtagggagaggcgccggggctgccgcccggtgctcggcgcgctctcgggagccgcccgcccgctggtcccgcagccttccgggaggaagcggtgccggcagcgtccagggcgcgctctcgggcaccctcacctgccggcgcccggccgcttacccggcagggcagtgcgcagggtagggtgcgggaccggggggacctggaggcagaggggagaaccggccgtccgcgccgcagcacagccgctgggagcgcctcagaccccgcgcggggcgccggctccatggcgaccgggctcggggagccggtctatggactttccgaagacggggagagtcccgtattctcagagtaaaagttgtttctggaattgatctcgccaaaaaggacatctttggagccagtgatccgtatgtgaaactttcattgtacgtagcggatgagaatagagaacttgctttggtccagacaaaaacaattaaaaagacactgaacccaaaatggaatgaagaattttatttcagggtaaacccatctaatcacagactcctatttgaagtatttgacgaaaatagactgacacgagacgacttcctgggccaggtggacgtgccccttagtcaccttccgacagaagatccaaccatggagcgaccctatacatttaaggactttctcctcagaccaagaagtcataagtctcgagttaagggatttttgcgattgaaaatggcctatatgccaaaaaatggaggtcaagatgaagaaaacagtgaccagagggatgacatggagcatggatgggaagttgttgactcaaatgactcggcttctcagcaccaagaggaacttcctcctcctcctctgcctcccgggtgggaagaaaaagtggacaatttaggccgaacttactatgtcaaccacaacaaccggaccactcagtggcacagaccaagcctgatggacgtgtcctcggagtcggacaataacatcagacagatcaaccaggaggcagcacaccggcgcttccgctcccgcaggcacatcagcgaagacttggagcccgagccctcggagggcggggatgtccccgagccttgggagaccatttcagaggaagtgaatatcgctggagactctctcggtctggctctgcccccaccaccggcctccccaggatctcggaccagccctcaggagctgtcagaggaactaagcagaaggcttcagatcactccagactccaatggggaacagttcagctctttgattcaaagagaaccctcctcaaggttgaggtcatgcagtgtcaccgacgcagttgcagaacagggccatctaccaccgccatcagtggcctatgtacataccacgccgggtctgccttcaggctgggaagaaagaaaagatgctaaggggcgcacatactatgtcaatcataacaatcgaaccacaacttggactcgacctatcatgcagcttgcagaagatggtgcgtccggatcagccacaaacagtaacaaccatctaatcgagcctcagatccgccggcctcgtagcctcagctcgccaacagtaactttatctgccccgctggagggtgccaaggactcacccgtacgtcgggctgtgaaagacaccctttccaacccacagtccccacagccatcaccttacaactcccccaaaccacaacacaaagtcacacagagcttcttgccacccggctgggaaatgaggatagcgccaaacggccggcccttcttcattgatcataacacaaagactacaacctgggaagatccacgtttgaaatttccagtacatatgcggtcaaagacatctttaaaccccaatgaccttggcccccttcctcctggctgggaagaaagaattcacttggatggccgaacgttttatattgatcataatagcaaaattactcagtgggaagacccaagactgcagaacccagctattactggtccggctgtcccttactccagagaatttaagcagaaatatgactacttcaggaagaaattaaagaaacctgctgatatccccaataggtttgaaatgaaacttcacagaaataacatatttgaagagtcctatcggagaattatgtccgtgaaaagaccagatgtcctaaaagctagactgtggattgagtttgaatcagagaaaggtcttgactatgggggtgtggccagagaatggttcttcttactgtccaaagagatgttcaacccctactacggcctctttgagtactctgccacggacaactacacccttcagatcaaccctaattcaggcctctgtaatgaggatcatttgtcctacttcacttttattggaagagttgctggtctggccgtatttcatgggaagctcttagatggtttcttcattagaccattttacaagatgatgttgggaaagcagataaccctgaatgacatggaatctgtggatagtgaatattacaactctttgaaatggatcctggagaatgaccctactgagctggacctcatgttctgcatagacgaagaaaactttggacagacatatcaagtggatttgaagcccaatgggtcagaaataatggtcacaaatgaaaacaaaagggaatatatcgacttagtcatccagtggagatttgtgaacagggtccagaagcagatgaacgccttcttggagggattcacagaactacttcctattgatttgattaaaatttttgatgaaaatgagctggagttgctcatgtgcggcctcggtgatgtggatgtgaatgactggagacagcattctatttacaagaacggctactgcccaaaccaccccgtcattcagtggttctggaaggctgtgctactcatggacgccgaaaagcgtatccggttactgcagtttgtcacagggacatcgcgagtacctatgaatggatttgccgaactttatggttccaatggtcctcagctgtttacaatagagcaatggggcagtcctgagaaactgcccagagctcacacatgctttaatcgccttgacttacctccatatgaaacctttgaagatttacgagagaaacttctcatggccgtggaaaatgctcaaggatttgaaggggtggattaagcaccctgtgcctcgggggtggttgttcttcaagcaagttctgcttgcacttttgcatttgcctaacagacttttgcagaggcgatggcagagagcagctgcaggcatggtccctggagccgagccttcaccacgcactcgtccaagttcggatgcgggaacctggtcccagcttgagttcctgcctttcccaccacaaattatcaactggttgatgtgtacactaattacatttcaggaggacttaatgctatttatgttgtgcctctgcaggcaaagcccttaataaatattttacatcctttctaatgacaatgaatggaattaatcactcaacaggtatagtattacgactcatgtttactttttaaaatgatttagaccgattttcagattttatttcgttatgattaaagatgtctcatgtacttggaaaagtgagcatttttttttttttttgtatttcactttcataccaggcttaatgtcaatgacatttttatttttgaagtactctgacacctccaccctctactttattagaattggaaggcaaatttttgtccaaaaacctacagacaagtactttgagagaatttccaatataatattagacataatgataattttttccatactcagaatgaaaaactggatattacgtttttgttttggggtttttttgtacaaatttagctaatagctacaggctgagagaattgtaacatagcatgacaaattttgtgttgacttgaaaggaatcacaccattattccttagaagtaattacatgtgttctaacacatttgagacagggttggactcccatttctcatccgagaaattacttaacccttcctggcgctgtacagtcatcttttattctatttcctctttgctgtttgtagtagagacattttgaatgaaacttggcactgcttgattcaaaactgtggaaaccagatctgtttagtctcctgtttgtatgcgtttgctaatggtagctaaataaccagtttttgttgtaaatgcaccaattctgaaggcactttatgtactacatggaggtcatatctggttttgtttttatttttttatcatgaacattaaatgtgatgatgatttcttttccctgcacacatctttccggtgcaatatctatcaattgtgaatctggctgctggtgtataaaaacctggatgtaaagctgagcctacagacctgtcctcaccaactgttttgtgatttctactcaactacaaagatttatttaatgtactcttaatctaactgagttttgttaccaatgacctgttgcatgcttcaataccgtgtactgcctgagttgtgcctcttgtgtgctagattaaaagtgagacagagacttgacttgatcctctgagctcaagctattgagctggtagtggcagaggactgagggtacctgcacagtttgattcttttccacgtgtaagtctccattgcagaattgtcgtgctttgagaaaacacctgaggcagtgtgggagttgaacgaccctgctgtcctttttaacctgtgttgtcctagaccctgtcggggcagtcaggggacactagagatttgatctcatgcgagtcatcaataggacaaaaaagttgtggtttggggaggtctgtttgttacataaaaaggacctttcggtgtaagaaattgccgtttttaccctgccctggctggcatgtgagaagccatggaaggttgtggttgtaaatgagttgtctaaaggggtgcagaggcctgaggtttctaaaagaaggtagatttctacagagctgagtgttggttcctttttcttattggttgaaaattacctggtagtgatcagaaaacttagatgctatgtactaaaaaaaaaaaaaaaaaaaaaaaaaaaaaaaaaaaattcccgctcatgagttttgactattggtgagatgttttccgctacagttaacatgacaaatgtctcagtggcaaaaatcccctttttgtaagcccccatagtctagaggcagttttctttttaagaatcatgccagagcctgagtcgagcagtatgctttcttggtttttgagagtaattgtgtaattgtagagggagaaatccaattctaacctaagaactgggattcttctgtcatcttgtaaaccgtatattgaaaaaaacagaatgtcactaaatgcatattaagtcaagtattggaaagtataaaagaaaaatcattctgacaatttctaagccagaagcaaacaagaattactgaaatctaccccatgaatacttggaaggcagtaattgtgagtgacacctcagttcatcaaccccttaataatatcagcttaattttaatgacaactaaatatgctgaagtgaggatttagtattttttaaaaaagcaaaacaaggttcagtagtcctcagcaattctccaagtttctctctttgcctaaaatggtcatagatcttgatttctctgaatcgtgatgaccacacccagtcatcttcacagcataattgcaggtggcagtaaagagagtgtgctgggtaaggagcagttgctgggtcattccttgggccccgacctgcccggggagtagccctgggggagagagggcagtgttgcctatcccagaggtcccagcagtcacactgctctgcaggccgggctctctttatagccagagaaatcaccttaatgcagtctctttagttgtctgctgaagctgtagttattatgggccacttacatgaggctgagaagtacgtgccggagctcacacactgcctgttgcggttctcttaacatcagttatcacagctgcctgtgggtcccgggtatttccattcctgccccttgttggcccgaggaaggatgtggaaagagcacctggcgggatgaaggtccaacagcctgtgcctctccactgctggccctggagccggcagcagtgaggcattcattgtctgtgtactcacctctgaaatttaaaaacgtataaagagagcctgggttaatcagttctgcagcccctacgtgacactgtgctagttctccttcttctgtctcctccttaccctggccctgcacccctgtacttaagagggagaggtgggaggtgctgtctggtatcatttgctgcctcgccagtagagggtgccgctgtgcagggtaactgcccgcctgctcccttcctgacctcccctgaccccgaagatcactacctctgtcattcaggcattggggtacatcctgataagtcgtgtcagaactgccaatttcaggactgagatgtgtttttaaaaaacaaatccttataaactccactttgtactttagattttaaaactggggaaaaatgtgatattctttggaccacttttttaatttatataagccttaatgaacagtgtctatacatttgcatacacacacccccaccccagagtgttctcagtatgtcagagaaagtgccacagcattaggacgggagcttggagaacgttttctagaaaagggttagcttcctgttggcatgaaattttccaagcaaacctcattaaacatctgttgtttgttaaagatgttccactgaaagcaacgcatgtttcaaaggcacgtctttccgttcgttggttttctgtgtgtaaggagtagcattgctgttggcgcctaacctcgcgtgcactgcattctcaaccccgtaccagtgcatcatcagaagccttcctcgtgaccataactctgtgtctgcagatatgtgttcccgtgtaagccagttttccccttttactcagactgatttcacctagattgtcacggtttccttcatgttaactttgcgtgactttgttcttcctttactactctgtatgtaatatatatacatatatacgtacatatgctgtccaaatatatttgtatatatttgtatagcatttttacacctttattgagtaatctggtttcgaaaggaggtgagagtttagtcccttctgcagttttctccaagctgtgtcctgtgaatttcaacccttggagcctaagaaaaccctaggaagatgatgttaatttgctgtcatttcctaattcaggatctatcatcaaatgaaacatgaaaaaaacagtgacttttaaggtgaaaagagtttcaagcattccaaataaattatcaatgtttcataactttttattataaacccacctcctaataggaagccaagtactatttgatacagtggtaaaaaccaaactaccttgaatttttttaaggcaacttatgaataatgctcattttcacagtcagaatagctttaaaatatggttgaatttgatacacacaggaagttttcttgaagaacaatcctttcgcttttcttttttcttgagagatctaaagagaaactgtagattgttttcctgacagcaaaagactaatgtgacaaaatgaagtcattgtaaagaagcgatgcaacttgtcaaatatttaataaagaattatggaagctggaacattttctaaaaaaaaaata

SEQ ID NO: 378555 - DNA, 8072 bp, Homo sapiens
tggtattcccccggtatcagcagaggcgtgtacgggcactgctttaaaactgggaaggaggaagacgaggccagggagccggagggtcaccaaggtagatttccagcagcgctagtccagctgaacactttccagccttgtttttcagcagctttgaggaaaagtatagtgatccgtatgtgaaactttcattgtacgtagcggatgagaatagagaacttgctttggtccagacaaaaacaattaaaaagacactgaacccaaaatggaatgaagaattttatttcagggtaaacccatctaatcacagactcctatttgaagtatttgacgaaaatagactgacacgagacgacttcctgggccaggtggacgtgccccttagtcaccttccgacagaagatccaaccatggagcgaccctatacatttaaggactttctcctcagaccaagaagtcataagtctcgagttaagggatttttgcgattgaaaatggcctatatgccaaaaaatggaggtcaagatgaagaaaacagtgaccagagggatgacatggagcatggatgggaagttgttgactcaaatgactcggcttctcagcaccaagaggaacttcctcctcctcctctgcctcccgggtgggaagaaaaagtggacaatttaggccgaacttactatgtcaaccacaacaaccggaccactcagtggcacagaccaagcctgatggacgtgtcctcggagtcggacaataacatcagacagatcaaccaggaggcagcacaccggcgcttccgctcccgcaggcacatcagcgaagacttggagcccgagccctcggagggcggggatgtccccgagccttgggagaccatttcagaggaagtgaatatcgctggagactctctcggtctggctctgcccccaccaccggcctccccaggatctcggaccagccctcaggagctgtcagaggaactaagcagaaggcttcagatcactccagactccaatggggaacagttcagctctttgattcaaagagaaccctcctcaaggttgaggtcatgcagtgtcaccgacgcagttgcagaacagggccatctaccaccgccatcagtggcctatgtacataccacgccgggtctgccttcaggctgggaagaaagaaaagatgctaaggggcgcacatactatgtcaatcataacaatcgaaccacaacttggactcgacctatcatgcagcttgcagaagatggtgcgtccggatcagccacaaacagtaacaaccatctaatcgagcctcagatccgccggcctcgtagcctcagctcgccaacagtaactttatctgccccgctggagggtgccaaggactcacccgtacgtcgggctgtgaaagacaccctttccaacccacagtccccacagccatcaccttacaactcccccaaaccacaacacaaagtcacacagagcttcttgccacccggctgggaaatgaggatagcgccaaacggccggcccttcttcattgatcataacacaaagactacaacctgggaagatccacgtttgaaatttccagtacatatgcggtcaaagacatctttaaaccccaatgaccttggcccccttcctcctggctgggaagaaagaattcacttggatggccgaacgttttatattgatcataatagcaaaattactcagtgggaagacccaagactgcagaacccagctattactggtccggctgtcccttactccagagaatttaagcagaaatatgactacttcaggaagaaattaaagaaacctgctgatatccccaataggtttgaaatgaaacttcacagaaataacatatttgaagagtcctatcggagaattatgtccgtgaaaagaccagatgtcctaaaagctagactgtggattgagtttgaatcagagaaaggtcttgactatgggggtgtggccagagaatggttcttcttactgtccaaagagatgttcaacccctactacggcctctttgagtactctgccacggacaactacacccttcagatcaaccctaattcaggcctctgtaatgaggatcatttgtcctacttcacttttattggaagagttgctggtctggccgtatttcatgggaagctcttagatggtttcttcattagaccattttacaagatgatgttgggaaagcagataaccctgaatgacatggaatctgtggatagtgaatattacaactctttgaaatggatcctggagaatgaccctactgagctggacctcatgttctgcatagacgaagaaaactttggacagacatatcaagtggatttgaagcccaatgggtcagaaataatggtcacaaatgaaaacaaaagggaatatatcgacttagtcatccagtggagatttgtgaacagggtccagaagcagatgaacgccttcttggagggattcacagaactacttcctattgatttgattaaaatttttgatgaaaatgagctggagttgctcatgtgcggcctcggtgatgtggatgtgaatgactggagacagcattctatttacaagaacggctactgcccaaaccaccccgtcattcagtggttctggaaggctgtgctactcatggacgccgaaaagcgtatccggttactgcagtttgtcacagggacatcgcgagtacctatgaatggatttgccgaactttatggttccaatggtcctcagctgtttacaatagagcaatggggcagtcctgagaaactgcccagagctcacacatgctttaatcgccttgacttacctccatatgaaacctttgaagatttacgagagaaacttctcatggccgtggaaaatgctcaaggatttgaaggggtggattaagcaccctgtgcctcgggggtggttgttcttcaagcaagttctgcttgcacttttgcatttgcctttcccaccacaaattatcaactggttgatgtgtacactaattacatttcaggaggacttaatgctatttatgttgtgcctctgcaggcaaagcccttaataaatattttacatcctttctaatgacaatgaatggaattaatcactcaacaggtatagtattacgactcatgtttactttttaaaatgatttagaccgattttcagattttatttcgttatgattaaagatgtctcatgtacttggaaaagtgagcatttttttttttttttgtatttcactttcataccaggcttaatgtcaatgacatttttatttttgaagtactctgacacctccaccctctactttattagaattggaaggcaaatttttgtccaaaaacctacagacaagtactttgagagaatttccaatataatattagacataatgataattttttccatactcagaatgaaaaactggatattacgtttttgttttggggtttttttgtacaaatttagctaatagctacaggctgagagaattgtaacatagcatgacaaattttgtgttgacttgaaaggaatcacaccattattccttagaagtaattacatgtgttctaacacatttgagacagggttggactcccatttctcatccgagaaattacttaacccttcctggcgctgtacagtcatcttttattctatttcctctttgctgtttgtagtagagacattttgaatgaaacttggcactgcttgattcaaaactgtggaaaccagatctgtttagtctcctgtttgtatgcgtttgctaatggtagctaaataaccagtttttgttgtaaatgcaccaattctgaaggcactttatgtactacatggaggtcatatctggttttgtttttatttttttatcatgaacattaaatgtgatgatgatttcttttccctgcacacatctttccggtgcaatatctatcaattgtgaatctggctgctggtgtataaaaacctggatgtaaagctgagcctacagacctgtcctcaccaactgttttgtgatttctactcaactacaaagatttatttaatgtactcttaatctaactgagttttgttaccaatgacctgttgcatgcttcaataccgtgtactgcctgagttgtgcctcttgtgtgctagattaaaagtgagacagagacttgacttgatcctctgagctcaagctattgagctggtagtggcagaggactgagggtacctgcacagtttgattcttttccacgtgtaagtctccattgcagaattgtcgtgctttgagaaaacacctgaggcagtgtgggagttgaacgaccctgctgtcctttttaacctgtgttgtcctagaccctgtcggggcagtcaggggacactagagatttgatctcatgcgagtcatcaataggacaaaaaagttgtggtttggggaggtctgtttgttacataaaaaggacctttcggtgtaagaaattgccgtttttaccctgccctggctggcatgtgagaagccatggaaggttgtggttgtaaatgagttgtctaaaggggtgcagaggcctgaggtttctaaaagaaggtagatttctacagagctgagtgttggttcctttttcttattggttgaaaattacctggtagtgatcagaaaacttagatgctatgtactaaaaaaaaaaaaaaaaaaaaaaaaaaaaaaaaaaaattcccgctcatgagttttgactattggtgagatgttttccgctacagttaacatgacaaatgtctcagtggcaaaaatcccctttttgtaagcccccatagtctagaggcagttttctttttaagaatcatgccagagcctgagtcgagcagtatgctttcttggtttttgagagtaattgtgtaattgtagagggagaaatccaattctaacctaagaactgggattcttctgtcatcttgtaaaccgtatattgaaaaaaacagaatgtcactaaatgcatattaagtcaagtattggaaagtataaaagaaaaatcattctgacaatttctaagccagaagcaaacaagaattactgaaatctaccccatgaatacttggaaggcagtaattgtgagtgacacctcagttcatcaaccccttaataatatcagcttaattttaatgacaactaaatatgctgaagtgaggatttagtattttttaaaaaagcaaaacaaggttcagtagtcctcagcaattctccaagtttctctctttgcctaaaatggtcatagatcttgatttctctgaatcgtgatgaccacacccagtcatcttcacagcataattgcaggtggcagtaaagagagtgtgctgggtaaggagcagttgctgggtcattccttgggccccgacctgcccggggagtagccctgggggagagagggcagtgttgcctatcccagaggtcccagcagtcacactgctctgcaggccgggctctctttatagccagagaaatcaccttaatgcagtctctttagttgtctgctgaagctgtagttattatgggccacttacatgaggctgagaagtacgtgccggagctcacacactgcctgttgcggttctcttaacatcagttatcacagctgcctgtgggtcccgggtatttccattcctgccccttgttggcccgaggaaggatgtggaaagagcacctggcgggatgaaggtccaacagcctgtgcctctccactgctggccctggagccggcagcagtgaggcattcattgtctgtgttgcggtgtattcccagcttcagtgctcttttcctttttgcctgaaatgtttatgcttctctgcagccagtcctctaacaaatctcaagaacaaaggtaagacacttggtttttgtttccaggacccttcagaaggtgacatcagatattccctaaattcagacaatgagggatacagagcgacttggcatgtattatttctcccatgtaaggacaaagggacagattattattgttatttctgagacagagtcttgctctgtagctcaggctggagtgcagtggctcaatctcagctcaccacaacctctgcctcctggcttcaagcgattcttctgcctcagcctccccgaatagttgggattacaggcacccaccaccacgcctggctaatttttgtatttttagtagagatggtttcaccatgctggccaggctggtcttgaactcctgacctcaggtgatcctcccgcctcagccttccaaagtgctgggattacaagcatgagccaccgcacccggcctcacagtgacagattctgagaaacagcatgcaaaacatttgaaccattttctacatctcccattgttgcatagagagtgtgcaccgctgctatcttgccagatccacactggtcctcccgaaagccaggttcatacacagcaactttttaattattctaacagttacccattaacagtcgactcctgtatttctgagagtcttgtactcacctctgaaatttaaaaacgtataaagagagcctgggttaatcagttctgcagcccctacgtgacactgtgctagttctccttcttctgtctcctccttaccctggccctgcacccctgtacttaagagggagaggtgggaggtgctgtctggtatcatttgctgcctcgccagtagagggtgccgctgtgcagggtaactgcccgcctgctcccttcctgacctcccctgaccccgaagatcactacctctgtcattcaggcattggggtacatcctgataagtcgtgtcagaactgccaatttcaggactgagatgtgtttttaaaaaacaaatccttataaactccactttgtactttagattttaaaactggggaaaaatgtgatattctttggaccacttttttaatttatataagccttaatgaacagtgtctatacatttgcatacacacacccccaccccagagtgttctcagtatgtcagagaaagtgccacagcattaggacgggagcttggagaacgttttctagaaaagggttagcttcctgttggcatgaaattttccaagcaaacctcattaaacatctgttgtttgttaaagatgttccactgaaagcaacgcatgtttcaaaggcacgtctttccgttcgttggttttctgtgtgtaaggagtagcattgctgttggcgcctaacctcgcgtgcactgcattctcaaccccgtaccagtgcatcatcagaagccttcctcgtgaccataactctgtgtctgcagatatgtgttcccgtgtaagccagttttccccttttactcagactgatttcacctagattgtcacggtttccttcatgttaactttgcgtgactttgttcttcctttactactctgtatgtaatatatatacatatatacgtacatatgctgtccaaatatatttgtatatatttgtatagcatttttacacctttattgagtaatctggtttcgaaaggaggtgagagtttagtcccttctgcagttttctccaagctgtgtcctgtgaatttcaacccttggagcctaagaaaaccctaggaagatgatgttaatttgctgtcatttcctaattcaggatctatcatcaaatgaaacatgaaaaaaacagtgacttttaaggtgaaaagagtttcaagcattccaaataaattatcaatgtttcataactttttattataaacccacctcctaataggaagccaagtactatttgatacagtggtaaaaaccaaactaccttgaatttttttaaggcaacttatgaataatgctcattttcacagtcagaatagctttaaaatatggttgaatttgatacacacaggaagttttcttgaagaacaatcctttcgcttttcttttttcttgagagatctaaagagaaactgtagattgttttcctgacagcaaaagactaatgtgacaaaatgaagtcattgtaaagaagcgatgcaacttgtcaaatatttaataaagaattatggaagctggaacattttctaaaaaaaaaata

SEQ ID NO: 378556 - DNA, 4961 bp, Homo sapiens
  misc_feature (4736)..(4736): n is a, c, g, or t
tggtattcccccggtatcagcagaggcgtgtacgggcactgctttaaaactgggaaggaggaagacgaggccagggagccggagggtcaccaaggtagatttccagcagcgctagtccagctgaacactttccagccttgtttttcagcagctttgaggaaaagtatagtgatccgtatgtgaaactttcattgtacgtagcggatgagaatagagaacttgctttggtccagacaaaaacaattaaaaagacactgaacccaaaatggaatgaagaattttatttcagggtaaacccatctaatcacagactcctatttgaagtatttgacgaaaatagactgacacgagacgacttcctgggccaggtggacgtgccccttagtcaccttccgacagaagatccaaccatggagcgaccctatacatttaaggactttctcctcagaccaagaagtcataagtctcgagttaagggatttttgcgattgaaaatggcctatatgccaaaaaatggaggtcaagatgaagaaaacagtgaccagagggatgacatggagcatggatgggaagttgttgactcaaatgactcggcttctcagcaccaagaggaacttcctcctcctcctctgcctcccgggtgggaagaaaaagtggacaatttaggccgaacttactatgtcaaccacaacaaccggaccactcagtggcacagaccaagcctgatggacgtgtcctcggagtcggacaataacatcagacagatcaaccaggaggcagcacaccggcgcttccgctcccgcaggcacatcagcgaagacttggagcccgagccctcggagggcggggatgtccccgagccttgggagaccatttcagaggaagtgaatatcgctggagactctctcggtctggctctgcccccaccaccggcctccccaggatctcggaccagccctcaggagctgtcagaggaactaagcagaaggcttcagatcactccagactccaatggggaacagttcagctctttgattcaaagagaaccctcctcaaggttgaggtcatgcagtgtcaccgacgcagttgcagaacagggccatctaccaccgccatcagtggcctatgtacataccacgccgggtctgccttcaggctgggaagaaagaaaagatgctaaggggcgcacatactatgtcaatcataacaatcgaaccacaacttggactcgacctatcatgcagcttgcagaagatggtgcgtccggatcagccacaaacagtaacaaccatctaatcgagcctcagatccgccggcctcgtagcctcagctcgccaacagtaactttatctgccccgctggagggtgccaaggactcacccgtacgtcgggctgtgaaagacaccctttccaacccacagtccccacagccatcaccttacaactcccccaaaccacaacacaaagtcacacagagcttcttgccacccggctgggaaatgaggatagcgccaaacggccggcccttcttcattgatcataacacaaagactacaacctgggaagatccacgtttgaaatttccagtacatatgcggtcaaagacatctttaaaccccaatgaccttggcccccttcctcctggctgggaagaaagaattcacttggatggccgaacgttttatattgatcataatagcaaaattactcagtgggaagacccaagactgcagaacccagctattactggtccggctgtcccttactccagagaatttaagcagaaatatgactacttcaggaagaaattaaagaaacctgctgatatccccaataggtttgaaatgaaacttcacagaaataacatatttgaagagtcctatcggagaattatgtccgtgaaaagaccagatgtcctaaaagctagactgtggattgagtttgaatcagagaaaggtcttgactatgggggtgtggccagagaatggttcttcttactgtccaaagagatgttcaacccctactacggcctctttgagtactctgccacggacaactacacccttcagatcaaccctaattcaggcctctgtaatgaggatcatttgtcctacttcacttttattggaagagttgctggtctggccgtatttcatgggaagctcttagatggtttcttcattagaccattttacaagatgatgttgggaaagcagataaccctgaatgacatggaatctgtggatagtgaatattacaactctttgaaatggatcctggagaatgaccctactgagctggacctcatgttctgcatagacgaagaaaactttggacagacatatcaagtggatttgaagcccaatgggtcagaaataatggtcacaaatgaaaacaaaagggaatatatcgacttagtcatccagtggagatttgtgaacagggtccagaagcagatgaacgccttcttggagggattcacagaactacttcctattgatttgattaaaatttttgatgaaaatgagctggagttgctcatgtgcggcctcggtgatgtggatgtgaatgactggagacagcattctatttacaagaacggctactgcccaaaccaccccgtcattcagtggttctggaaggctgtgctactcatggacgccgaaaagcgtatccggttactgcagtttgtcacagggacatcgcgagtacctatgaatggatttgccgaactttatggttccaatggtcctcagctgtttacaatagagcaatggggcagtcctgagaaactgcccagagctcacacatgctttaatcgccttgacttacctccatatgaaacctttgaagatttacgagagaaacttctcatggccgtggaaaatgctcaaggatttgaaggggtggattaagcaccctgtgcctcgggggtggttgttcttcaagcaagttctgcttgcacttttgcatttgcctaacagacttttgcagaggcgatggcagagagcagctgcaggcatggtccctggagccgagccttcaccacgcactcgtccaagttcggatgcgggaacctggtcccagcttgagttcctgcctttcccaccacaaattatcaactggttgatgtgtacactaattacatttcaggaggacttaatgctatttatgttgtgcctctgcaggcaaagcccttaataaatattttacatcctttctaatgacaatgaatggaattaatcactcaacaggtatagtattacgactcatgtttactttttaaaatgatttagaccgattttcagattttatttcgttatgattaaagatgtctcatgtacttggaaaagtgagcatttttttttttttttgtatttcactttcataccaggcttaatgtcaatgacatttttatttttgaagtactctgacacctccaccctctactttattagaattggaaggcaaatttttgtccaaaaacctacagacaagtactttgagagaatttccaatataatattagacataatgataattttttccatactcagaatgaaaaactggatattacgtttttgttttggggtttttttgtacaaatttagctaatagctacaggctgagagaattgtaacatagcatgacaaattttgtgttgacttgaaaggaatcacaccattattccttagaagtaattacatgtgttctaacacatttgagacagggttggactcccatttctcatccgagaaattacttaacccttcctggcgctgtacagtcatcttttattctatttcctctttgctgtttgtagtagagacattttgaatgaaacttggcactgcttgattcaaaactgtggaaaccagatctgtttagtctcctgtttgtatgcgtttgctaatggtagctaaataaccagtttttgttgtaaatgcaccaattctgaaggcactttatgtactacatggaggtcatatctggttttgtttttatttttttatcatgaacattaaatgtgatgatgatttcttttccctgcacacatctttccggtgcaatatctatcaattgtgaatctggctgctggtgtataaaaacctggatgtaaagctgagcctacagacctgtcctcaccaactgttttgtgatttctactcaactacaaagatttatttaatgtactcttaatctaactgagttttgttaccaatgacctgttgcatgcttcaataccgtgtactgcctgagttgtgcctcttgtgtgctagattaaaagtgagacagagacttgacttgatcctctgagctcaagctattgagctggtagtggcagaggactgagggtacctgcacagtttgattcttttccacgtgtaagtctccattgcagaattgtcgtgctttgagaaaacacctgaggcagtgtgggagttgaacgaccctgctgtcctttttaacctgtgttgtcctagaccctgtcggggcagtcaggggacactagagatttgatctcatgcgagtcatcaataggacaaaaaagttgtggtttggggaggtctgtttgttacataaaaaggacctttcggtgtaagaaattgccgtttttaccctgccctggctggcatgtgagaagccatggaaggttgtggttgtaaatgagttgtctaaaggggtgcagaggcctgaggtttctaaaagaaggtagatttctacagagcaaagcnaaagggcctgccaagttcatgcagtgagtagccagtttctggaacttgctgcctgaaaaaggaagtaggaaagactggaaatcggttccctagttttagaagtttcaatagcatctgtctacctccattctgaagagggaggttttggtgtcctggtcctctgggaatagaagatccatttgtctttgtgtagagcaagcacgttttccacctcactgtctccat

SEQ ID NO: 378557 - DNA, 2968 bp, Homo sapiens
tggtattcccccggtatcagcagaggcgtgtacgggcactgctttaaaactgggaaggaggaagacgaggccagggagccggagggtcaccaaggtagatttccagcagcgctagtccagctgaacactttccagccttgtttttcagcagctttgaggaaaagtatagtgatccgtatgtgaaactttcattgtacgtagcggatgagaatagagaacttgctttggtccagacaaaaacaattaaaaagacactgaacccaaaatggaatgaagaattttatttcagggtaaacccatctaatcacagactcctatttgaagtatttgacgaaaatagactgacacgagacgacttcctgggccaggtggacgtgccccttagtcaccttccgacagaagatccaaccatggagcgaccctatacatttaaggactttctcctcagaccaagaagtcataagtctcgagttaagggatttttgcgattgaaaatggcctatatgccaaaaaatggaggtcaagatgaagaaaacagtgaccagagggatgacatggagcatggatgggaagttgttgactcaaatgactcggcttctcagcaccaagaggaacttcctcctcctcctctgcctcccgggtgggaagaaaaagtggacaatttaggccgaacttactatgtcaaccacaacaaccggaccactcagtggcacagaccaagcctgatggacgtgtcctcggagtcggacaataacatcagacagatcaaccaggaggcagcacaccggcgcttccgctcccgcaggcacatcagcgaagacttggagcccgagccctcggagggcggggatgtccccgagccttgggagaccatttcagaggaagtgaatatcgctggagactctctcggtctggctctgcccccaccaccggcctccccaggatctcggaccagccctcaggagctgtcagaggaactaagcagaaggcttcagatcactccagactccaatggggaacagttcagctctttgattcaaagagaaccctcctcaaggttgaggtcatgcagtgtcaccgacgcagttgcagaacagggccatctaccaccgggtgccaaggactcacccgtacgtcgggctgtgaaagacaccctttccaacccacagtccccacagccatcaccttacaactcccccaaaccacaacacaaagtcacacagagcttcttgccacccggctgggaaatgaggatagcgccaaacggccggcccttcttcattgatcataacacaaagactacaacctgggaagatccacgtttgaaatttccagtacatatgcggtcaaagacatctttaaaccccaatgaccttggcccccttcctcctggctgggaagaaagaattcacttggatggccgaacgttttatattgatcataatagcaaaattactcagtgggaagacccaagactgcagaacccagctattactggtccggctgtcccttactccagagaatttaagcagaaatatgactacttcaggaagaaattaaagaaacctgctgatatccccaataggtttgaaatgaaacttcacagaaataacatatttgaagagtcctatcggagaattatgtccgtgaaaagaccagatgtcctaaaagctagactgtggattgagtttgaatcagagaaaggtcttgactatgggggtgtggccagagaatggttcttcttactgtccaaagagatgttcaacccctactacggcctctttgagtactctgccacggacaactacacccttcagatcaaccctaattcaggcctctgtaatgaggatcatttgtcctacttcacttttattggaagagttgctggtctggccgtatttcatgggaagctcttagatggtttcttcattagaccattttacaagatgatgttgggaaagcagataaccctgaatgacatggaatctgtggatagtgaatattacaactctttgaaatggatcctggagaatgaccctactgagctggacctcatgttctgcatagacgaagaaaactttggacagacatatcaagtggatttgaagcccaatgggtcagaaataatggtcacaaatgaaaacaaaagggaatatatcgacttagtcatccagtggagatttgtgaacagggtccagaagcagatgaacgccttcttggagggattcacagaactacttcctattgatttgattaaaatttttgatgaaaatgagctggagttgctcatgtgcggcctcggtgatgtggatgtgaatgactggagacagcattctatttacaagaacggctactgcccaaaccaccccgtcattcagtggttctggaaggctgtgctactcatggacgccgaaaagcgtatccggttactgcagtttgtcacagggacatcgcgagtacctatgaatggatttgccgaactttatggttccaatggtcctcagctgtttacaatagagcaatggggcagtcctgagaaactgcccagagctcacacatgctttaatcgccttgacttacctccatatgaaacctttgaagatttacgagagaaacttctcatggccgtggaaaatgctcaaggatttgaaggggtggattaagcaccctgtgcctcgggggtggttgttcttcaagcaagttctgcttgcacttttgcatttgcctaacagacttttgcagaggcgatggcagagagcagctgcaggcatggtccctggagccgagccttcaccacgcactcgtccaagttcggatgcgggaacctggtcccagcttgagttcctgcctttcccaccacaaattatcaactggttgatgtgtacactaattacatttcaggaggacttaatgctatttatgttgtgcctctgcaggcaaagcccttaataaatattttacatccttt

SEQ ID NO: 378558 - DNA, 2371 bp, Homo sapiens
tggtattcccccggtatcagcagaggcgtgtacgggcactgctttaaaactgggaaggaggaagacgaggccagggagccggagggtcaccaaggtagatttccagcagcgctagtccagctgaacactttccagccttgtttttcagcagctttgaggaaaagtatagtgatccgtatgtgaaactttcattgtacgtagcggatgagaatagagaacttgctttggtccagacaaaaacaattaaaaagacactgaacccaaaatggaatgaagaattttatttcagggtaaacccatctaatcacagactcctatttgaagtatttgacgaaaatagactgacacgagacgacttcctgggccaggtggacgtgccccttagtcaccttccgacagaagatccaaccatggagcgaccctatacatttaaggactttctcctcagaccaagaagtcataagtctcgagttaagggatttttgcgattgaaaatggcctatatgccaaaaaatggaggtcaagatgaagaaaacagtgaccagagggatgacatggagcatggatgggaagttgttgactcaaatgactcggcttctcagcaccaagaggaacttcctcctcctcctctgcctcccgggtgggaagaaaaagtggacaatttaggccgaacttactatgtcaaccacaacaaccggaccactcagtggcacagaccaagcctgatggacgtgtcctcggagtcggacaataacatcagacagatcaaccaggaggcagcacaccggcgcttccgctcccgcaggcacatcagcgaagacttggagcccgagccctcggagggcggggatgtccccgagccttgggagaccatttcagaggaagtgaatatcgctggagactctctcggtctggctctgcccccaccaccggcctccccaggatctcggaccagccctcaggagctgtcagaggaactaagcagaaggcttcagatcactccagactccaatggggaacagttcagctctttgattcaaagagaaccctcctcaaggttgaggtcatgcagtgtcaccgacgcagttgcagaacagggccatctaccaccgccatcagtggcctatgtacataccacgccgggtctgccttcaggctgggaagaaagaaaagatgctaaggggcgcacatactatgtcaatcataacaatcgaaccacaacttggactcgacctatcatgcagcttgcagaagatggtgcgtccggatcagccacaaacagtaacaaccatctaatcgagcctcagatccgccggcctcgtagcctcagctcgccaacagtaactttatctgccccgctggagggtgccaaggactcacccgtacgtcgggctgtgaaagacaccctttccaacccacagtccccacagccatcaccttacaactcccccaaaccacaacacaaagtcacacagagcttcttgccacccggctgggaaatgaggatagcgccaaacggccggcccttcttcattgatcataacacaaagactacaacctgggaagatccacgtttgaaatttccagtacatatgcggtcaaagacatctttaaaccccaatgaccttggcccccttcctcctggctgggaagaaagaattcacttggatggccgaacgttttatattgatcataatagcaaaattactcagtgggaagacccaagactgcagaacccagctattactggtccggctgtcccttactccagagaatttaagcagaaatatgactacttcaggaagaaattaaagaaacctgctgatatccccaataggtttgaaatgaaacttcacagaaataacatatttgaagagtcctatcggagaattatgtccgtgaaaagaccagatgtcctaaaagctagactgtggattgagtttgaatcagagaaaggtcttgactatgggggtgtggccagagaatggttcttcttactgtccaaagagatgttcaacccctactacggcctctttgagtactctgccacggacaactacacccttcagatcaaccctaattcaggcctctgtaatgaggatcatttgtcctacttcacttttattggaagagttgctggtctggccgtatttcatgggaagctcttagatggtttcttcattagaccattttacaagatgatgttgggaaagcagataaccctgaatgacatggaatctgtggatagtgaatattacaactctttgaaatggatcctggagaatgaccctactgagctggacctcatgttctgcatagacgaagaaaactttggacagacgtcgaccggccgctaatttagtagtagtag

SEQ ID NO: 378559 - DNA, 8435 bp, Homo sapiens
agcggggcgtagggagaggcgccggggctgccgcccggtgctcggcgcgctctcgggagccgcccgcccgctggtcccgcagccttccgggaggaagcggtgccggcagcgtccagggcgcgctctcgggcaccctcacctgccggcgcccggccgcttacccggcagggcagtgcgcagggtagggtgcgggaccggggggacctggaggcagaggggagaaccggccgtccgcgccgcagcacagccgctgggagcgcctcagaccccgcgcggggcgccggctccatggcgaccgggctcggggagccggtctatggactttccgaagacggggagagtcccgtattctcagagtaaaagttgtttctggaattgatctcgccaaaaaggacatctttggagccagtgatccgtatgtgaaactttcattgtacgtagcggatgagaatagagaacttgctttggtccagacaaaaacaattaaaaagacactgaacccaaaatggaatgaagaattttatttcagggtaaacccatctaatcacagactcctatttgaagtatttgacgaaaatagactgacacgagacgacttcctgggccaggtggacgtgccccttagtcaccttccgacagaagatccaaccatggagcgaccctatacatttaaggactttctcctcagaccaagaagtcataagtctcgagttaagggatttttgcgattgaaaatggcctatatgccaaaaaatggaggtcaagatgaagaaaacagtgaccagagggatgacatggagcatggatgggaagttgttgactcaaatgactcggcttctcagcaccaagaggaacttcctcctcctcctctgcctcccgggtgggaagaaaaagtggacaatttaggccgaacttactatgtcaaccacaacaaccggaccactcagtggcacagaccaagcctgatggacgtgtcctcggagtcggacaataacatcagacagatcaaccaggaggcagcacaccggcgcttccgctcccgcaggcacatcagcgaagacttggagcccgagccctcggagggcggggatgtccccgagccttgggagaccatttcagaggaagtgaatatcgctggagactctctcggtctggctctgcccccaccaccggcctccccaggatctcggaccagccctcaggagctgtcagaggaactaagcagaaggcttcagatcactccagactccaatggggaacagttcagctctttgattcaaagagaaccctcctcaaggttgaggtcatgcagtgtcaccgacgcagttgcagaacagggccatctaccaccgccatcagtggcctatgtacataccacgccgggtctgccttcaggctgggaagaaagaaaagatgctaaggggcgcacatactatgtcaatcataacaatcgaaccacaacttggactcgacctatcatgcagcttgcagaagatggtgcgtccggatcagccacaaacagtaacaaccatctaatcgagcctcagatccgccggcctcgtagcctcagctcgccaacagtaactttatctgccccgctggagggtgccaaggactcacccgtacgtcgggctgtgaaagacaccctttccaacccacagtccccacagccatcaccttacaactcccccaaaccacaacacaaagtcacacagagcttcttgccacccggctgggaaatgaggatagcgccaaacggccggcccttcttcattgatcataacacaaagactacaacctgggaagatccacgtttgaaatttccagtacatatgcggtcaaagacatctttaaaccccaatgaccttggcccccttcctcctggctgggaagaaagaattcacttggatggccgaacgttttatattgatcataatagcaaaattactcagtgggaagacccaagactgcagaacccagctattactggtccggctgtcccttactccagagaatttaagcagaaatatgactacttcaggaagaaattaaagaaacctgctgatatccccaataggtttgaaatgaaacttcacagaaataacatatttgaagagtcctatcggagaattatgtccgtgaaaagaccagatgtcctaaaagctagactgtggattgagtttgaatcagagaaaggtcttgactatgggggtgtggccagagaatggttcttcttactgtccaaagagatgttcaacccctactacggcctctttgagtactctgccacggacaactacacccttcagatcaaccctaattcaggcctctgtaatgaggatcatttgtcctacttcacttttattggaagagttgctggtctggccgtatttcatgggaagctcttagatggtttcttcattagaccattttacaagatgatgttgggaaagcagataaccctgaatgacatggaatctgtggatagtgaatattacaactctttgaaatggatcctggagaatgaccctactgagctggacctcatgttctgcatagacgaagaaaactttggacagacatatcaagtggatttgaagcccaatgggtcagaaataatggtcacaaatgaaaacaaaagggaatatatcgacttagtcatccagtggagatttgtgaacagggtccagaagcagatgaacgccttcttggagggattcacagaactacttcctattgatttgattaaaatttttgatgaaaatgagctggagttgctcatgtgcggcctcggtgatgtggatgtgaatgactggagacagcattctatttacaagaacggctactgcccaaaccaccccgtcattcagtggttctggaaggctgtgctactcatggacgccgaaaagcgtatccggttactgcagtttgtcacagggacatcgcgagtacctatgaatggatttgccgaactttatggttccaatggtcctcagctgtttacaatagagcaatggggcagtcctgagaaactgcccagagctcacacatgctttaatcgccttgacttacctccatatgaaacctttgaagatttacgagagaaacttctcatggccgtggaaaatgctcaaggatttgaaggggtggattaagcaccctgtgcctcgggggtggttgttcttcaagcaagttctgcttgcacttttgcatttgcctaacagacttttgcagaggcgatggcagagagcagctgcaggcatggtccctggagccgagccttcaccacgcactcgtccaagttcggatgcgggaacctggtcccagcttgagttcctgcctttcccaccacaaattatcaactggttgatgtgtacactaattacatttcaggaggacttaatgctatttatgttgtgcctctgcaggcaaagcccttaataaatattttacatcctttctaatgacaatgaatggaattaatcactcaacaggtatagtattacgactcatgtttactttttaaaatgatttagaccgattttcagattttatttcgttatgattaaagatgtctcatgtacttggaaaagtgagcatttttttttttttttgtatttcactttcataccaggcttaatgtcaatgacatttttatttttgaagtactctgacacctccaccctctactttattagaattggaaggcaaatttttgtccaaaaacctacagacaagtactttgagagaatttccaatataatattagacataatgataattttttccatactcagaatgaaaaactggatattacgtttttgttttggggtttttttgtacaaatttagctaatagctacaggctgagagaattgtaacatagcatgacaaattttgtgttgacttgaaaggaatcacaccattattccttagaagtaattacatgtgttctaacacatttgagacagggttggactcccatttctcatccgagaaattacttaacccttcctggcgctgtacagtcatcttttattctatttcctctttgctgtttgtagtagagacattttgaatgaaacttggcactgcttgattcaaaactgtggaaaccagatctgtttagtctcctgtttgtatgcgtttgctaatggtagctaaataaccagtttttgttgtaaatgcaccaattctgaaggcactttatgtactacatggaggtcatatctggttttgtttttatttttttatcatgaacattaaatgtgatgatgatttcttttccctgcacacatctttccggtgcaatatctatcaattgtgaatctggctgctggtgtataaaaacctggatgtaaagctgagcctacagacctgtcctcaccaactgttttgtgatttctactcaactacaaagatttatttaatgtactcttaatctaactgagttttgttaccaatgacctgttgcatgcttcaataccgtgtactgcctgagttgtgcctcttgtgtgctagattaaaagtgagacagagacttgacttgatcctctgagctcaagctattgagctggtagtggcagaggactgagggtacctgcacagtttgattcttttccacgtgtaagtctccattgcagaattgtcgtgctttgagaaaacacctgaggcagtgtgggagttgaacgaccctgctgtcctttttaacctgtgttgtcctagaccctgtcggggcagtcaggggacactagagatttgatctcatgcgagtcatcaataggacaaaaaagttgtggtttggggaggtctgtttgttacataaaaaggacctttcggtgtaagaaattgccgtttttaccctgccctggctggcatgtgagaagccatggaaggttgtggttgtaaatgagttgtctaaaggggtgcagaggcctgaggtttctaaaagaaggtagatttctacagagctgagtgttggttcctttttcttattggttgaaaattacctggtagtgatcagaaaacttagatgctatgtactaaaaaaaaaaaaaaaaaaaaaaaaaaaaaaaaaaaattcccgctcatgagttttgactattggtgagatgttttccgctacagttaacatgacaaatgtctcagtggcaaaaatcccctttttgtaagcccccatagtctagaggcagttttctttttaagaatcatgccagagcctgagtcgagcagtatgctttcttggtttttgagagtaattgtgtaattgtagagggagaaatccaattctaacctaagaactgggattcttctgtcatcttgtaaaccgtatattgaaaaaaacagaatgtcactaaatgcatattaagtcaagtattggaaagtataaaagaaaaatcattctgacaatttctaagccagaagcaaacaagaattactgaaatctaccccatgaatacttggaaggcagtaattgtgagtgacacctcagttcatcaaccccttaataatatcagcttaattttaatgacaactaaatatgctgaagtgaggatttagtattttttaaaaaagcaaaacaaggttcagtagtcctcagcaattctccaagtttctctctttgcctaaaatggtcatagatcttgatttctctgaatcgtgatgaccacacccagtcatcttcacagcataattgcaggtggcagtaaagagagtgtgctgggtaaggagcagttgctgggtcattccttgggccccgacctgcccggggagtagccctgggggagagagggcagtgttgcctatcccagaggtcccagcagtcacactgctctgcaggccgggctctctttatagccagagaaatcaccttaatgcagtctctttagttgtctgctgaagctgtagttattatgggccacttacatgaggctgagaagtacgtgccggagctcacacactgcctgttgcggttctcttaacatcagttatcacagctgcctgtgggtcccgggtatttccattcctgccccttgttggcccgaggaaggatgtggaaagagcacctggcgggatgaaggtccaacagcctgtgcctctccactgctggccctggagccggcagcagtgaggcattcattgtctgtgttgcggtgtattcccagcttcagtgctcttttcctttttgcctgaaatgtttatgcttctctgcagccagtcctctaacaaatctcaagaacaaaggtaagacacttggtttttgtttccaggacccttcagaaggtgacatcagatattccctaaattcagacaatgagggatacagagcgacttggcatgtattatttctcccatgtaaggacaaagggacagattattattgttatttctgagacagagtcttgctctgtagctcaggctggagtgcagtggctcaatctcagctcaccacaacctctgcctcctggcttcaagcgattcttctgcctcagcctccccgaatagttgggattacaggcacccaccaccacgcctggctaatttttgtatttttagtagagatggtttcaccatgctggccaggctggtcttgaactcctgacctcaggtgatcctcccgcctcagccttccaaagtgctgggattacaagcatgagccaccgcacccggcctcacagtgacagattctgagaaacagcatgcaaaacatttgaaccattttctacatctcccattgttgcatagagagtgtgcaccgctgctatcttgccagatccacactggtcctcccgaaagccaggttcatacacagcaactttttaattattctaacagttacccattaacagtcgactcctgtatttctgagagtcttgtactcacctctgaaatttaaaaacgtataaagagagcctgggttaatcagttctgcagcccctacgtgacactgtgctagttctccttcttctgtctcctccttaccctggccctgcacccctgtacttaagagggagaggtgggaggtgctgtctggtatcatttgctgcctcgccagtagagggtgccgctgtgcagggtaactgcccgcctgctcccttcctgacctcccctgaccccgaagatcactacctctgtcattcaggcattggggtacatcctgataagtcgtgtcagaactgccaatttcaggactgagatgtgtttttaaaaaacaaatccttataaactccactttgtactttagattttaaaactggggaaaaatgtgatattctttggaccacttttttaatttatataagccttaatgaacagtgtctatacatttgcatacacacacccccaccccagagtgttctcagtatgtcagagaaagtgccacagcattaggacgggagcttggagaacgttttctagaaaagggttagcttcctgttggcatgaaattttccaagcaaacctcattaaacatctgttgtttgttaaagatgttccactgaaagcaacgcatgtttcaaaggcacgtctttccgttcgttggttttctgtgtgtaaggagtagcattgctgttggcgcctaacctcgcgtgcactgcattctcaaccccgtaccagtgcatcatcagaagccttcctcgtgaccataactctgtgtctgcagatatgtgttcccgtgtaagccagttttccccttttactcagactgatttcacctagattgtcacggtttccttcatgttaactttgcgtgactttgttcttcctttactactctgtatgtaatatatatacatatatacgtacatatgctgtccaaatatatttgtatatatttgtatagcatttttacacctttattgagtaatctggtttcgaaaggaggtgagagtttagtcccttctgcagttttctccaagctgtgtcctgtgaatttcaacccttggagcctaagaaaaccctaggaagatgatgttaatttgctgtcatttcctaattcaggatctatcatcaaatgaaacatgaaaaaaacagtgacttttaaggtgaaaagagtttcaagcattccaaataaattatcaatgtttcataactttttattataaacccacctcctaataggaagccaagtactatttgatacagtggtaaaaaccaaactaccttgaatttttttaaggcaacttatgaataatgctcattttcacagtcagaatagctttaaaatatggttgaatttgatacacacaggaagttttcttgaagaacaatcctttcgcttttcttttttcttgagagatctaaagagaaactgtagattgttttcctgacagcaaaagactaatgtgacaaaatgaagtcattgtaaagaagcgatgcaacttgtcaaatatttaataaagaattatggaagctggaacattttctaaaaaaaaaata

SEQ ID NO: 378560 - DNA, 318 bp, Homo sapiens
tctcagtcttagaatttatatatgagatatgagtatggtatgaattttggaatgttaccttattttggaaatgtgttttaaagttttctttagattggaatgaactcttttttttttttttttttttttgagaggggtcttgttttgttgcctgggctggtcttgaactcctggcctcaaacggtcctccctccttggtctcccaaagtgcttcgattacaggtgtgaaccacgatgctcagccaaattctcattcttataaatcactgaatcacagactagttcttcagtatcactttattcagtctctatggtaga

SEQ ID NO: 378561 - DNA, 439 bp, Homo sapiens
aaagccaacaggtggtgagaaatggaaaagagcaattaatatattgctggtaacagttaaaattggaaccaccatttttgaaaaataatttgaaaatacttagcgaggtgtaaaatgtgcatacccaaccatcatgatactgtattttttttttttttttcctgagaggcagggtctcacactctatcattgaggctggattgtggtggtgcaatcacagctcactgtaacctagagttcctttgcttaagctatcctcccacctcagtctcccaagcagctaggatcaggagcatactacatacctggcttttttttctttttttttttttttttgagatggagtttctttcactctggttgcccaggctggagtgcaatggcgcaatcttggctcaccaccaaccttcgcctcccaggttcaagcgattctcctgcc

SEQ ID NO: 378562 - DNA, 1503 bp, Homo sapiens
cgcaggagctaggatggaggaaatcctgccctttggggtggcagggttactgtggcaactcaggcagaagccaaggggctgctgttctggtgtataagggccctgggcccaaccctgcatctgagagacccaagcagaggatcagagaccaggatgctaactttacttggggcaaacaaggcagctcactcactcagtcactctctgatcactcccactctccttggcagcttagcctttaaaaagatgcagttcaggctttggagtcagaggggcctgggatggaaggggataaatgcctggcacagctctgccctacccacccttctgcctacctgctcacaggtgtaccagactcaggacatccacaaagccaagacacccatcacatcccctcccccagagtgtaacacaaatgctctctctgccctgggcacccaagccattccaaggggcagcagcaggcaacagcctcaagcatacagccctgacccagagccgttcctattcctgttcgtccccaacctcacacaatctgcccacccctgctgcacagcaccagagggagccccaagacaggcttggaaggctccatgtaggcagggaaacaggacctatcttcatccacgttccactcacctccacctccaccaccacctccgctgcctcggttccctcggttgcggtttccacggcccccagagccatactgctgctgctgatagacttctttgggctgggccaccttgatctcacactaaaagtcaagaggacagtggtcaggccagtaggacaaactcagggcagtgactgcccaaacaccttcactgcgacaaacatcaaatggtggatcaggtccatttgctgagaaacaaaatatgctagtatgggaggccacctttgggctaaagctcatggaatcccaactaaaaccaaaggccttccagcagagaacccttccgacagaatgcacttgagatgggcatctcagccccagagcaactccgtatctaatggaggcaggcaactgggccaactgcagcccaggggagcagaggacaggctgggaccaggcaccacaccttggtcctgctgggctagagggtcagacaagacttctcagatgaggggccttagacaatgaggttttaacatctttttctctttacagaagaaactcatctcatccaaatacacgctattgagaaggcgagcctgacctccctcttacagataaagtcagctttcagaggctcagggtgggggggcctgcccgaggccataatgctacccaccccctcctcctaaccactggtctgttggaataacccagatgtctgcatcccctcaagtcagtcaatttcctttctgtccactgggggtggaatggggtagggtgggatactttaaagtgctcctgcttaaataaattagaccagaccagtgtatttctaaagaaaatcctgacatgcacacccattaaaaatagtacattttacagtg

SEQ ID NO: 378563 - DNA, 847 bp, Homo sapiens
aacggctaggtacgaggcccggtttccttccctgtcttctttgctgattcctcctctgttccttggggctgatcctgggccacttttctctctgagccctctcctcaggtgatctcttccattctcttggtattacatagcatccatgtgttggtgactcacaaatttttttgagcccagacatgtcccatgtgttccaactcgaggttctaactgcccctgtgacatctgacaaacatctccagcttcatgtgttcaaaagggcaagggttgattggaccatggtactgttctccctcacctgcccaagaaggctatccccactcacccccgctcatcttgccttgtaaagggcatcaccacctatatctgctccaggcagaaaccacacgctccccagtcctgcatcaatcctgcctcctccatctccatgatgcctcttaactccctccacctctccatctccatggccaccacctgctctcacctggcgtcctcctccttggtcttctccttctacttttattcttgtcaactccattagacacagccagaggccacctcctaaaataggagctgacttatgtcccttttctcattaaaactcttcagtggcttcacatggcactgagaagaaaactcaggctccttcccagccctgtgcacatgtcccctgcatgtctccccacttcctctcctaccctgccctccttaggccctggcctccctcatcttctcctggttcccggagcacactgagctcttttccttcacaaggccttggagcatgctgctccatctgcctggaaacctctccctcaagactcagtacatgagtcacctcccc

SEQ ID NO: 378564 - DNA, 980 bp, Homo sapiens
ttaaacaaaagacatttattttctcacagtcctggaggctggaagtccaagaccaaggtgttcgcagggttggtttcttctaaggcctctctccttggcttggagatggccctggttggtcttctgagtgcaggtgtccctggtgtctctttgtgtgtccagattttctcttataaggacactggtgagattggatgaggggccccctgacggcctcatcttaatgtaatcacctctcttatctccatatccattcacatacgggccattgcgagctaccggggattaggggttcaacacataaattgggggtgggggggtgcagctcagcccataaacatgccccctctggctcgctctcccagggcatccatcgtagcacttagaaaaatgatcacttcttcttttttggctttgtggtggcgtgtgtgtgtgtgtatttgtatatacacacatatatatataaatacacagacacacatatatacaaacacacgcattcattttcgtccacagttcctggctcataactcccacagcccttgttacactcttttgttacaacattgggtgtgtcaggcctcaggagacaatcactctaacctcctgcccttccttttacctgcccaagacaggactctaatcttccctacctttctgatggtgggtcataaaactcattccagagacggtcccaccccatatcctgctagaaggaatgctgctgtcatgaagcttccataaaaaccaaggggactggattcagagagcttccagataactgaacatacagaggttctagaagggtggtgcgcccagggagggcacaggaagctccatgcccttccttcatacctcaccctatgcatctctttatctgtatcttttataatatcctttataataaaccagtaaatgtatttcccttagttttgtgagccaactccagcccgggcaacagagtgagactgtctcaaaaa

SEQ ID NO: 378565 - DNA, 1279 bp, Homo sapiens
aagaaattccaaaggtggccagcatggtggctcatgcctgtaattccagtactttgaggccgaggtgggaggaatgcttgagcccccagtctgggcaatatagtgagaccccatctctgcaaaaaaagaagttccagaggcccagacttgctactggtgcccagggggctgtggggcagcttgggcattgagccctcatgctgtgggatctgatgctgtctctaggtagatagtgttggaattgaattggaggacacccaactggtgtccgctgcagaactgattgcttgcctggtggtggggagaaatccttacatattttttggagtcacagaagtcttctgtgttgattgttgtagtgtgaaagcagaggaaaaacaatggtttgggttttttcaaaacaactttcatgacacatacgagaatgtaaattccagaagggccaaggccatgtctgttttacctactctttttcccccagcttctagtacataggaggcatttgatatataccaaacaaacaagcaagtgactgactagttgatgtcctgagaatcttcttgctgctggaagggtcctcctgccctcagcatttctctctgggaagctcttagactactctctcagtcatgcccaccttttcggtcataggtcagaagccaatgacctggccctgaggctggctcgccactacacgggacaccaggacgtggtggtattagatcagtaagtgcaactcacagccctaccgttcccagaagcctggcccacaggcttcttggtgatccgtgagactgactctgggtgccttaggcagggaggataaggggcctgggctactgaagacaagtgtggcaggcagaggaccaggcctgagacctcccagaggctctgtcaccctgggccaccattctgggaaggcagctctggggagcagagtgcgctttgtaagagactcaaaggtggtcccacaacattgtacatgttcaaactactccagcagtagctcccatgaattgagtatgtgatgtgcacaaagccggggctgacaatatcaacacatttaagattcattataaaccagaaggaggaaatcccacctcatttcacagcagagaaaacaaccgagagagattaaatgatgagctgctgtcacatagccagtcagcagtcttgcaagaattgttgctgactccaaagcttgtgctctttcccagcccaagaacttgggggctctgtcaggaaagttggcctcccttgtgtgtcttcaggggtgggg

SEQ ID NO: 378566 - DNA, 2747 bp, Homo sapiens
  misc_feature (674)..(674): n is a, c, g, or t
tcttcctgctgccccttcatggggctgggaaaacctaagacctgcttctcccaccctgaggcccctactgtgtaccaggcccgggtaaggtaccagtcacatactcgcacttaggcctcacagttcatcccattttatgcacaaggcgactcaaagactgagtctggcccagagaaggcctgcaggagctccgagccccgcctgggcgccgggagcaggggcggggtcgtccgggaccctttcccggaagggaggccgcaggggcctgcggggcggggcctgcggggcgaggcccggggcgcgtcccggaaccagagacggggcagcgctcgagttcctgcgcgggactgccaaggcacgaccacgggccggaaggctgccaggcccagtgggcaagcgaagaaatgaaccaccgcaacgcgggcgcttcggggcggggccgagtgcgaacctgagccccaaatcccgacccaggcaggggcggggcccggagcggggccttggaggcccagcccgcgcggcgacgtctccgcgtggcgtcacggcaccgactgacggccacccaccatggccgcagaccagcgcccgaaggccgacacgctggccctgaggcaacggctcatcaggtacccgggcggggggcgggcggcggggggcgcggggctgcgcggagnggcacgcgcacgcacgacgcacgcacgcacgcactacgcacgcgcctccggctaggaagccgctgctacccatcccgtccggccgctgccccggccccgctggagcttctagggcccgaggcgggcggcgccgttgggcagtcccggcgggtggtctccggggccgcctccccgacagcgccgtctccaggccgcccagttcaggagacggccccgccctcaccgctgttcggctgtgtcagcctcgcttggcagcctttactccggagaagaccttcaccctggcgcctgagaggacctcacccagggtggcccgtcagcagcacctgggcctggctcgagagtgacctgggagggggctgaaagggcagacaagggagagtcgggggagtcggttcacaggcagcacacttgacctgtgagggggccctcggtgggacggtgggtgaggtcgcctcccactggagcttagggctggcacccagcgaggggcagcaggaccacgtggctggcaaggagctgtttagggctgagagccaggcacctaatgttggtgccctgtcccatcccatcgaagacacgcggccttatggagtccccatgggacggggcagccaccttttctcaggatccgggagactgacgcggacacatgcagaaatgagcaaggaggccacagaggctgaaaatgctttcagaaacaatccgaagtttcagcgacttgttaccccatctgcttcctgctttgcaaccacctgtggagtggagagacaaggcagggaagcagcaccttgcccttccagctctcatttcccccccgccaccagaaactgggaaggggtgggcgggggtctgcgatgagtagacttcaccctttcggtcttcagacatggctgtccactccttgcctgtccccacagctcttcctgcagactcttttttcccgaggatcctgttaagattgtccgggcccaagggcagtacatgtacgatgaacagggggcagaatacatcgattgcatcagcaatgtggcgcacggtcagtatcacacctcaggctggcagggcaggagaggaaggcagtgctgtgaacctggtcccaaggtgacctgagattgccgagaggtgtggagaacctgggtggagttgaggcactgtcagtatgcagaggaggctcagccttcgcaatatagctgtggaattctgcaatctggagctgtgctaaaccaggcaggggtcagcaatctaggtctgtgagtctagttccacttgggactgatgatgagctcacaaagtggcagatggcccagctgtgaccagcaacgtagcacagtgctggccaagtgctggggtcatggcagtgcttcagccccattggccatctcaggtgctaggcaagggagctgaagtaggaattcagtcatcttgatgaggctgccagagctgatggaaagaaagggagtctgagactcagcaggcacatggaagatgaataaagttgaggttaaaaaaaaaaaaaaagcagagactctagtcttagactgcttgggctcaaatccctgtcccctacttactaacttgtgatctcgggcaagttacttaattctcagtgcctcagtttgcttatctgtgaaagacataatgatactaggtacccactttaaggtgtttggagaattaagtgtgttaatttatgtagcttgctctgaatgtgcctggcacatggtgagctctcagtacatattcactgttattatccttggcctttgacaatcaagattaccaccagcccccttggctggtgaagtgaaaccagttgacagtcaccccccaccccacctttgtcatacaagcctcaaaaggccttccagcctgggcaacataatgagaccttgtctctaccaaaaaaaaacttaaaaattagccaggcatggtgactggtgtctatagccccacctgctcaggaggctgaggtgggaggaccacttgagcccaggagtgtgaggatgcagtgaatgccatgatcacaccatacactccagcctgggtgacagagtaaggccctgttaaaaa

SEQ ID NO: 378567 - DNA, 2740 bp, Homo sapiens
  misc_feature (674)..(674): n is a, c, g, or t
tcttcctgctgccccttcatggggctgggaaaacctaagacctgcttctcccaccctgaggcccctactgtgtaccaggcccgggtaaggtaccagtcacatactcgcacttaggcctcacagttcatcccattttatgcacaaggcgactcaaagactgagtctggcccagagaaggcctgcaggagctccgagccccgcctgggcgccgggagcaggggcggggtcgtccgggaccctttcccggaagggaggccgcaggggcctgcggggcggggcctgcggggcgaggcccggggcgcgtcccggaaccagagacggggcagcgctcgagttcctgcgcgggactgccaaggcacgaccacgggccggaaggctgccaggcccagtgggcaagcgaagaaatgaaccaccgcaacgcgggcgcttcggggcggggccgagtgcgaacctgagccccaaatcccgacccaggcaggggcggggcccggagcggggccttggaggcccagcccgcgcggcgacgtctccgcgtggcgtcacggcaccgactgacggccacccaccatggccgcagaccagcgcccgaaggccgacacgctggccctgaggcaacggctcatcaggtacccgggcggggggcgggcggcggggggcgcggggctgcgcggagnggcacgcgcacgcacgacgcacgcacgcacgcactacgcacgcgcctccggctaggaagccgctgctacccatcccgtccggccgctgccccggccccgctggagcttctagggcccgaggcgggcggcgccgttgggcagtcccggcgggtggtctccggggccgcctccccgacagcgccgtctccaggccgcccagttcaggagacggccccgccctcaccgctgttcggctgtgtcagcctcgcttggcagcctttactccggagaagaccttcaccctggcgcctgagaggacctcacccagggtggcccgtcagcagcacctgggcctggctcgagagtgacctgggagggggctgaaagggcagacaagggagagtcgggggagtcggttcacaggcagcacacttgacctgtgagggggccctcggtgggacggtgggtgaggtcgcctcccactggagcttagggctggcacccagcgaggggcagcaggaccacgtggctggcaaggagctgtttagggctgagagccaggcacctaatgttggtgccctgtcccatcccatcgaagacacgcggccttatggagtccccatgggacggggcagccaccttttctcaggatccgggagactgacgcggacacatgcagaaatgagcaaggaggccacagaggctgaaaatgctttcagaaacaatccgaagtttcagcgacttgttaccccatctgcttcctgctttgcaaccacctgtggagtggagagacaaggcagggaagcagcaccttgcccttccagctctcatttcccccccgccaccagaaactgggaaggggtgggcgggggtctgcgatgagtagacttcaccctttcggtcttcagacatggctgtccactccttgcctgtccccacagctcttcctgcagactcttttttcccgaggatcctgttaagattgtccgggcccaagggcagtacatgtacgatgaacagggggcagaatacatcgattgcatcagcaatgtggcgcacggtcagtatcacacctcaggctggcagggcaggagaggaaggcagtgctgtgaacctggtcccaaggtgacctgagattgccgagaggtgtggagaacctgggtggagttgaggcactgtcagtatgcagaggaggctcagccttcgcaatatagctgtggaattctgcaatctggagctgtgctaaaccaggcaggggtcagcaatctaggtctgtgagtctagttccacttgggactgatgatgagctcacaaagtggcagatggcccagctgtgaccagcaacgtagcacagtgctggccaagtgctggggtcatggcagtgcttcagccccattggccatctcaggtgctaggcaagggagctgaagtaggaattcagtcatcttgatgaggctgccagagctgatggaaagaaagggagtctgagactcagcaggcacatggaagatgaataaagttgaggttaaaaaaaaaaaaaaagcagagactctagtcttagactgcttgggctcaaatccctgtcccctacttactaacttgtgatctcgggcaagttacttaattctcagtgcctcagtttgcttatctgtgaaagacataatgatactaggtacccactttaaggtgtttggagaattaagtgtgttaatttatgtagcttgctctgaatgtgcctggcacatggtgagctctcagtacatattcactgttattatccttggcctttgacaatcaagattaccaccagcccccttggctggtgaagtgaaaccagttgacagtcaccccccaccccacctttgtcatacaagcctcaaaaggccttccagcctgggcaacataatgagaccttgtctctaccaaaaaaaaaaaaaaattagccaggcgtggtggtgggcacctgtagtcccagctactcaggaggctgaggcaggagaatggcgtgaacccgggaggtggagcttgcagtgagccaagatcatgccactgcactccagcctgggcgacagagtgagactccgtct

SEQ ID NO: 378568 - DNA, 2283 bp, Homo sapiens
tcttcctgctgccccttcatggggctgggaaaacctaagacctgcttctcccaccctgaggcccctactgtgtaccaggcccgggtaaggtaccagtcacatactcgcacttaggcctcacagttcatcccattttatgcacaaggcgactcaaagactgagtctggcccagagaaggcctgcaggagctccgagccccgcctgggcgccgggagcaggggcggggtcgtccgggaccctttcccggaagggaggccgcaggggcctgcggggcggggcctgcggggcgaggcccggggcgcgtcccggaaccagagacggggcagcgctcgagttcctgcgcgggactgccaaggcacgaccacgggccggaaggctgccaggcccagtgggcaagcgaagaaatgaaccaccgcaacgcgggcgcttcggggcggggccgagtgcgaacctgagccccaaatcccgacccaggcaggggcggggcccggagcggggccttggaggcccagcccgcgcggcgacgtctccgcgtggcgtcacggcaccgactgacggccacccaccatggccgcagaccagcgcccgaaggccgacacgctggccctgaggcaacggctcatcagctcttcctgcagactcttttttcccgaggatcctgttaagattgtccgggcccaagggcagtacatgtacgatgaacagggggcagaatacatcgattgcatcagcaatgtggcgcacgttgggcactgccaccctctcgtggtccaagcagcacatgagcagaaccaggtgctcaacaccaacagccggtacctgcatgacaacatcgtggactatgcgcagaggctgtcagagaccctgccggagcagctctgtgtgttctatttcctgaattctgggtcagaagccaatgacctggccctgaggctggctcgccactacacgggacaccaggacgtggtggtattagatcatgcgtatcacggccacctgagctccctgattgacatcagtccctacaagttccgcaacctggatggccagaaggagtgggtccacgtggcacctctcccagacacctaccggggcccctaccgggaggaccaccccaacccagctatggcctatgccaacgaggtgaaacgtgtggtcagcagtgcacaggagaagggcaggaagattgcagccttcttcgctgagtctctgcccagtgtgggagggcagatcattccccctgctggctacttctcccaagtggcagagcacatccgcaaggccggaggggtctttgttgcagatgagatccaggttggctttggccgggtaggcaagcacttctgggccttccagctccagggaaaagacttcgtccctgacatcgtcaccatgggcaagtccattggcaacggccaccctgttgcctgcgtggccgcaacccagcctgtggcgagggcatttgaagccaccggcgttgagtacttcaacacgtttgggggcagcccagtgtcctgcgctgtggggctggccgtcctgaatgtcttggagaaggagcagctccaggatcatgccaccagtgtaggcagcttcctgatgcagctcctcgggcagcaaaaaatcaaacatcccatcgtcggggatgtcaggggtgttgggctcttcattggtgtggatctgatcaaagatgaggccacaaggacaccagcaactgaagaggctgcctacttggtatcaaggctgaaggagaactacgttttgctgagcactgatggccctgggaggaacatcctgaagtttaagcccccaatgtgcttcagcctggacaatgcacggcaggtggtggcaaagctggatgccattctgactgacatggaagagaaggtgagaagttgtgaaacgctgaggctccagccctaagccagccctgctctgcctaagtgtactccagaagaaactcatctcatccaaatacacgctattgagaaggcgagcctgacctccctcttacagataaagtcagctttcagaggctcagggtgggggggcctgcccgaggccataatgctacccaccccctcctcctaaccactggtctgttggaataacccagatgtctgcatcccctcaagtcagtcaatttcctttctgtccactgggggtggaatggggtagggtgggatactttaaagtgctcctgcttaaataaattagaccagaccagtgtatttctaaagaaaatcctgacatgcacacccattaaaaatagtacattttacagtg

SEQ ID NO: 378569 - DNA, 3106 bp, Homo sapiens
  misc_feature (674)..(674): n is a, c, g, or t
tcttcctgctgccccttcatggggctgggaaaacctaagacctgcttctcccaccctgaggcccctactgtgtaccaggcccgggtaaggtaccagtcacatactcgcacttaggcctcacagttcatcccattttatgcacaaggcgactcaaagactgagtctggcccagagaaggcctgcaggagctccgagccccgcctgggcgccgggagcaggggcggggtcgtccgggaccctttcccggaagggaggccgcaggggcctgcggggcggggcctgcggggcgaggcccggggcgcgtcccggaaccagagacggggcagcgctcgagttcctgcgcgggactgccaaggcacgaccacgggccggaaggctgccaggcccagtgggcaagcgaagaaatgaaccaccgcaacgcgggcgcttcggggcggggccgagtgcgaacctgagccccaaatcccgacccaggcaggggcggggcccggagcggggccttggaggcccagcccgcgcggcgacgtctccgcgtggcgtcacggcaccgactgacggccacccaccatggccgcagaccagcgcccgaaggccgacacgctggccctgaggcaacggctcatcaggtacccgggcggggggcgggcggcggggggcgcggggctgcgcggagnggcacgcgcacgcacgacgcacgcacgcacgcactacgcacgcgcctccggctaggaagccgctgctacccatcccgtccggccgctgccccggccccgctggagcttctagggcccgaggcgggcggcgccgttgggcagtcccggcgggtggtctccggggccgcctccccgacagcgccgtctccaggccgcccagttcaggagacggccccgccctcaccgctgttcggctgtgtcagcctcgcttggcagcctttactccggagaagaccttcaccctggcgcctgagaggacctcacccagggtggcccgtcagcagcacctgggcctggctcgagagtgacctgggagggggctgaaagggcagacaagggagagtcgggggagtcggttcacaggcagcacacttgacctgtgagggggccctcggtgggacggtgggtgaggtcgcctcccactggagcttagggctggcacccagcgaggggcagcaggaccacgtggctggcaaggagctgtttagggctgagagccaggcacctaatgttggtgccctgtcccatcccatcgaagacacgcggccttatggagtccccatgggacggggcagccaccttttctcaggatccgggagactgacgcggacacatgcagaaatgagcaaggaggccacagaggctgaaaatgctttcagaaacaatccgaagtttcagcgacttgttaccccatctgcttcctgctttgcaaccacctgtggagtggagagacaagctcttcctgcagactcttttttcccgaggatcctgttaagattgtccgggcccaagggcagtacatgtacgatgaacagggggcagaatacatcgattgcatcagcaatgtggcgcacgttgggcactgccaccctctcgtggtccaagcagcacatgagcagaaccaggtgctcaacaccaacagccggtacctgcatgacaacatcgtggactatgcgcagaggctgtcagagaccctgccggagcagctctgtgtgttctatttcctgaattctgggtcagaagccaatgacctggccctgaggctggctcgccactacacgggacaccaggacgtggtggtattagatcatgcgtatcacggccacctgagctccctgattgacatcagtccctacaagttccgcaacctggatggccagaaggagtgggtccacgtggcacctctcccagacacctaccggggcccctaccgggaggaccaccccaacccagctatggcctatgccaacgaggtgaaacgtgtggtcagcagtgcacaggagaagggcaggaagattgcagccttcttcgctgagtctctgcccagtgtgggagggcagatcattccccctgctggctacttctcccaagtggcagagcacatccgcaaggccggaggggtctttgttgcagatgagatccaggttggctttggccgggtaggcaagcacttctgggccttccagctccagggaaaagacttcgtccctgacatcgtcaccatgggcaagtccattggcaacggccaccctgttgcctgcgtggccgcaacccagcctgtggcgagggcatttgaagccaccggcgttgagtacttcaacacgtttgggggcagcccagtgtcctgcgctgtggggctggccgtcctgaatgtcttggagaaggagcagctccaggatcatgccaccagtgtaggcagcttcctgatgcagctcctcgggcagcaaaaaatcaaacatcccatcgtcggggatgtcaggggtgttgggctcttcattggtgtggatctgatcaaagatgaggccacaaggacaccagcaactgaagaggctgcctacttggtatcaaggctgaaggagaactacgttttgctgagcactgatggccctgggaggaacatcctgaagtttaagcccccaatgtgcttcagcctggacaatgcacggcaggtggtggcaaagctggatgccattctgactgacatggaagagaaggtgagaagttgtgaaacgctgaggctccagccctaagccagccctgctctgcctaagtgtactccagaagaaactcatctcatccaaatacacgctattgagaaggcgagcctgacctccctcttacagataaagtcagctttcagaggctcagggtgggggggcctgcccgaggccataatgctacccaccccctcctcctaaccactggtctgttggaataacccagatgtctgcatcccctcaagtcagtcaatttcctttctgtccactgggggtggaatggggtagggtgggatactttaaagtgctcctgcttaaataaattagaccagaccagtgtatttctaaagaaaatcctgacatgcacacccattaaaaatagtacattttacagtg

SEQ ID NO: 378570 - DNA, 2029 bp, Homo sapiens
aagaaattccaaaggtggccagcatggtggctcatgcctgtaattccagtactttgaggccgaggtgggaggaatgcttgagcccccagtctgggcaatatagtgagaccccatctctgcaaaaaaagaagttccagaggcccagacttgctactggtgcccagggggctgtggggcagcttgggcattgagccctcatgctgtgggatctgatgctgtctctaggtagatagtgttggaattgaattggaggacacccaactggtgtccgctgcagaactgattgcttgcctggtggtggggagaaatccttacatattttttggagtcacagaagtcttctgtgttgattgttgtagtgtgaaagcagaggaaaaacaatggtttgggttttttcaaaacaactttcatgacacatacgagaatgtaaattccagaagggccaaggccatgtctgttttacctactctttttcccccagcttctagtacataggaggcatttgatatataccaaacaaacaagcaagtgactgactagttgatgtcctgagaatcttcttgctgctggaagggtcctcctgccctcagcatttctctctgggaagctcttagactactctctcagtcatgcccaccttttcggtcataggtcagaagccaatgacctggccctgaggctggctcgccactacacgggacaccaggacgtggtggtattagatcatgcgtatcacggccacctgagctccctgattgacatcagtccctacaagttccgcaacctggatggccagaaggagtgggtccacgtggcacctctcccagacacctaccggggcccctaccgggaggaccaccccaacccagctatggcctatgccaacgaggtgaaacgtgtggtcagcagtgcacaggagaagggcaggaagattgcagccttcttcgctgagtctctgcccagtgtgggagggcagatcattccccctgctggctacttctcccaagtggcagagcacatccgcaaggccggaggggtctttgttgcagatgagatccaggttggctttggccgggtaggcaagcacttctgggccttccagctccagggaaaagacttcgtccctgacatcgtcaccatgggcaagtccattggcaacggccaccctgttgcctgcgtggccgcaacccagcctgtggcgagggcatttgaagccaccggcgttgagtacttcaacacgtttgggggcagcccagtgtcctgcgctgtggggctggccgtcctgaatgtcttggagaaggagcagctccaggatcatgccaccagtgtaggcagcttcctgatgcagctcctcgggcagcaaaaaatcaaacatcccatcgtcggggatgtcaggggtgttgggctcttcattggtgtggatctgatcaaagatgaggccacaaggacaccagcaactgaagaggctgcctacttggtatcaaggctgaaggagaactacgttttgctgagcactgatggccctgggaggaacatcctgaagtttaagcccccaatgtgcttcagcctggacaatgcacggcaggtggtggcaaagctggatgccattctgactgacatggaagagaaggtgagaagttgtgaaacgctgaggctccagccctaagccagccctgctctgcctaagtgtactccagaagaaactcatctcatccaaatacacgctattgagaaggcgagcctgacctccctcttacagataaagtcagctttcagaggctcagggtgggggggcctgcccgaggccataatgctacccaccccctcctcctaaccactggtctgttggaataacccagatgtctgcatcccctcaagtcagtcaatttcctttctgtccactgggggtggaatggggtagggtgggatactttaaagtgctcctgcttaaataaattagaccagaccagtgtatttctaaagaaaatcctgacatgcacacccattaaaaatagtacattttacagtg

SEQ ID NO: 378571 - DNA, 2004 bp, Homo sapiens
tcttcctgctgccccttcatggggctgggaaaacctaagacctgcttctcccaccctgaggcccctactgtgtaccaggcccgggtaaggtaccagtcacatactcgcacttaggcctcacagttcatcccattttatgcacaaggcgactcaaagactgagtctggcccagagaaggcctgcaggagctccgagccccgcctgggcgccgggagcaggggcggggtcgtccgggaccctttcccggaagggaggccgcaggggcctgcggggcggggcctgcggggcgaggcccggggcgcgtcccggaaccagagacggggcagcgctcgagttcctgcgcgggactgccaaggcacgaccacgggccggaaggctgccaggcccagtgggcaagcgaagaaatgaaccaccgcaacgcgggcgcttcggggcggggccgagtgcgaacctgagccccaaatcccgacccaggcaggggcggggcccggagcggggccttggaggcccagcccgcgcggcgacgtctccgcgtggcgtcacggcaccgactgacggccacccaccatggccgcagaccagcgcccgaaggccgacacgctggccctgaggcaacggctcatcaggtcagaagccaatgacctggccctgaggctggctcgccactacacgggacaccaggacgtggtggtattagatcatgcgtatcacggccacctgagctccctgattgacatcagtccctacaagttccgcaacctggatggccagaaggagtgggtccacgtggcacctctcccagacacctaccggggcccctaccgggaggaccaccccaacccagctatggcctatgccaacgaggtgaaacgtgtggtcagcagtgcacaggagaagggcaggaagattgcagccttcttcgctgagtctctgcccagtgtgggagggcagatcattccccctgctggctacttctcccaagtggcagagcacatccgcaaggccggaggggtctttgttgcagatgagatccaggttggctttggccgggtaggcaagcacttctgggccttccagctccagggaaaagacttcgtccctgacatcgtcaccatgggcaagtccattggcaacggccaccctgttgcctgcgtggccgcaacccagcctgtggcgagggcatttgaagccaccggcgttgagtacttcaacacgtttgggggcagcccagtgtcctgcgctgtggggctggccgtcctgaatgtcttggagaaggagcagctccaggatcatgccaccagtgtaggcagcttcctgatgcagctcctcgggcagcaaaaaatcaaacatcccatcgtcggggatgtcaggggtgttgggctcttcattggtgtggatctgatcaaagatgaggccacaaggacaccagcaactgaagaggctgcctacttggtatcaaggctgaaggagaactacgttttgctgagcactgatggccctgggaggaacatcctgaagtttaagcccccaatgtgcttcagcctggacaatgcacggcaggtggtggcaaagctggatgccattctgactgacatggaagagaaggtgagaagttgtgaaacgctgaggctccagccctaagccagccctgctctgcctaagtgtactccagaagaaactcatctcatccaaatacacgctattgagaaggcgagcctgacctccctcttacagataaagtcagctttcagaggctcagggtgggggggcctgcccgaggccataatgctacccaccccctcctcctaaccactggtctgttggaataacccagatgtctgcatcccctcaagtcagtcaatttcctttctgtccactgggggtggaatggggtagggtgggatactttaaagtgctcctgcttaaataaattagaccagaccagtgtatttctaaagaaaatcctgacatgcacacccattaaaaatagtacattttacagtg

SEQ ID NO: 378572 - DNA, 3216 bp, Homo sapiens
  misc_feature (674)..(674): n is a, c, g, or t
tcttcctgctgccccttcatggggctgggaaaacctaagacctgcttctcccaccctgaggcccctactgtgtaccaggcccgggtaaggtaccagtcacatactcgcacttaggcctcacagttcatcccattttatgcacaaggcgactcaaagactgagtctggcccagagaaggcctgcaggagctccgagccccgcctgggcgccgggagcaggggcggggtcgtccgggaccctttcccggaagggaggccgcaggggcctgcggggcggggcctgcggggcgaggcccggggcgcgtcccggaaccagagacggggcagcgctcgagttcctgcgcgggactgccaaggcacgaccacgggccggaaggctgccaggcccagtgggcaagcgaagaaatgaaccaccgcaacgcgggcgcttcggggcggggccgagtgcgaacctgagccccaaatcccgacccaggcaggggcggggcccggagcggggccttggaggcccagcccgcgcggcgacgtctccgcgtggcgtcacggcaccgactgacggccacccaccatggccgcagaccagcgcccgaaggccgacacgctggccctgaggcaacggctcatcaggtacccgggcggggggcgggcggcggggggcgcggggctgcgcggagnggcacgcgcacgcacgacgcacgcacgcacgcactacgcacgcgcctccggctaggaagccgctgctacccatcccgtccggccgctgccccggccccgctggagcttctagggcccgaggcgggcggcgccgttgggcagtcccggcgggtggtctccggggccgcctccccgacagcgccgtctccaggccgcccagttcaggagacggccccgccctcaccgctgttcggctgtgtcagcctcgcttggcagcctttactccggagaagaccttcaccctggcgcctgagaggacctcacccagggtggcccgtcagcagcacctgggcctggctcgagagtgacctgggagggggctgaaagggcagacaagggagagtcgggggagtcggttcacaggcagcacacttgacctgtgagggggccctcggtgggacggtgggtgaggtcgcctcccactggagcttagggctggcacccagcgaggggcagcaggaccacgtggctggcaaggagctgtttagggctgagagccaggcacctaatgttggtgccctgtcccatcccatcgaagacacgcggccttatggagtccccatgggacggggcagccaccttttctcaggatccgggagactgacgcggacacatgcagaaatgagcaaggaggccacagaggctgaaaatgctttcagaaacaatccgaagtttcagcgacttgttaccccatctgcttcctgctttgcaaccacctgtggagtggagagacaaggcagggaagcagcaccttgcccttccagctctcatttcccccccgccaccagaaactgggaaggggtgggcgggggtctgcgatgagtagacttcaccctttcggtcttcagacatggctgtccactccttgcctgtccccacagctcttcctgcagactcttttttcccgaggatcctgttaagattgtccgggcccaagggcagtacatgtacgatgaacagggggcagaatacatcgattgcatcagcaatgtggcgcacgttgggcactgccaccctctcgtggtccaagcagcacatgagcagaaccaggtgctcaacaccaacagccggtacctgcatgacaacatcgtggactatgcgcagaggctgtcagagaccctgccggagcagctctgtgtgttctatttcctgaattctgggtcagaagccaatgacctggccctgaggctggctcgccactacacgggacaccaggacgtggtggtattagatcatgcgtatcacggccacctgagctccctgattgacatcagtccctacaagttccgcaacctggatggccagaaggagtgggtccacgtggcacctctcccagacacctaccggggcccctaccgggaggaccaccccaacccagctatggcctatgccaacgaggtgaaacgtgtggtcagcagtgcacaggagaagggcaggaagattgcagccttcttcgctgagtctctgcccagtgtgggagggcagatcattccccctgctggctacttctcccaagtggcagaatgagatccaggttggctttggccgggtaggcaagcacttctgggccttccagctccagggaaaagacttcgtccctgacatcgtcaccatgggcaagtccattggcaacggccaccctgttgcctgcgtggccgcaacccagcctgtggcgagggcatttgaagccaccggcgttgagtacttcaacacgtttgggggcagcccagtgtcctgcgctgtggggctggccgtcctgaatgtcttggagaaggagcagctccaggatcatgccaccagtgtaggcagcttcctgatgcagctcctcgggcagcaaaaaatcaaacatcccatcgtcggggatgtcaggggtgttgggctcttcattggtgtggatctgatcaaagatgaggccacaaggacaccagcaactgaagaggctgcctacttggtatcaaggctgaaggagaactacgttttgctgagcactgatggccctgggaggaacatcctgaagtttaagcccccaatgtgcttcagcctggacaatgcacggcaggtggtggcaaagctggatgccattctgactgacatggaagagaaggtgagaagttgtgaaacgctgaggctccagccctaagccagccctgctctgcctaagtgtactccagaagaaactcatctcatccaaatacacgctattgagaaggcgagcctgacctccctcttacagataaagtcagctttcagaggctcagggtgggggggcctgcccgaggccataatgctacccaccccctcctcctaaccactggtctgttggaataacccagatgtctgcatcccctcaagtcagtcaatttcctttctgtccactgggggtggaatggggtagggtgggatactttaaagtgctcctgcttaaataaattagaccagaccagtgtatttctaaagaaaatcctgacatgcacacccattaaaaatagtacattttacagtg

SEQ ID NO: 378573 - DNA, 2325 bp, Homo sapiens
tcttcctgctgccccttcatggggctgggaaaacctaagacctgcttctcccaccctgaggcccctactgtgtaccaggcccgggtaaggtaccagtcacatactcgcacttaggcctcacagttcatcccattttatgcacaaggcgactcaaagactgagtctggcccagagaaggcctgcaggagctccgagccccgcctgggcgccgggagcaggggcggggtcgtccgggaccctttcccggaagggaggccgcaggggcctgcggggcggggcctgcggggcgaggcccggggcgcgtcccggaaccagagacggggcagcgctcgagttcctgcgcgggactgccaaggcacgaccacgggccggaaggctgccaggcccagtgggcaagcgaagaaatgaaccaccgcaacgcgggcgcttcggggcggggccgagtgcgaacctgagccccaaatcccgacccaggcaggggcggggcccggagcggggccttggaggcccagcccgcgcggcgacgtctccgcgtggcgtcacggcaccgactgacggccacccaccatggccgcagaccagcgcccgaaggccgacacgctggccctgaggcaacggctcatcagccaccttttctcaggatccgggagactgacgcggacacatgcagaaatgagcaaggaggccacagaggctgaaaatgctttcagaaacaatccgaagtttcagcgacttgttaccccatctgcttcctgctttgcaaccacctgtggagtggagagacaagttgggcactgccaccctctcgtggtccaagcagcacatgagcagaaccaggtgctcaacaccaacagccggtacctgcatgacaacatcgtggactatgcgcagaggctgtcagagaccctgccggagcagctctgtgtgttctatttcctgaattctgggtcagaagccaatgacctggccctgaggctggctcgccactacacgggacaccaggacgtggtggtattagatcatgcgtatcacggccacctgagctccctgattgacatcagtccctacaagttccgcaacctggatggccagaaggagtgggtccacgtggcacctctcccagacacctaccggggcccctaccgggaggaccaccccaacccagctatggcctatgccaacgaggtgaaacgtgtggtcagcagtgcacaggagaagggcaggaagattgcagccttcttcgctgagtctctgcccagtgtgggagggcagatcattccccctgctggctacttctcccaagtggcagagcacatccgcaaggccggaggggtctttgttgcagatgagatccaggttggctttggccgggtaggcaagcacttctgggccttccagctccagggaaaagacttcgtccctgacatcgtcaccatgggcaagtccattggcaacggccaccctgttgcctgcgtggccgcaacccagcctgtggcgagggcatttgaagccaccggcgttgagtacttcaacacgtttgggggcagcccagtgtcctgcgctgtggggctggccgtcctgaatgtcttggagaaggagcagctccaggatcatgccaccagtgtaggcagcttcctgatgcagctcctcgggcagcaaaaaatcaaacatcccatcgtcggggatgtcaggggtgttgggctcttcattggtgtggatctgatcaaagatgaggccacaaggacaccagcaactgaagaggctgcctacttggtatcaaggctgaaggagaactacgttttgctgagcactgatggccctgggaggaacatcctgaagtttaagcccccaatgtgcttcagcctggacaatgcacggcaggtggtggcaaagctggatgccattctgactgacatggaagagaaggtgagaagttgtgaaacgctgaggctccagccctaagccagccctgctctgcctaagtgtactccagaagaaactcatctcatccaaatacacgctattgagaaggcgagcctgacctccctcttacagataaagtcagctttcagaggctcagggtgggggggcctgcccgaggccataatgctacccaccccctcctcctaaccactggtctgttggaataacccagatgtctgcatcccctcaagtcagtcaatttcctttctgtccactgggggtggaatggggtagggtgggatactttaaagtgctcctgcttaaataaattagaccagaccagtgtatttctaaagaaaatcctgacatgcacacccattaaaaatagtacattttacagtg

SEQ ID NO: 378574 - DNA, 2192 bp, Homo sapiens
tcttcctgctgccccttcatggggctgggaaaacctaagacctgcttctcccaccctgaggcccctactgtgtaccaggcccgggtaaggtaccagtcacatactcgcacttaggcctcacagttcatcccattttatgcacaaggcgactcaaagactgagtctggcccagagaaggcctgcaggagctccgagccccgcctgggcgccgggagcaggggcggggtcgtccgggaccctttcccggaagggaggccgcaggggcctgcggggcggggcctgcggggcgaggcccggggcgcgtcccggaaccagagacggggcagcgctcgagttcctgcgcgggactgccaaggcacgaccacgggccggaaggctgccaggcccagtgggcaagcgaagaaatgaaccaccgcaacgcgggcgcttcggggcggggccgagtgcgaacctgagccccaaatcccgacccaggcaggggcggggcccggagcggggccttggaggcccagcccgcgcggcgacgtctccgcgtggcgtcacggcaccgactgacggccacccaccatggccgcagaccagcgcccgaaggccgacacgctggccctgaggcaacggctcatcagctcttcctgcagactcttttttcccgaggatcctgttaagattgtccgggcccaagggcagtacatgtacgatgaacagggggcagaatacatcgattgcatcagcaatgtggcgcacgttgggcactgccaccctctcgtggtccaagcagcacatgagcagaaccaggtgctcaacaccaacagccggtacctgcatgacaacatcgtggactatgcgcagaggctgtcagagaccctgccggagcagctctgtgtgttctatttcctgaattctgggtcagaagccaatgacctggccctgaggctggctcgccactacacgggacaccaggacgtggtggtattagatcatgcgtatcacggccacctgagctccctgattgacatcagtccctacaagttccgcaacctggatggccagaaggagtgggtccacgtggtatgcactgcccaactcaacaacagattgcagccttcttcgctgagtctctgcccagtgtgggagggcagatcattccccctgctggctacttctcccaagtggcagagcacatccgcaaggccggaggggtctttgttgcagatgagatccaggttggctttggccgggtaggcaagcacttctgggccttccagctccagggaaaagacttcgtccctgacatcgtcaccatgggcaagtccattggcaacggccaccctgttgcctgcgtggccgcaacccagcctgtggcgagggcatttgaagccaccggcgttgagtacttcaacacgtttgggggcagcccagtgtcctgcgctgtggggctggccgtcctgaatgtcttggagaaggagcagctccaggatcatgccaccagtgtaggcagcttcctgatgcagctcctcgggcagcaaaaaatcaaacatcccatcgtcggggatgtcaggggtgttgggctcttcattggtgtggatctgatcaaagatgaggccacaaggacaccagcaactgaagaggctgcctacttggtatcaaggctgaaggagaactacgttttgctgagcactgatggccctgggaggaacatcctgaagtttaagcccccaatgtgcttcagcctggacaatgcacggcaggtggtggcaaagctggatgccattctgactgacatggaagagaaggtgagaagttgtgaaacgctgaggctccagccctaagccagccctgctctgcctaagtgtactccagaagaaactcatctcatccaaatacacgctattgagaaggcgagcctgacctccctcttacagataaagtcagctttcagaggctcagggtgggggggcctgcccgaggccataatgctacccaccccctcctcctaaccactggtctgttggaataacccagatgtctgcatcccctcaagtcagtcaatttcctttctgtccactgggggtggaatggggtagggtgggatactttaaagtgctcctgcttaaataaattagaccagaccagtgtatttctaaagaaaatcctgacatgcacacccattaaaaatagtacattttacagtg

SEQ ID NO: 378575 - DNA, 1700 bp, Homo sapiens
atccttgggcagtactgactgatgggttgagggaggaggcgtggatcaaaaatggggggcagggaaggaactggcttatggtggaaaaatcagtgcatgtagttggggcatgccaagtactaggggcctggaggcatccaggtagtaagagttggctggaggcctgagagaaaactgagtcacaaaccttcagatgtaacatggaacccaaagtaggggtgcagcactgatggtgacttgtcttgcttggactaagccagcactagcagggcacgctaagccggtcactgcacaaccccatggtcgtgttcccaatgtccatctcttcacagattgcagccttcttcgctgagtctctgcccagtgtgggagggcagatcattccccctgctggctacttctcccaagtggcagagtgagtaggtgggcggggtctgctctagggagggcaggggtctaatgaggttttccaacctctggtccaaatcccaacctcagcctgtcctgactgccagaattttgagacaaagcccttaaagaaagaatggcccagagaaggccagccattgcccaaggtccccaccttactgctggcagagccagggtgcaaagccccgagacctcctgggtcctgatcttatcctctcaaccacagcccccgtgtcagtcatctcctctgccacaggcacatccgcaaggccggaggggtctttgttgcagatgagatccaggttggctttggccgggtaggcaagcacttctgggccttccagctccagggaaaagacttcgtccctgacatcgtcaccatgggcaagtccattggcaacggccaccctgttgcctgcgtggccgcaacccagcctgtggcgagggcatttgaagccaccggcgttgagtacttcaacacgtttgggggcagcccagtgtcctgcgctgtggggctggccgtcctgaatgtcttggagaaggagcagctccaggatcatgccaccagtgtaggcagcttcctgatgcagctcctcgggcagcaaaaaatcaaacatcccatcgtcggggatgtcaggggtgttgggctcttcattggtgtggatctgatcaaagatgaggccacaaggacaccagcaactgaagaggctgcctacttggtatcaaggctgaaggagaactacgttttgctgagcactgatggccctgggaggaacatcctgaagtttaagcccccaatgtgcttcagcctggacaatgcacggcaggtggtggcaaagctggatgccattctgactgacatggaagagaaggtgagaagttgtgaaacgctgaggctccagccctaagccagccctgctctgcctaagtgtactccagaagaaactcatctcatccaaatacacgctattgagaaggcgagcctgacctccctcttacagataaagtcagctttcagaggctcagggtgggggggcctgcccgaggccataatgctacccaccccctcctcctaaccactggtctgttggaataacccagatgtctgcatcccctcaagtcagtcaatttcctttctgtccactgggggtggaatggggtagggtgggatactttaaagtgctcctgcttaaataaattagaccagaccagtgtatttctaaagaaaatcctgacatgcacacccattaaaaatagtacattttacagtg

SEQ ID NO: 378576 - DNA, 2152 bp, Homo sapiens
tcttcctgctgccccttcatggggctgggaaaacctaagacctgcttctcccaccctgaggcccctactgtgtaccaggcccgggtaaggtaccagtcacatactcgcacttaggcctcacagttcatcccattttatgcacaaggcgactcaaagactgagtctggcccagagaaggcctgcaggagctccgagccccgcctgggcgccgggagcaggggcggggtcgtccgggaccctttcccggaagggaggccgcaggggcctgcggggcggggcctgcggggcgaggcccggggcgcgtcccggaaccagagacggggcagcgctcgagttcctgcgcgggactgccaaggcacgaccacgggccggaaggctgccaggcccagtgggcaagcgaagaaatgaaccaccgcaacgcgggcgcttcggggcggggccgagtgcgaacctgagccccaaatcccgacccaggcaggggcggggcccggagcggggccttggaggcccagcccgcgcggcgacgtctccgcgtggcgtcacggcaccgactgacggccacccaccatggccgcagaccagcgcccgaaggccgacacgctggccctgaggcaacggctcatcagctcttcctgcagactcttttttcccgaggatcctgttaagattgtccgggcccaagggcagtacatgtacgatgaacagggggcagaatacatcgattgcatcagcaatgtggcgcacgttgggcactgccaccctctcgtggtccaagcagcacatgagcagaaccaggtgctcaacaccaacagccggtacctgcatgacaacatcgtggactatgcgcagaggctgtcagagaccctgccggagcagctctgtgtgttctatttcctgaattctgggtcagaagccaatgacctggccctgaggctggctcgccactacacgggacaccaggacgtggtggtattagatcatgcgtatcacggccacctgagctccctgattgacatcagtccctacaagttccgcaacctggatggccagaaggagtgggtccacgtggcacctctcccagacacctaccggggcccctaccgggaggaccaccccaacccagctatggcctatgccaacgaggtgaaacgtgtggtcagcagtgcacaggagaagggcaggaagattgcagccttcttcgctgagtctctgcccagtgtgggagggcagatcattccccctgctggctacttctcccaagtggcagagcacatccgcaaggccggaggggtctttgttgcagatgagatccaggttggctttggccgggtaggcaagcacttctgggccttccagctccagggaaaagacttcgtccctgacatcgtcaccatgggcaagtccattggcaacggccaccctgttgcctgcgtggccgcaacccagcctgtggcgagggcatttgaagccaccggcgttgagtacttcaacacgtttgggggcagcccagtgtcctgcgctgtggggctggccgtcctgaatgtcttggagaaggagcagctccaggatcatgccaccagtgtaggcagcttcctgatgcagctcctcgggcagcaaaaaatcaaacatcccatcgtcggggatgtcaggggtgttgggctcttcattggtgtggatctgatcaaagatgaggccacaaggacaccagcaactgaagaggctgcctacttggtatcaagacatggaagagaaggtgagaagttgtgaaacgctgaggctccagccctaagccagccctgctctgcctaagtgtactccagaagaaactcatctcatccaaatacacgctattgagaaggcgagcctgacctccctcttacagataaagtcagctttcagaggctcagggtgggggggcctgcccgaggccataatgctacccaccccctcctcctaaccactggtctgttggaataacccagatgtctgcatcccctcaagtcagtcaatttcctttctgtccactgggggtggaatggggtagggtgggatactttaaagtgctcctgcttaaataaattagaccagaccagtgtatttctaaagaaaatcctgacatgcacacccattaaaaatagtacattttacagtg

SEQ ID NO: 378577 - DNA, 4259 bp, Homo sapiens
  misc_feature (674)..(674): n is a, c, g, or t
tcttcctgctgccccttcatggggctgggaaaacctaagacctgcttctcccaccctgaggcccctactgtgtaccaggcccgggtaaggtaccagtcacatactcgcacttaggcctcacagttcatcccattttatgcacaaggcgactcaaagactgagtctggcccagagaaggcctgcaggagctccgagccccgcctgggcgccgggagcaggggcggggtcgtccgggaccctttcccggaagggaggccgcaggggcctgcggggcggggcctgcggggcgaggcccggggcgcgtcccggaaccagagacggggcagcgctcgagttcctgcgcgggactgccaaggcacgaccacgggccggaaggctgccaggcccagtgggcaagcgaagaaatgaaccaccgcaacgcgggcgcttcggggcggggccgagtgcgaacctgagccccaaatcccgacccaggcaggggcggggcccggagcggggccttggaggcccagcccgcgcggcgacgtctccgcgtggcgtcacggcaccgactgacggccacccaccatggccgcagaccagcgcccgaaggccgacacgctggccctgaggcaacggctcatcaggtacccgggcggggggcgggcggcggggggcgcggggctgcgcggagnggcacgcgcacgcacgacgcacgcacgcacgcactacgcacgcgcctccggctaggaagccgctgctacccatcccgtccggccgctgccccggccccgctggagcttctagggcccgaggcgggcggcgccgttgggcagtcccggcgggtggtctccggggccgcctccccgacagcgccgtctccaggccgcccagttcaggagacggccccgccctcaccgctgttcggctgtgtcagcctcgcttggcagcctttactccggagaagaccttcaccctggcgcctgagaggacctcacccagggtggcccgtcagcagcacctgggcctggctcgagagtgacctgggagggggctgaaagggcagacaagggagagtcgggggagtcggttcacaggcagcacacttgacctgtgagggggccctcggtgggacggtgggtgaggtcgcctcccactggagcttagggctggcacccagcgaggggcagcaggaccacgtggctggcaaggagctgtttagggctgagagccaggcacctaatgttggtgccctgtcccatcccatcgaagacacgcggccttatggagtccccatgggacggggcagccaccttttctcaggatccgggagactgacgcggacacatgcagaaatgagcaaggaggccacagaggctgaaaatgctttcagaaacaatccgaagtttcagcgacttgttaccccatctgcttcctgctttgcaaccacctgtggagtggagagacaaggcagggaagcagcaccttgcccttccagctctcatttcccccccgccaccagaaactgggaaggggtgggcgggggtctgcgatgagtagacttcaccctttcggtcttcagacatggctgtccactccttgcctgtccccacagctcttcctgcagactcttttttcccgaggatcctgttaagattgtccgggcccaagggcagtacatgtacgatgaacagggggcagaatacatcgattgcatcagcaatgtggcgcacgttgggcactgccaccctctcgtggtccaagcagcacatgagcagaaccaggtgctcaacaccaacagccggtacctgcatgacaacatcgtggactatgcgcagaggctgtcagagaccctgccggagcagctctgtgtgttctatttcctgaattctgggtaagtggactgtggccagcccccgggaagagggtgagacggtaacaaagacagtcactcacatgggcccagtgtagtgtagctgaccgagtgtggactcggagaggcagcccccactgcaccaggctcctgagattcccggctgtaggccctgatgctttctctgttggatccagtttccttgtctcttattgaaggatgttattacctcctttctaggatcattgctggagcttagtgaggtaatatgttcctttatttctgccttaaggatacagccaaaatccctgcctgtgggttgctcagtaaggaaggaaaacatcaagtgattcttcaaagaaatacagaattgcaaggagggctctggaggaagtgtacagggtatcatgaggcctagaaaaagtgaggggacctgacctgggggttcagggaaaccttccctgaggaagggctgttaagctcagagctgactaggagataactagaagaggaggaaggaagggtgctgccactgcatcagaagtctcgtcaaggctgggcacgatggctcatgcctgtaatcccagcacttcgggagatcgaggtgggcggatcacctgaggtcgggagtttgagaccagcccggccaacagggcgaaaccccgtctctactaaaaatacacaaaatttagctgggcgtggtggtgggtgcctgtaatcccaactactcaggaggctggggcaggagaatcgcttgaaccgggaggcggaggttgcagtgagccaaaattgcaccactgcactgcagtctgcaggacagagagaggctctatctcaaaaaaaaaaaaaaaaaaatagtctcatcaaaactcttgtcaaggttggtcaccacacagaactgcctgtggaaaggccctgtagcaggaaaggatatggtacccagcacacttgaggaaccgaaagaagtccacgaagggaaagcagaggctgtgagctgttgggaggcaagcagggcgcatcacctagggccttctccgccaagtggggaagctgtctttatcctaagagcattgggaaactatcggaggctttaatcaggaaacgatgtcttaaagggaacggagtgcaagagtggacactgttaggtgccagttcagtggccaggtgaaaggtcatggtagctcacactaggatcggcagtggagacaaacaggcaggcgattacagtgtatctgggagagaacattccaacaaatcgtaggtggtggcgttgaattatagtgatgattactgtggccactcacacagtacagacatctgccccccagataatttctaggaagtggaattcaccatcttcattttacaggtggggtaacagcagttcaaagaaaggaacttgagcccagacatttgccatgtcaagagctggagcctctggaaagagaagggagctggtgcttcctcagtggtggtggaggaggggcattcttatgccaccagctttattctgtgtggattccagggacttccatgttgccaaatccaaagcaatctctttgctgcattgtcttactctgtcccagcagtaattgacagttaccactctccggaagtggtctgtcatcttgcttcccgggcactgtgctctcctgttttctatcagcttctctagccactccttccctgtcttctttgctgattcctcctctgttccttggggctgatcctgggccacttttctctctgagccctctcctcaggtgatctcttccattctcttggtattacatagcatccatgtgttggtgactcacaaatttttttgagcccagacatgtcccatgtgttccaactcgaggttctaactgcccctgtgacatctgacaaacatctccagcttcatgtgttcaaaagggcaagggttgattggaccatggtactgttctccctcacctgcccaagaaggctatccccactcacccccgctcatcttgccttgtaaagggcatcaccacctatatctgctccaggcagaaaccacacgctccccagtcctgcatcaatcctgcctcctccatctccatgatgcctcttaactccctccacctctccatctccatggccaccacctgcttagaaggaatgctgctgtcatgaagcttccataaaaaccaaggggactggattcagagagcttccagataactgaacatacagaggttctagaagggtggtgcgcccagggagggcacaggaagctccatgcccttccttcatacctcaccctatgcatctctttatctgtatcttttataatatcctttataataaaccagtaaatgtatttcccttagttttgtgagccaactccagcccgggcaacagagtgagactgtctcaaaaa

SEQ ID NO: 378578 - DNA, 2358 bp, Homo sapiens
tcttcctgctgccccttcatggggctgggaaaacctaagacctgcttctcccaccctgaggcccctactgtgtaccaggcccgggtaaggtaccagtcacatactcgcacttaggcctcacagttcatcccattttatgcacaaggcgactcaaagactgagtctggcccagagaaggcctgcaggagctccgagccccgcctgggcgccgggagcaggggcggggtcgtccgggaccctttcccggaagggaggccgcaggggcctgcggggcggggcctgcggggcgaggcccggggcgcgtcccggaaccagagacggggcagcgctcgagttcctgcgcgggactgccaaggcacgaccacgggccggaaggctgccaggcccagtgggcaagcgaagaaatgaaccaccgcaacgcgggcgcttcggggcggggccgagtgcgaacctgagccccaaatcccgacccaggcaggggcggggcccggagcggggccttggaggcccagcccgcgcggcgacgtctccgcgtggcgtcacggcaccgactgacggccacccaccatggccgcagaccagcgcccgaaggccgacacgctggccctgaggcaacggctcatcagctcttcctgcagactcttttttcccgaggatcctgttaagattgtccgggcccaagggcagtacatgtacgatgaacagggggcagaatacatcgattgcatcagcaatgtggcgcacgttgggcactgccaccctctcgtggtccaagcagcacatgagcagaaccaggtgctcaacaccaacagccggtacctgcatgacaacatcgtggactatgcgcagaggctgtcagagaccctgccggagcagctctgtgtgttctatttcctgaattctgggtcagaagccaatgacctggccctgaggctggctcgccactacacgggacaccaggacgtggtggtattagatcatgcgtatcacggccacctgagctccctgattgacatcagtccctacaagttccgcaacctggatggccagaaggagtgggtccacgtggcacctctcccagacacctaccggggcccctaccgggaggaccaccccaacccagctatggcctatgccaacgaggtgaaacgtgtggtcagcagtgcacaggagaagggcaggaagattgcagccttcttcgctgagtctctgcccagtgtgggagggcagatcattccccctgctggctacttctcccaagtggcagagcacatccgcaaggccggaggggtctttgttgcagatgagatccaggttggctttggccgggtaggcaagcacttctgggccttccagctccagggaaaagacttcgtccctgacatcgtcaccatgggcaagtccattggcaacggccaccctgttgcctgcgtggccgcaacccagcctgtggcgagggcatttgaagccaccggcgttgagtacttcaacacgtttgggggcagcccagtgtcctgcgctgtggggctggccgtcctgaatgtcttggagaaggagcagctccaggatcatgccaccagtgtaggcagcttcctgatgcagctcctcgggcagcaaaaaatcaaacatcccatcgtcggggatgtcaggggtgttgggctcttcattggtgtggatctgatcaaagatgaggccacaaggacaccagcaactgaagaggctgcctacttggtatcaaggctgaaggagaactacgttttgctgagcactgatggccctgggaggaacatcctgaagtttaagcccccaatgtgcttcagcctggacaatgcacggcaggtggtggcaaagctggatgccattctgactgacatggaagagaaggtgagaagttgtgaaacgctgaggctccagccctaagccagccctgctctgcctaagtgtactccaggtgagtgggccttgcttcttactcttgaagatgcacagcgggttccttaccatcagcagcaagcagcctcggcaagctgagcctttttttaagacttttttttgttctgactgatgctccttcccaaaggttagtttcttcaacactggaaattctccaatgcttagcttgcacttgatggcaggaacagctatatcctcccttgaaacctatggggctgtatccacgtggaaccccaacccacccttgcctcttgtaaccacctagtcttatgccctaaataccagacctggagttgggctccaatccagccaataaacatcccctgccagagcaggcttttcttcaccagccaggaggagcactattgtgccccaattcagacggccctggcactgccctagtgt

SEQ ID NO: 378579 - DNA, 875 bp, Homo sapiens
ataaggatccccgtgagatgacagtcggccaggcaggggtcagcaatctaggtctgtgagtctagttccacttgggactgatgatgagctcacaaagtggcagatggcccagctgtgaccagcaacgtagcacagtgctggccaagtgctggggtcatggcagtgcttcagccccattggccatctcaggtgctaggcaagggagctgaagtaggaattcagtcatcttgatgaggctgccagagctgatggaaagaaagggagtctgagactcagcaggcacatggaagatgaataaagttgaggttaaaaaaaaaaaaaaagcagagactctagtcttagactgcttgggctcaaatccctgtcccctacttactaacttgtgatctcgggcaagttacttaattctcagtgcctcagtttgcttatctgtgaaagacataatgatactaggtacccactttaaggtgtttggagaattaagtgtgttaatttatgtagcttgctctgaatgtgcctggcacatggtgagctctcagtacatattcactgttattatccttggcctttgacaatcaagattaccaccagcccccttggctggtgaagtgaaaccagttgacagtcaccccccaccccacctttgtcatacaagcctcaaaaggccttccagcctgggcaacataatgagaccttgtctctaccaaaaaaaaacttaaaaattagccaggcatggtgactggtgtctatagccccacctgctcaggaggctgaggtgggaggaccacttgagcccaggagtgtgaggatgcagtgaatgccatgatcacaccatacactccagcctgggtgacagagtaaggccctgttaaaaa

SEQ ID NO: 378580 - DNA, 2323 bp, Homo sapiens
cgcaggagctaggatggaggaaatcctgccctttggggtggcagggttactgtggcaactcaggcagaagccaaggggctgctgttctggtgtataagggccctgggcccaaccctgcatctgagagacccaagcagaggatcagagaccaggatgctaactttacttggggcaaacaaggcagctcactcactcagtcactctctgatcactcccactctccttggcagcttagcctttaaaaagatgcagttcaggctttggagtcagaggggcctgggatggaaggggataaatgcctggcacagctctgccctacccacccttctgcctacctgctcacaggtgtaccagactcaggacatccacaaagccaagacacccatcacatcccctcccccagagtgtaacacaaatgctctctctgccctgggcacccaagccattccaaggggcagcagcaggcaacagcctcaagcatacagccctgacccagagccgttcctattcctgttcgtccccaacctcacacaatctgcccacccctgctgcacagcaccagagggagccccaagacaggcttggaaggctccatgtaggcagggaaacaggacctatcttcatccacgttccactcacctccacctccaccaccacctccgctgcctcggttccctcggttgcggtttccacggcccccagagccatactgctgctgctgatagacttctttgggctgggccaccttgatctcacactaaaagtcaagaggacagtggtcaggccagtaggacaaactcagggcagtgactgcccaaacaccttcactgcgacaaacatcaaatggtggatcaggtccatttgctgagaaacaaaatatgctagtatgggaggccacctttgggctaaagctcatggaatcccaactaaaaccaaaggccttccagcagagaacccttccgacagaatgcacttgagatgggcatctcagccccagagcaactccgtatctaatggaggcaggcaactgggccaactgcagcccaggggagcagaggacaggctgggaccaggcaccacaccttggtcctgctgggctagagggtcagacaagacttctcagatgaggggccttagacaatgaggttttaacatctttttctctttacagaagaaactcatctcatccaaatacacgctattgagaaggcgagcctgacctccctcttacagataaagtcagctttcagaggctcagggtgggggggcctgcccgaggccataatgctacccaccccctcctcctaaccactggtctgttggaataacccagatgtctgcatcccctcaagtcagtcaatttcctttctgtccactgggggtggaatggggtagggtgggatactttaaagtgctcctgcttaaataaattagaccagaccagtgtatttctaaagaaaatcctgacatgcacacccattaaaaatagtacattttacagtgtcccagtcatacttttaattggcaaattaaaataatgcaatctgatatattctatcctactaaattaaaaatactgaatataaccaactaaatatacttactcctaagactcactaccagtagtttcacttaaactctgccttagaggctcttcccacccatttcccattatggcacatagagaaaaaggcctctatcactgtccactggagtaataaccactgcttcccctaactgcctcaaagactgtcattttatagttccaggagttccacctgtcccaccttatctggctgccaactcctgctcagaaacagaacctgccacaccctgccactgcaggccgcaccctcaactcccaactgccaacttgaagcctgaactaccctttccctgaccagagttcaggaggggaagagctacacctccctgcacatgaatccactcatttgaaagcacaactgaccctggatttaagctggccaggaccctgggagatctttggaaggatttttgcctgggtttagggttaacttaaagaggtgcccagaagaccaagtgaggcagttcatgcctgtaatcccaacactttaaaaggccaaggcagaggatggcttgagcccaggcaacatggtgagaccaggctttaaaaaaacatatgagccaggcatggtggtacatgcctgtggtcccagctactcgagaggctgagatgggaggatccggtccgcccatgaggtcaaggttgcagtgagccatgattgtgttaccgcaccccagcctggacaacaaagcaagactctgtctcaaagcaaaaaaa

SEQ ID NO: 378581 - DNA, 884 bp, Homo sapiens
ctgctgaagcggctttccttctgccagaatctcaggaactcctggatctgcctttccagaaccagcttctctctccctgctctgccttcagactgccctctttctacctctccctctagaactacatctcttctggctgggtttatagcttggggctgggggaggcccagtgggactggctgagtggagccagccgtgtgacggaggcggccctcttccagttgggcactgccaccctctcgtggtccaagcagcacatgagcagaaccaggtgctcaacaccaacagccggtacctgcatgacaacatcgtggactatgcgcagaggctgtcagagaccctgccggagcagctctgtgtgttctatttcctgaattctgggggtgttgggctcttcattggtgtggatctgatcaaagatgaggccacaaggacaccagcaactgaagaggctgcctacttggtatcaagacatggaagagaaggtgagaagttgtgaaacgctgaggctccagccctaagccagccctgctctgcctaagtgtactccagaagaaactcatctcatccaaatacacgctattgagaaggcgagcctgacctccctcttacagataaagtcagctttcagaggctcagggtgggggggcctgcccgaggccataatgctacccaccccctcctcctaaccactggtctgttggaataacccagatgtctgcatcccctcaagtcagtcaatttcctttctgtccactgggggtggaatggggtagggtgggatactttaaagtgctcctgcttaaataaattagaccagaccagtgtatttctaaagaaaatcctgacatgcacacccattaaaaatagtacattttacagtg

SEQ ID NO: 378582 - DNA, 1661 bp, Homo sapiens
taatttcagtcgctgaggccctggcgctttcttgtcaaggttggtcaccacacagaactgcctgtggaaaggccctgtagcaggaaaggatatggtacccagcacacttgaggaaccgaaagaagtccacgaagggaaagcagaggctgtgagctgttgggaggcaagcagggcgcatcacctagggccttctccgccaagtggggaagctgtctttatcctaagagcattgggaaactatcggaggctttaatcaggaaacgatgtcttaaagggaacggagtgcaagagtggacactgttaggtgccagttcagtggccaggtgaaaggtcatggtagctcacactaggatcggcagtggagacaaacaggcaggcgattacagtgtatctgggagagaacattccaacaaatcgtaggtggtggcgttgaattatagtgatgattactgtggccactcacacagtacagacatctgccccccagataatttctaggaagtggaattcaccatcttcattttacaggtggggtaacagcagttcaaagaaaggaacttgagcccagacatttgccatgtcaagagctggagcctctggaaagagaagggagctggtgcttcctcagtggtggtggaggaggggcattcttatgccaccagctttattctgtgtggattccagggacttccatgttgccaaatccaaagcaatctctttgctgcattgtcttactctgtcccagcagtaattgacagttaccactctccggaagtggtctgtcatcttgcttcccgggcactgtgctctcctgttttctatcagcttctctagccactccttccctgtcttctttgctgattcctcctctgttccttggggctgatcctgggccacttttctctctgagccctctcctcaggtgatctcttccattctcttggtattacatagcatccatgtgttggtgactcacaaatttttttgagcccagacatgtcccatgtgttccaactcgaggttctaactgcccctgtgacatctgacaaacatctccagcttcatgtgttcaaaagggcaagggttgattggaccatggtactgttctccctcacctgcccaagaaggctatccccactcacccccgctcatcttgccttgtaaagggcatcaccacctatatctgctccaggcagaaaccacacgctccccagtcctgcatcaatcctgcctcctccatctccatgatgcctcttaactccctccacctctccatctccatggccaccacctgctctcacctggcgtcctcctccttggtcttctccttctacttttattcttgtcaactccattagacacagccagaggccacctcctaaaataggagctgacttatgtcccttttctcattaaaactcttcagtggcttcacatggcactgagaagaaaactcaggctccttcccagccctgtgcacatgtcccctgcatgtctccccacttcctctcctaccctgccctccttaggccctggcctccctcatcttctcctggttcccggagcacactgagctcttttccttcacaaggccttggagcatgctgctccatctgcctggaaacctctccctcaagactcagtacatgagtcacctcccc

SEQ ID NO: 378583 - DNA, 2501 bp, Homo sapiens
  misc_feature (674)..(674): n is a, c, g, or t
tcttcctgctgccccttcatggggctgggaaaacctaagacctgcttctcccaccctgaggcccctactgtgtaccaggcccgggtaaggtaccagtcacatactcgcacttaggcctcacagttcatcccattttatgcacaaggcgactcaaagactgagtctggcccagagaaggcctgcaggagctccgagccccgcctgggcgccgggagcaggggcggggtcgtccgggaccctttcccggaagggaggccgcaggggcctgcggggcggggcctgcggggcgaggcccggggcgcgtcccggaaccagagacggggcagcgctcgagttcctgcgcgggactgccaaggcacgaccacgggccggaaggctgccaggcccagtgggcaagcgaagaaatgaaccaccgcaacgcgggcgcttcggggcggggccgagtgcgaacctgagccccaaatcccgacccaggcaggggcggggcccggagcggggccttggaggcccagcccgcgcggcgacgtctccgcgtggcgtcacggcaccgactgacggccacccaccatggccgcagaccagcgcccgaaggccgacacgctggccctgaggcaacggctcatcaggtacccgggcggggggcgggcggcggggggcgcggggctgcgcggagnggcacgcgcacgcacgacgcacgcacgcacgcactacgcacgcgcctccggctaggaagccgctgctacccatcccgtccggccgctgccccggccccgctggagcttctagggcccgaggcgggcggcgccgttgggcagtcccggcgggtggtctccggggccgcctccccgacagcgccgtctccaggccgcccagttcaggagacggccccgccctcaccgctgttcggctgtgtcagcctcgcttggcagcctttactccggagaagaccttcaccctggcgcctgagaggacctcacccagggtggcccgtcagcagcacctgggcctggctcgagagtgacctgggagggggctgaaagggcagacaagggagagtcgggggagtcggttcacaggcagcacacttgacctgtgagggggccctcggtgggacggtgggtgaggtcgcctcccactggagcttagggctggcacccagcgaggggcagcaggaccacgtggctggcaaggagctgtttagggctgagagccaggcacctaatgttggtgccctgtcccatcccatcgaagacacgcggccttatggagtccccatgggacggggcagccaccttttctcaggatccgggagactgacgcggacacatgcagaaatgagcaaggaggccacagaggctgaaaatgctttcagaaacaatccgaagtttcagcgacttgttaccccatctgcttcctgctttgcaaccacctgtggagtggagagacaaggcagggaagcagcaccttgcccttccagctctcatttcccccccgccaccagaaactgggaaggggtgggcgggggtctgcgatgagtagacttcaccctttcggtcttcagacatggctgtccactccttgcctgtccccacagctcttcctgcagactcttttttcccgaggatcctgttaagattgtccgggcccaagggcagtacatgtacgatgaacagggggcagaatacatcgattgcatcagcaatgtggcgcacgttgggcactgccaccctctcgtggtccaagcagcacatgagcagaaccaggtgctcaacaccaacagccggtacctgcatgacaacatcgtggactatgcgcagaggctgtcagagaccctgccggagcagctctgtgtgttctatttcctgaattctgggtcagaagccaatgacctggccctgaggctggctcgccactacacgggacaccaggacgtggtggtattagatcagtaagtgcaactcacagccctaccgttcccagaagcctggcccacaggcttcttggtgatccgtgagactgactctgggtgccttaggcagggaggataaggggcctgggctactgaagacaagtgtggcaggcagaggaccaggcctgagacctcccagaggctctgtcaccctgggccaccattctgggaaggcagctctggggagcagagtgcgctttgtaagagactcaaaggtggtcccacaacattgtacatgttcaaactactccagcagtagctcccatgaattgagtatgtgatgtgcacaaagccggggctgacaatatcaacacatttaagattcattataaaccagaaggaggaaatcccacctcatttcacagcagagaaaacaaccgagagagattaaatgatgagctgctgtcacatagccagtcagcagtcttgcaagaattgttgctgactccaaagcttgtgctctttcccagcccaagaacttgggggctctgtcaggaaagttggcctcccttgtgtgtcttcaggggtgggg

SEQ ID NO: 378584 - DNA, 646 bp, Homo sapiens
aaccactcaaaacacacaactacatggatattgaacaacgtgctcctgagtgacttctgggtaaataataaaattaaggcagaaatcaagaagctctttggaaccaatgagaacaaagagacaatgtaccagaatctctgggaggcaactaaagcagtgttaagaggtaaatttatagcactaaatgcccacatcataaaagagcacgttacccacattcacccccgctcatcttgccttgtaaagggcatcaccacctatatctgctccaggcagaaaccacacgctccccagtcctgcatcaatcctgcctcctccatctccatgatgcctcttaactccctccacctctccatctccatggccaccacctgcttagaaggaatgctgctgtcatgaagcttccataaaaaccaaggggactggattcagagagcttccagataactgaacatacagaggttctagaagggtggtgcgcccagggagggcacaggaagctccatgcccttccttcatacctcaccctatgcatctctttatctgtatcttttataatatcctttataataaaccagtaaatgtatttcccttagttttgtgagccaactccagcccgggcaacagagtgagactgtctcaaaaa

SEQ ID NO: 378585 - DNA, 412 bp, Homo sapiens
cccaatctctaaactgtcctccagtttggacactgaagtcaacagggcatcttcagcagagaaaggtgactgagtcggcattgctttgtggtctttttcagacatggaagagaaggtgagaagttgtgaaacgctgaggctccagccctaagccagccctgctctgcctaagtgtactccaggtgagtgggccttgcttcttactcttgaagatgcacagcgggttccttaccatcagcagcaagcagcctcggcaagctgagcctttttttaagacttttttttgttctgactgatgctccttcccaaaggttagtttcttcaacactggaaattctccaatgcttagcttgcacttgatggcaggaacagctatatcctcccttgaaacctatggggctgtatccacgtg

SEQ ID NO: 378586 - DNA, 468 bp, Homo sapiens
taaaaatactgaatataaccaactaaatatacttactcctaagactcactaccagtagtttcacttaaactctgccttagaggctcttcccacccatttcccattatggcacatagagaaaaaggcctctatcactgtccactggagtaataaccactgcttcccctaactgcctcaaagactgtcattttatagaaaatttaagactatcctaatccactctttccaaactcccagccaggatagagacttccaggagttccacctgtcccaccttatctggctgccaactcctgctcagaaacagaacctgccacaccctgccactgcaggccgcaccctcaactcccaactgccaacttgaagcctgaactaccctttccctgaccagagttcaggaggggaagagctacacctccctgcacatgaatccactcatttgaaagcacaactgaccctggatttaag

SEQ ID NO: 378587 - DNA, 1866 bp, Homo sapiens
tcttcctgctgccccttcatggggctgggaaaacctaagacctgcttctcccaccctgaggcccctactgtgtaccaggcccgggtaaggtaccagtcacatactcgcacttaggcctcacagttcatcccattttatgcacaaggcgactcaaagactgagtctggcccagagaaggcctgcaggagctccgagccccgcctgggcgccgggagcaggggcggggtcgtccgggaccctttcccggaagggaggccgcaggggcctgcggggcggggcctgcggggcgaggcccggggcgcgtcccggaaccagagacggggcagcgctcgagttcctgcgcgggactgccaaggcacgaccacgggccggaaggctgccaggcccagtgggcaagcgaagaaatgaaccaccgcaacgcgggcgcttcggggcggggccgagtgcgaacctgagccccaaatcccgacccaggcaggggcggggcccggagcggggccttggaggcccagcccgcgcggcgacgtctccgcgtggcgtcacggcaccgactgacggccacccaccatggccgcagaccagcgcccgaaggccgacacgctggccctgaggcaacggctcatcagctcttcctgcagactcttttttcccgaggatcctgttaagattgtccgggcccaagggcagtacatgtacgatgaacagggggcagaatacatcgattgcatcagcaatgtggcgcacgtgcgtatcacggccacctgagctccctgattgacatcagtccctacaagttccgcaacctggatggccagaaggagtgggtccacgtggtatgcactgcccaactcaacaacagattgcagccttcttcgctgagtctctgcccagtgtgggagggcagatcattccccctgctggctacttctcccaagtggcagacagggaaaagacttcgtccctgacatcgtcaccatgggcaagtccattggcaacggccaccctgttgcctgcgtggccgcaacccagcctgtggcgagggcatttgaagccaccggcgttgagtacttcaacacgtttgggggcagcccagtgtcctgcgctgtggggctggccgtcctgaatgtcttggagaaggagcagctccaggatcatgccaccagtgtaggcagcttcctgatgcagctcctcgggcagcaaaaaatcaaacatcccatcgtcggggatgtcaggggtgttgggctcttcattggtgtggatctgatcaaagatgaggccacaaggacaccagcaactgaagaggctgcctacttggtatcaaggctgaaggagaactacgttttgctgagcactgatggccctgggaggaacatcctgaagtttaagcccccaatgtgcttcagcctggacaatgcacggcaggtggtggcaaagctggatgccattctgactgacatggaagagaaggtgagaagttgtgaaacgctgaggctccagccctaagccagccctgctctgcctaagtgtactccagaagaaactcatctcatccaaatacacgctattgagaaggcgagcctgacctccctcttacagataaagtcagctttcagaggctcagggtgggggggcctgcccgaggccataatgctacccaccccctcctcctaaccactggtctgttggaataacccagatgtctgcatcccctcaagtcagtcaatttcctttctgtccactgggggtggaatggggtagggtgggatactttaaagtgctcctgcttaaataaattagaccagaccagtgtatttctaaagaaaatcctgacatgcacacccattaaaaatagtacattttacagtg

SEQ ID NO: 378588 - DNA, 3251 bp, Homo sapiens
  misc_feature (674)..(674): n is a, c, g, or t
tcttcctgctgccccttcatggggctgggaaaacctaagacctgcttctcccaccctgaggcccctactgtgtaccaggcccgggtaaggtaccagtcacatactcgcacttaggcctcacagttcatcccattttatgcacaaggcgactcaaagactgagtctggcccagagaaggcctgcaggagctccgagccccgcctgggcgccgggagcaggggcggggtcgtccgggaccctttcccggaagggaggccgcaggggcctgcggggcggggcctgcggggcgaggcccggggcgcgtcccggaaccagagacggggcagcgctcgagttcctgcgcgggactgccaaggcacgaccacgggccggaaggctgccaggcccagtgggcaagcgaagaaatgaaccaccgcaacgcgggcgcttcggggcggggccgagtgcgaacctgagccccaaatcccgacccaggcaggggcggggcccggagcggggccttggaggcccagcccgcgcggcgacgtctccgcgtggcgtcacggcaccgactgacggccacccaccatggccgcagaccagcgcccgaaggccgacacgctggccctgaggcaacggctcatcaggtacccgggcggggggcgggcggcggggggcgcggggctgcgcggagnggcacgcgcacgcacgacgcacgcacgcacgcactacgcacgcgcctccggctaggaagccgctgctacccatcccgtccggccgctgccccggccccgctggagcttctagggcccgaggcgggcggcgccgttgggcagtcccggcgggtggtctccggggccgcctccccgacagcgccgtctccaggccgcccagttcaggagacggccccgccctcaccgctgttcggctgtgtcagcctcgcttggcagcctttactccggagaagaccttcaccctggcgcctgagaggacctcacccagggtggcccgtcagcagcacctgggcctggctcgagagtgacctgggagggggctgaaagggcagacaagggagagtcgggggagtcggttcacaggcagcacacttgacctgtgagggggccctcggtgggacggtgggtgaggtcgcctcccactggagcttagggctggcacccagcgaggggcagcaggaccacgtggctggcaaggagctgtttagggctgagagccaggcacctaatgttggtgccctgtcccatcccatcgaagacacgcggccttatggagtccccatgggacggggcagccaccttttctcaggatccgggagactgacgcggacacatgcagaaatgagcaaggaggccacagaggctgaaaatgctttcagaaacaatccgaagtttcagcgacttgttaccccatctgcttcctgctttgcaaccacctgtggagtggagagacaaggcagggaagcagcaccttgcccttccagctctcatttcccccccgccaccagaaactgggaaggggtgggcgggggtctgcgatgagtagacttcaccctttcggtcttcagacatggctgtccactccttgcctgtccccacagctcttcctgcagactcttttttcccgaggatcctgttaagattgtccgggcccaagggcagtacatgtacgatgaacagggggcagaatacatcgattgcatcagcaatgtggcgcacgttgggcactgccaccctctcgtggtccaagcagcacatgagcagaaccaggtgctcaacaccaacagccggtacctgcatgacaacatcgtggactatgcgcagaggctgtcagagaccctgccggagcagctctgtgtgttctatttcctgaattctgggtcagaagccaatgacctggccctgaggctggctcgccactacacgggacaccaggacgtggtggtattagatcatgcgtatcacggccacctgagctccctgattgacatcagtccctacaagttccgcaacctggatggccagaaggagtgggtccacgtggcacctctcccagacacctaccggggcccctaccgggaggaccaccccaacccagctatggcctatgccaacgaggtgaaacgtgtggtcagcagtgcacaggagaagggcaggaagattgcagccttcttcgctgagtctctgcccagtgtgggagggcagatcattccccctgctggctacttctcccaagtggcagagcacatccgcaaggccggaggggtctttgttgcagatgagatccaggttggctttggccgggtaggcaagcacttctgggccttccagctccagggaaaagacttcgtccctgacatcgtcaccatgggcaagtccattggcaacggccaccctgttgcctgcgtggccgcaacccagcctgtggcgagggcatttgaagccaccggcgttgagtacttcaacacgtttgggggcagcccagtgtcctgcgctgtggggctggccgtcctgaatgtcttggagaaggagcagctccaggatcatgccaccagtgtaggcagcttcctgatgcagctcctcgggcagcaaaaaatcaaacatcccatcgtcggggatgtcaggggtgttgggctcttcattggtgtggatctgatcaaagatgaggccacaaggacaccagcaactgaagaggctgcctacttggtatcaaggctgaaggagaactacgttttgctgagcactgatggccctgggaggaacatcctgaagtttaagcccccaatgtgcttcagcctggacaatgcacggcaggtggtggcaaagctggatgccattctgactgacatggaagagaaggtgagaagttgtgaaacgctgaggctccagccctaagccagccctgctctgcctaagtgtactccagaagaaactcatctcatccaaatacacgctattgagaaggcgagcctgacctccctcttacagataaagtcagctttcagaggctcagggtgggggggcctgcccgaggccataatgctacccaccccctcctcctaaccactggtctgttggaataacccagatgtctgcatcccctcaagtcagtcaatttcctttctgtccactgggggtggaatggggtagggtgggatactttaaagtgctcctgcttaaataaattagaccagaccagtgtatttctaaagaaaatcctgacatgcacacccattaaaaatagtacattttacagtg

SEQ ID NO: 378589 - DNA, 3292 bp, Homo sapiens
  misc_feature (674)..(674): n is a, c, g, or t
tcttcctgctgccccttcatggggctgggaaaacctaagacctgcttctcccaccctgaggcccctactgtgtaccaggcccgggtaaggtaccagtcacatactcgcacttaggcctcacagttcatcccattttatgcacaaggcgactcaaagactgagtctggcccagagaaggcctgcaggagctccgagccccgcctgggcgccgggagcaggggcggggtcgtccgggaccctttcccggaagggaggccgcaggggcctgcggggcggggcctgcggggcgaggcccggggcgcgtcccggaaccagagacggggcagcgctcgagttcctgcgcgggactgccaaggcacgaccacgggccggaaggctgccaggcccagtgggcaagcgaagaaatgaaccaccgcaacgcgggcgcttcggggcggggccgagtgcgaacctgagccccaaatcccgacccaggcaggggcggggcccggagcggggccttggaggcccagcccgcgcggcgacgtctccgcgtggcgtcacggcaccgactgacggccacccaccatggccgcagaccagcgcccgaaggccgacacgctggccctgaggcaacggctcatcaggtacccgggcggggggcgggcggcggggggcgcggggctgcgcggagnggcacgcgcacgcacgacgcacgcacgcacgcactacgcacgcgcctccggctaggaagccgctgctacccatcccgtccggccgctgccccggccccgctggagcttctagggcccgaggcgggcggcgccgttgggcagtcccggcgggtggtctccggggccgcctccccgacagcgccgtctccaggccgcccagttcaggagacggccccgccctcaccgctgttcggctgtgtcagcctcgcttggcagcctttactccggagaagaccttcaccctggcgcctgagaggacctcacccagggtggcccgtcagcagcacctgggcctggctcgagagtgacctgggagggggctgaaagggcagacaagggagagtcgggggagtcggttcacaggcagcacacttgacctgtgagggggccctcggtgggacggtgggtgaggtcgcctcccactggagcttagggctggcacccagcgaggggcagcaggaccacgtggctggcaaggagctgtttagggctgagagccaggcacctaatgttggtgccctgtcccatcccatcgaagacacgcggccttatggagtccccatgggacggggcagccaccttttctcaggatccgggagactgacgcggacacatgcagaaatgagcaaggaggccacagaggctgaaaatgctttcagaaacaatccgaagtttcagcgacttgttaccccatctgcttcctgctttgcaaccacctgtggagtggagagacaaggcagggaagcagcaccttgcccttccagctctcatttcccccccgccaccagaaactgggaaggggtgggcgggggtctgcgatgagtagacttcaccctttcggtcttcagacatggctgtccactccttgcctgtccccacagctcttcctgcagactcttttttcccgaggatcctgttaagattgtccgggcccaagggcagtacatgtacgatgaacagggggcagaatacatcgattgcatcagcaatgtggcgcacgttgggcactgccaccctctcgtggtccaagcagcacatgagcagaaccaggtgctcaacaccaacagccggtacctgcatgacaacatcgtggactatgcgcagaggctgtcagagaccctgccggagcagctctgtgtgttctatttcctgaattctgggtcagaagccaatgacctggccctgaggctggctcgccactacacgggacaccaggacgtggtggtattagatcatgcgtatcacggccacctgagctccctgattgacatcagtccctacaagttccgcaacctggatggccagaaggagtgggtccacgtggtatgcactgcccaactcaacaacagtgacatgctcagttctctgggttgaggcatcatcaccctggtggccatgtggaggatggactggaaaaggcattcagttagaagacctctgcaggagtccaaggaagaaacaggcaaatctgcaggaggcagattgcagccttcttcgctgagtctctgcccagtgtgggagggcagatcattccccctgctggctacttctcccaagtggcagagcacatccgcaaggccggaggggtctttgttgcagatgagatccaggttggctttggccgggtaggcaagcacttctgggccttccagctccagggaaaagacttcgtccctgacatcgtcaccatgggcaagtccattggcaacggccaccctgttgcctgcgtggccgcaacccagcctgtggcgagggcatttgaagccaccggcgttgagtacttcaacacgtttgggggcagcccagtgtcctgcgctgtggggctggccgtcctgaatgtcttggagaaggagcagctccaggatcatgccaccagtgtaggcagcttcctgatgcagctcctcgggcagcaaaaaatcaaacatcccatcgtcggggatgtcaggggtgttgggctcttcattggtgtggatctgatcaaagatgaggccacaaggacaccagcaactgaagaggctgcctacttggtatcaaggctgaaggagaactacgttttgctgagcactgatggccctgggaggaacatcctgaagtttaagcccccaatgtgcttcagcctggacaatgcacggcaggtggtggcaaagctggatgccattctgactgacatggaagagaaggtgagaagttgtgaaacgctgaggctccagccctaagccagccctgctctgcctaagtgtactccagaagaaactcatctcatccaaatacacgctattgagaaggcgagcctgacctccctcttacagataaagtcagctttcagaggctcagggtgggggggcctgcccgaggccataatgctacccaccccctcctcctaaccactggtctgttggaataacccagatgtctgcatcccctcaagtcagtcaatttcctttctgtccactgggggtggaatggggtagggtgggatactttaaagtgctcctgcttaaataaattagaccagaccagtgtatttctaaagaaaatcctgacatgcacacccattaaaaatagtacattttacagtg

SEQ ID NO: 378590 - DNA, 2758 bp, Homo sapiens
aagaaattccaaaggtggccagcatggtggctcatgcctgtaattccagtactttgaggccgaggtgggaggaatgcttgagcccccagtctgggcaatatagtgagaccccatctctgcaaaaaaagaagttccagaggcccagacttgctactggtgcccagggggctgtggggcagcttgggcattgagccctcatgctgtgggatctgatgctgtctctaggtagatagtgttggaattgaattggaggacacccaactggtgtccgctgcagaactgattgcttgcctggtggtggggagaaatccttacatattttttggagtcacagaagtcttctgtgttgattgttgtagtgtgaaagcagaggaaaaacaatggtttgggttttttcaaaacaactttcatgacacatacgagaatgtaaattccagaagggccaaggccatgtctgttttacctactctttttcccccagcttctagtacataggaggcatttgatatataccaaacaaacaagcaagtgactgactagttgatgtcctgagaatcttcttgctgctggaagggtcctcctgccctcagcatttctctctgggaagctcttagactactctctcagtcatgcccaccttttcggtcataggtcagaagccaatgacctggccctgaggctggctcgccactacacgggacaccaggacgtggtggtattagatcatgcgtatcacggccacctgagctccctgattgacatcagtccctacaagttccgcaacctggatggccagaaggagtgggtccacgtggcacctctcccagacacctaccggggcccctaccgggaggaccaccccaacccagctatggcctatgccaacgaggtgaaacgtgtggtcagcagtgcacaggagaagggcaggaagattgcagccttcttcgctgagtctctgcccagtgtgggagggcagatcattccccctgctggctacttctcccaagtggcagacagggaaaagacttcgtccctgacatcgtcaccatgggcaagtccattggcaacggccaccctgttgcctgcgtggccgcaacccagcctgtggcgagggcatttgaagccaccggcgttgagtacttcaacacgtttgggggcagcccagtgtcctgcgctgtggggctggccgtcctgaatgtcttggagaaggagcagctccaggatcatgccaccagtgtaggcagcttcctgatgcagctcctcgggcagcaaaaaatcaaacatcccatcgtcggggatgtcaggggtgttgggctcttcattggtgtggatctgatcaaagatgaggccacaaggacaccagcaactgaagaggctgcctacttggtatcaaggctgaaggagaactacgttttgctgagcactgatggccctgggaggaacatcctgaagtttaagcccccaatgtgcttcagcctggacaatgcacggcaggtggtggcaaagctggatgccattctgactgacatggaagagaaggtgagaagttgtgaaacgctgaggctccagccctaagccagccctgctctgcctaagtgtactccagaagaaactcatctcatccaaatacacgctattgagaaggcgagcctgacctccctcttacagataaagtcagctttcagaggctcagggtgggggggcctgcccgaggccataatgctacccaccccctcctcctaaccactggtctgttggaataacccagatgtctgcatcccctcaagtcagtcaatttcctttctgtccactgggggtggaatggggtagggtgggatactttaaagtgctcctgcttaaataaattagaccagaccagtgtatttctaaagaaaatcctgacatgcacacccattaaaaatagtacattttacagtgtcccagtcatacttttaattggcaaattaaaataatgcaatctgatatattctatcctactaaattaaaaatactgaatataaccaactaaatatacttactcctaagactcactaccagtagtttcacttaaactctgccttagaggctcttcccacccatttcccattatggcacatagagaaaaaggcctctatcactgtccactggagtaataaccactgcttcccctaactgcctcaaagactgtcattttatagttccaggagttccacctgtcccaccttatctggctgccaactcctgctcagaaacagaacctgccacaccctgccactgcaggccgcaccctcaactcccaactgccaacttgaagcctgaactaccctttccctgaccagagttcaggaggggaagagctacacctccctgcacatgaatccactcatttgaaagcacaactgaccctggatttaagctggccaggaccctgggagatctttggaaggatttttgcctgggtttagggttaacttaaagaggtgcccagaagaccaagtgaggcagttcatgcctgtaatcccaacactttaaaaggccaaggcagaggatggcttgagcccaggcaacatggtgagaccaggctttaaaaaaacatatgagccaggcatggtggtacatgcctgtggtcccagctactcgagaggctgagatgggaggatccggtccgcccatgaggtcaaggttgcagtgagccatgattgtgttaccgcaccccagcctggacaacaaagcaagactctgtctcaaagcaaaaaaa

SEQ ID NO: 378591 - DNA, 2128 bp, Homo sapiens
tcttcctgctgccccttcatggggctgggaaaacctaagacctgcttctcccaccctgaggcccctactgtgtaccaggcccgggtaaggtaccagtcacatactcgcacttaggcctcacagttcatcccattttatgcacaaggcgactcaaagactgagtctggcccagagaaggcctgcaggagctccgagccccgcctgggcgccgggagcaggggcggggtcgtccgggaccctttcccggaagggaggccgcaggggcctgcggggcggggcctgcggggcgaggcccggggcgcgtcccggaaccagagacggggcagcgctcgagttcctgcgcgggactgccaaggcacgaccacgggccggaaggctgccaggcccagtgggcaagcgaagaaatgaaccaccgcaacgcgggcgcttcggggcggggccgagtgcgaacctgagccccaaatcccgacccaggcaggggcggggcccggagcggggccttggaggcccagcccgcgcggcgacgtctccgcgtggcgtcacggcaccgactgacggccacccaccatggccgcagaccagcgcccgaaggccgacacgctggccctgaggcaacggctcatcagctcttcctgcagactcttttttcccgaggatcctgttaagattgtccgggcccaagggcagtacatgtacgatgaacagggggcagaatacatcgattgcatcagcaatgtggcgcacgttgggcactgccaccctctcgtggtccaagcagcacatgagcagaaccaggtgctcaacaccaacagccggtacctgcatgacaacatcgtggactatgcgcagaggctgtcagagaccctgccggagcagctctgtgtgttctatttcctgaattctgggtcagaagccaatgacctggccctgaggctggctcgccactacacgggacaccaggacgtggtggtattagatcatgcgtatcacggccacctgagctccctgattgacatcagtccctacaagttccgcaacctggatggccagaaggagtgggtccacgtggcacctctcccagacacctaccggggcccctaccgggaggaccaccccaacccagctatggcctatgccaacgaggtgaaacgtgtggtcagcagtgcacaggagaagggcaggaagattgcagccttcttcgctgagtctctgcccagtgtgggagggcagatcattccccctgctggctacttctcccaagtggcagagcacatccgcaaggccggaggggtctttgttgcagatgagatccaggttggctttggccgggtaggcaagcacttctgggccttccagctccagggaaaagacttcgtccctgacatcgtcaccatgggcaagtccattggcaacggccaccctgttgcctgcgtggccgcaacccagcctgtggcgagggcatttgaagccaccggcgttgagtacttcaacacggggtgttgggctcttcattggtgtggatctgatcaaagatgaggccacaaggacaccagcaactgaagaggctgcctacttggtatcaaggctgaaggagaactacgttttgctgagcactgatggccctgggaggaacatcctgaagtttaagcccccaatgtgcttcagcctggacaatgcacggcaggtggtggcaaagctggatgccattctgactgacatggaagagaaggtgagaagttgtgaaacgctgaggctccagccctaagccagccctgctctgcctaagtgtactccagaagaaactcatctcatccaaatacacgctattgagaaggcgagcctgacctccctcttacagataaagtcagctttcagaggctcagggtgggggggcctgcccgaggccataatgctacccaccccctcctcctaaccactggtctgttggaataacccagatgtctgcatcccctcaagtcagtcaatttcctttctgtccactgggggtggaatggggtagggtgggatactttaaagtgctcctgcttaaataaattagaccagaccagtgtatttctaaagaaaatcctgacatgcacacccattaaaaatagtacattttacagtg

SEQ ID NO: 378592 - DNA, 4354 bp, Homo sapiens
  misc_feature (674)..(674): n is a, c, g, or t
tcttcctgctgccccttcatggggctgggaaaacctaagacctgcttctcccaccctgaggcccctactgtgtaccaggcccgggtaaggtaccagtcacatactcgcacttaggcctcacagttcatcccattttatgcacaaggcgactcaaagactgagtctggcccagagaaggcctgcaggagctccgagccccgcctgggcgccgggagcaggggcggggtcgtccgggaccctttcccggaagggaggccgcaggggcctgcggggcggggcctgcggggcgaggcccggggcgcgtcccggaaccagagacggggcagcgctcgagttcctgcgcgggactgccaaggcacgaccacgggccggaaggctgccaggcccagtgggcaagcgaagaaatgaaccaccgcaacgcgggcgcttcggggcggggccgagtgcgaacctgagccccaaatcccgacccaggcaggggcggggcccggagcggggccttggaggcccagcccgcgcggcgacgtctccgcgtggcgtcacggcaccgactgacggccacccaccatggccgcagaccagcgcccgaaggccgacacgctggccctgaggcaacggctcatcaggtacccgggcggggggcgggcggcggggggcgcggggctgcgcggagnggcacgcgcacgcacgacgcacgcacgcacgcactacgcacgcgcctccggctaggaagccgctgctacccatcccgtccggccgctgccccggccccgctggagcttctagggcccgaggcgggcggcgccgttgggcagtcccggcgggtggtctccggggccgcctccccgacagcgccgtctccaggccgcccagttcaggagacggccccgccctcaccgctgttcggctgtgtcagcctcgcttggcagcctttactccggagaagaccttcaccctggcgcctgagaggacctcacccagggtggcccgtcagcagcacctgggcctggctcgagagtgacctgggagggggctgaaagggcagacaagggagagtcgggggagtcggttcacaggcagcacacttgacctgtgagggggccctcggtgggacggtgggtgaggtcgcctcccactggagcttagggctggcacccagcgaggggcagcaggaccacgtggctggcaaggagctgtttagggctgagagccaggcacctaatgttggtgccctgtcccatcccatcgaagacacgcggccttatggagtccccatgggacggggcagccaccttttctcaggatccgggagactgacgcggacacatgcagaaatgagcaaggaggccacagaggctgaaaatgctttcagaaacaatccgaagtttcagcgacttgttaccccatctgcttcctgctttgcaaccacctgtggagtggagagacaaggcagggaagcagcaccttgcccttccagctctcatttcccccccgccaccagaaactgggaaggggtgggcgggggtctgcgatgagtagacttcaccctttcggtcttcagacatggctgtccactccttgcctgtccccacagctcttcctgcagactcttttttcccgaggatcctgttaagattgtccgggcccaagggcagtacatgtacgatgaacagggggcagaatacatcgattgcatcagcaatgtggcgcacgttgggcactgccaccctctcgtggtccaagcagcacatgagcagaaccaggtgctcaacaccaacagccggtacctgcatgacaacatcgtggactatgcgcagaggctgtcagagaccctgccggagcagctctgtgtgttctatttcctgaattctgggtaagtggactgtggccagcccccgggaagagggtgagacggtaacaaagacagtcactcacatgggcccagtgtagtgtagctgaccgagtgtggactcggagaggcagcccccactgcaccaggctcctgagattcccggctgtaggccctgatgctttctctgttggatccagtttccttgtctcttattgaaggatgttattacctcctttctaggatcattgctggagcttagtgaggtaatatgttcctttatttctgccttaaggatacagccaaaatccctgcctgtgggttgctcagtaaggaaggaaaacatcaagtgattcttcaaagaaatacagaattgcaaggagggctctggaggaagtgtacagggtatcatgaggcctagaaaaagtgaggggacctgacctgggggttcagggaaaccttccctgaggaagggctgttaagctcagagctgactaggagataactagaagaggaggaaggaagggtgctgccactgcatcagaagtctcgtcaaggctgggcacgatggctcatgcctgtaatcccagcacttcgggagatcgaggtgggcggatcacctgaggtcgggagtttgagaccagcccggccaacagggcgaaaccccgtctctactaaaaatacacaaaatttagctgggcgtggtggtgggtgcctgtaatcccaactactcaggaggctggggcaggagaatcgcttgaaccgggaggcggaggttgcagtgagccaaaattgcaccactgcactgcagtctgcaggacagagagaggctctatctcaaaaaaaaaaaaaaaaaaatagtctcatcaaaactcttgtcaaggttggtcaccacacagaactgcctgtggaaaggccctgtagcaggaaaggatatggtacccagcacacttgaggaaccgaaagaagtccacgaagggaaagcagaggctgtgagctgttgggaggcaagcagggcgcatcacctagggccttctccgccaagtggggaagctgtctttatcctaagagcattgggaaactatcggaggctttaatcaggaaacgatgtcttaaagggaacggagtgcaagagtggacactgttaggtgccagttcagtggccaggtgaaaggtcatggtagctcacactaggatcggcagtggagacaaacaggcaggcgattacagtgtatctgggagagaacattccaacaaatcgtaggtggtggcgttgaattatagtgatgattactgtggccactcacacagtacagacatctgccccccagataatttctaggaagtggaattcaccatcttcattttacaggtggggtaacagcagttcaaagaaaggaacttgagcccagacatttgccatgtcaagagctggagcctctggaaagagaagggagctggtgcttcctcagtggtggtggaggaggggcattcttatgccaccagctttattctgtgtggattccagggacttccatgttgccaaatccaaagcaatctctttgctgcattgtcttactctgtcccagcagtaattgacagttaccactctccggaagtggtctgtcatcttgcttcccgggcactgtgctctcctgttttctatcagcttctctagccactccttccctgtcttctttgctgattcctcctctgttccttggggctgatcctgggccacttttctctctgagccctctcctcaggtgatctcttccattctcttggtattacatagcatccatgtgttggtgactcacaaatttttttgagcccagacatgtcccatgtgttccaactcgaggttctaactgcccctgtgacatctgacaaacatctccagcttcatgtgttcaaaagggcaagggttgattggaccatggtactgttctccctcacctgcccaagaaggctatccccactcacccccgctcatcttgccttgtaaagggcatcaccacctatatctgctccaggcagaaaccacacgctccccagtcctgcatcaatcctgcctcctccatctccatgatgcctcttaactccctccacctctccatctccatggccaccacctgctctcacctggcgtcctcctccttggtcttctccttctacttttattcttgtcaactccattagacacagccagaggccacctcctaaaataggagctgacttatgtcccttttctcattaaaactcttcagtggcttcacatggcactgagaagaaaactcaggctccttcccagccctgtgcacatgtcccctgcatgtctccccacttcctctcctaccctgccctccttaggccctggcctccctcatcttctcctggttcccggagcacactgagctcttttccttcacaaggccttggagcatgctgctccatctgcctggaaacctctccctcaagactcagtacatgagtcacctcccc

SEQ ID NO: 378593 - DNA, 4230 bp, Homo sapiens
  misc_feature (674)..(674): n is a, c, g, or t
  misc_feature (4177)..(4177): n is a, c, g, or t
tcttcctgctgccccttcatggggctgggaaaacctaagacctgcttctcccaccctgaggcccctactgtgtaccaggcccgggtaaggtaccagtcacatactcgcacttaggcctcacagttcatcccattttatgcacaaggcgactcaaagactgagtctggcccagagaaggcctgcaggagctccgagccccgcctgggcgccgggagcaggggcggggtcgtccgggaccctttcccggaagggaggccgcaggggcctgcggggcggggcctgcggggcgaggcccggggcgcgtcccggaaccagagacggggcagcgctcgagttcctgcgcgggactgccaaggcacgaccacgggccggaaggctgccaggcccagtgggcaagcgaagaaatgaaccaccgcaacgcgggcgcttcggggcggggccgagtgcgaacctgagccccaaatcccgacccaggcaggggcggggcccggagcggggccttggaggcccagcccgcgcggcgacgtctccgcgtggcgtcacggcaccgactgacggccacccaccatggccgcagaccagcgcccgaaggccgacacgctggccctgaggcaacggctcatcaggtacccgggcggggggcgggcggcggggggcgcggggctgcgcggagnggcacgcgcacgcacgacgcacgcacgcacgcactacgcacgcgcctccggctaggaagccgctgctacccatcccgtccggccgctgccccggccccgctggagcttctagggcccgaggcgggcggcgccgttgggcagtcccggcgggtggtctccggggccgcctccccgacagcgccgtctccaggccgcccagttcaggagacggccccgccctcaccgctgttcggctgtgtcagcctcgcttggcagcctttactccggagaagaccttcaccctggcgcctgagaggacctcacccagggtggcccgtcagcagcacctgggcctggctcgagagtgacctgggagggggctgaaagggcagacaagggagagtcgggggagtcggttcacaggcagcacacttgacctgtgagggggccctcggtgggacggtgggtgaggtcgcctcccactggagcttagggctggcacccagcgaggggcagcaggaccacgtggctggcaaggagctgtttagggctgagagccaggcacctaatgttggtgccctgtcccatcccatcgaagacacgcggccttatggagtccccatgggacggggcagccaccttttctcaggatccgggagactgacgcggacacatgcagaaatgagcaaggaggccacagaggctgaaaatgctttcagaaacaatccgaagtttcagcgacttgttaccccatctgcttcctgctttgcaaccacctgtggagtggagagacaaggcagggaagcagcaccttgcccttccagctctcatttcccccccgccaccagaaactgggaaggggtgggcgggggtctgcgatgagtagacttcaccctttcggtcttcagacatggctgtccactccttgcctgtccccacagctcttcctgcagactcttttttcccgaggatcctgttaagattgtccgggcccaagggcagtacatgtacgatgaacagggggcagaatacatcgattgcatcagcaatgtggcgcacgttgggcactgccaccctctcgtggtccaagcagcacatgagcagaaccaggtgctcaacaccaacagccggtacctgcatgacaacatcgtggactatgcgcagaggctgtcagagaccctgccggagcagctctgtgtgttctatttcctgaattctgggtaagtggactgtggccagcccccgggaagagggtgagacggtaacaaagacagtcactcacatgggcccagtgtagtgtagctgaccgagtgtggactcggagaggcagcccccactgcaccaggctcctgagattcccggctgtaggccctgatgctttctctgttggatccagtttccttgtctcttattgaaggatgttattacctcctttctaggatcattgctggagcttagtgaggtaatatgttcctttatttctgccttaaggatacagccaaaatccctgcctgtgggttgctcagtaaggaaggaaaacatcaagtgattcttcaaagaaatacagaattgcaaggagggctctggaggaagtgtacagggtatcatgaggcctagaaaaagtgaggggacctgacctgggggttcagggaaaccttccctgaggaagggctgttaagctcagagctgactaggagataactagaagaggaggaaggaagggtgctgccactgcatcagaagtctcgtcaaggctgggcacgatggctcatgcctgtaatcccagcacttcgggagatcgaggtgggcggatcacctgaggtcgggagtttgagaccagcccggccaacagggcgaaaccccgtctctactaaaaatacacaaaatttagctgggcgtggtggtgggtgcctgtaatcccaactactcaggaggctggggcaggagaatcgcttgaaccgggaggcggaggttgcagtgagccaaaattgcaccactgcactgcagtctgcaggacagagagaggctctatctcaaaaaaaaaaaaaaaaaaatagtctcatcaaaactcttgtcaaggttggtcaccacacagaactgcctgtggaaaggccctgtagcaggaaaggatatggtacccagcacacttgaggaaccgaaagaagtccacgaagggaaagcagaggctgtgagctgttgggaggcaagcagggcgcatcacctagggccttctccgccaagtggggaagctgtctttatcctaagagcattgggaaactatcggaggctttaatcaggaaacgatgtcttaaagggaacggagtgcaagagtggacactgttaggtgccagttcagtggccaggtgaaaggtcatggtagctcacactaggatcggcagtggagacaaacaggcaggcgattacagtgtatctgggagagaacattccaacaaatcgtaggtggtggcgttgaattatagtgatgattactgtggccactcacacagtacagacatctgccccccagataatttctaggaagtggaattcaccatcttcattttacaggtggggtaacagcagttcaaagaaaggaacttgagcccagacatttgccatgtcaagagctggagcctctggaaagagaagggagctggtgcttcctcagtggtggtggaggaggggcattcttatgccaccagctttattctgtgtggattccagggacttccatgttgccaaatccaaagcaatctctttgctgcattgtcttactctgtcccagcagtaattgacagttaccactctccggaagtggtctgtcatcttgcttcccgggcactgtgctctcctgttttctatcagcttctctagccactccttccctgtcttctttgctgattcctcctctgttccttggggctgatcctgggccacttttctctctgagccctctcctcaggtgatctcttccattctcttggtattacatagcatccatgtgttggtgactcacaaatttttttgagcccagacatgtcccatgtgttccaactcgaggttctaactgcccctgtgacatctgacaaacatctccagcttcatgtgttcaaaagggcaagggttgattggaccatggtactgttctccctcacctgcccaagaaggctatccccactcacccccgctcatcttgccttgtaaagggcatcaccacctatatctgctccaggcagaaaccacacgctccccagtcctgcatcaatcctgcctcctccatctccatgatgcctcttaactccctccacctctccatctccatggccaccacctgctctcacctggcgtcctcctccttggtcttctccttctacttttattcttgtcaactccattagacacagccagaggccacctcctaaaataggagctgacttatgtcccttttctcattaaaactcttcagtggcttcacatggcactgagaagaaaactcaggctcctggcctgcgctgtccctctgnccgaggttaaggctccgaggtaaggcctccgaggttaaggctccgaggtaagg

SEQ ID NO: 378594 - DNA, 2239 bp, Homo sapiens
tcttcctgctgccccttcatggggctgggaaaacctaagacctgcttctcccaccctgaggcccctactgtgtaccaggcccgggtaaggtaccagtcacatactcgcacttaggcctcacagttcatcccattttatgcacaaggcgactcaaagactgagtctggcccagagaaggcctgcaggagctccgagccccgcctgggcgccgggagcaggggcggggtcgtccgggaccctttcccggaagggaggccgcaggggcctgcggggcggggcctgcggggcgaggcccggggcgcgtcccggaaccagagacggggcagcgctcgagttcctgcgcgggactgccaaggcacgaccacgggccggaaggctgccaggcccagtgggcaagcgaagaaatgaaccaccgcaacgcgggcgcttcggggcggggccgagtgcgaacctgagccccaaatcccgacccaggcaggggcggggcccggagcggggccttggaggcccagcccgcgcggcgacgtctccgcgtggcgtcacggcaccgactgacggccacccaccatggccgcagaccagcgcccgaaggccgacacgctggccctgaggcaacggctcatcagctcttcctgcagactcttttttcccgaggatcctgttaagattgtccgggcccaagggcagtacatgtacgatgaacagggggcagaatacatcgattgcatcagcaatgtggcgcacgttgggcactgccaccctctcgtggtccaagcagcacatgagcagaaccaggtgctcaacaccaacagccggtacctgcatgacaacatcgtggactatgcgcagaggctgtcagagaccctgccggagcagctctgtgtgttctatttcctgaattctgggtcagaagccaatgacctggccctgaggctggctcgccactacacgggacaccaggacgtggtggtattagatcatgcgtatcacggccacctgagctccctgattgacatcagtccctacaagttccgcaacctggatggccagaaggagtgggtccacgtggcacctctcccagacacctaccggggcccctaccgggaggaccaccccaacccagctatggcctatgccaacgaggtgaaacgtgtggtcagcagtgcacaggagaagggcaggaagattgcagccttcttcgctgagtctctgcccagtgtgggagggcagatcattccccctgctggctacttctcccaagtggcagagcacatccgcaaggccggaggggtctttgttgcagatgagatccaggttggctttggccgggtaggcaagcacttctgggccttccagctccagggaaaagacttcgtccctgacatcgtcaccatgggcaagtccattggcaacggccaccctgttgcctgcgtggccgcaacccagcctgtggcgagggcatttgaagccaccggcgttgagtacttcaacacgtttgggggcagcccagtgtcctgcgctgtggggctggccgtcctgaatgtcttggagaaggagcagctccaggatcatgccaccagtgtaggcagcttcctgatgcagctcctcgggcagcaaaaaatcaaacatcccatcgtcggggatgtcaggggtgttgggctcttcattggtgtggatctgatcaaagatgaggccacaaggacaccagcaactgaagaggctgcctacttggtatcaaggctgaaggagaactacgttttgctgagcactgatggccctgggaggaacatcctgaagtttaagcccccaatgtgcttcagcctggacaatgcacggcaggtggtggcaaagctggatgccattctgactgacatggaagagaaggtgagaagttgtgaaacgctgaggctccagccctaagccagccctgctctgcctaagtgtactccagaagaaactcatctcatccaaatacacgctattgagaaggcgagcctgacctccctcttacagataaagtcagctttcagaggctcagggtgggggggcctgcccgaggccataatgctacccaccccctcctcctaaccactggtctgttggaataacccagatgtctgcatcccctcaagtcagtcaatttcctttctgtccactgggggtggaatggggtagggtagtgtatttctaaagaaaatcctgacatgcacacccattaaaaatagtacattttacagtg

SEQ ID NO: 378595 - DNA, 3048 bp, Homo sapiens
  misc_feature (674)..(674): n is a, c, g, or t
tcttcctgctgccccttcatggggctgggaaaacctaagacctgcttctcccaccctgaggcccctactgtgtaccaggcccgggtaaggtaccagtcacatactcgcacttaggcctcacagttcatcccattttatgcacaaggcgactcaaagactgagtctggcccagagaaggcctgcaggagctccgagccccgcctgggcgccgggagcaggggcggggtcgtccgggaccctttcccggaagggaggccgcaggggcctgcggggcggggcctgcggggcgaggcccggggcgcgtcccggaaccagagacggggcagcgctcgagttcctgcgcgggactgccaaggcacgaccacgggccggaaggctgccaggcccagtgggcaagcgaagaaatgaaccaccgcaacgcgggcgcttcggggcggggccgagtgcgaacctgagccccaaatcccgacccaggcaggggcggggcccggagcggggccttggaggcccagcccgcgcggcgacgtctccgcgtggcgtcacggcaccgactgacggccacccaccatggccgcagaccagcgcccgaaggccgacacgctggccctgaggcaacggctcatcaggtacccgggcggggggcgggcggcggggggcgcggggctgcgcggagnggcacgcgcacgcacgacgcacgcacgcacgcactacgcacgcgcctccggctaggaagccgctgctacccatcccgtccggccgctgccccggccccgctggagcttctagggcccgaggcgggcggcgccgttgggcagtcccggcgggtggtctccggggccgcctccccgacagcgccgtctccaggccgcccagttcaggagacggccccgccctcaccgctgttcggctgtgtcagcctcgcttggcagcctttactccggagaagaccttcaccctggcgcctgagaggacctcacccagggtggcccgtcagcagcacctgggcctggctcgagagtgacctgggagggggctgaaagggcagacaagggagagtcgggggagtcggttcacaggcagcacacttgacctgtgagggggccctcggtgggacggtgggtgaggtcgcctcccactggagcttagggctggcacccagcgaggggcagcaggaccacgtggctggcaaggagctgtttagggctgagagccaggcacctaatgttggtgccctgtcccatcccatcgaagacacgcggccttatggagtccccatgggacggggcagccaccttttctcaggatccgggagactgacgcggacacatgcagaaatgagcaaggaggccacagaggctgaaaatgctttcagaaacaatccgaagtttcagcgacttgttaccccatctgcttcctgctttgcaaccacctgtggagtggagagacaaggcagggaagcagcaccttgcccttccagctctcatttcccccccgccaccagaaactgggaaggggtgggcgggggtctgcgatgagtagacttcaccctttcggtcttcagacatggctgtccactccttgcctgtccccacagctcttcctgcagactcttttttcccgaggatcctgttaagattgtccgggcccaagggcagtacatgtacgatgaacagggggcagaatacatcgattgcatcagcaatgtggcgcacgttgggcactgccaccctctcgtggtccaagcagcacatgagcagaaccaggtgctcaacaccaacagccggtacctgcatgacaacatcgtggactatgcgcagaggctgtcagagaccctgccggagcagctctgtgtgttctatttcctgaattctgggtaagtggactgtggccagcccccgggaagagggtgagacggtaacaaagacagtcactcacatgggcccagtgtagtgtagctgaccgagtgtggactcggagaggcagcccccactgcaccaggctcctgagattcccggctgtaggccctgatgctttctctgttggatccagtttccttgtctcttattgaaggatgttattacctcctttctaggatcattgctggagcttagtgaggtaatatgttcctttatttctgccttaaggatacagccaaaatccctgcctgtgggttgctcagtaaggaaggaaaacatcaagtgattcttcaaagaaatacagaattgcaaggagggctctggaggaagtgtacagggtatcatgaggcctagaaaaagtgaggggacctgacctgggggttcagggaaaccttccctgaggaagggctgttaagctcagagctgactaggagataactagaagaggaggaaggaagggtgctgccactgcatcagaagtctcgtcaaggctgggcacgatggctcatgcctgtaatcccagcacttcgggagatcgaggtgggcggatcacctgaggtcgggagtttgagaccagcccggccaacagggcgaaaccccgtctctactaaaaatacacaaaatttagctgggcgtggtggtgggtgcctgtaatcccaactactcaggaggctggggcaggagaatcgcttgaaccgggaggcggaggttgcagtgagccaaaattgcaccactgcactgcagtctgcaggacagagagaggctctatctcaaaaaaaaaaaaaaaaaaatagtctcatcaaaactcttgtcaaggttggtcaccacacagaactgcctgtggaaaggccctgtagcaggaaaggatatggtacccagcacacttgaggaaccgaaagaagtccacgaagggaaagcagaggctgtgagctgttgggaggcaagcagggcgcatcacctagggccttctccgccaccttttctcaggatccgggagactgacgcggacacatgcagaaatgagcaaggaggccacagaggctgaaaattgctttcagaaacaatccgaagtttcagcgacttgttaccccatctgcttcctgctttgcaaccacctgtggagtggagagac

SEQ ID NO: 378596 - DNA, 1199 bp, Homo sapiens
tcttcctgctgccccttcatggggctgggaaaacctaagacctgcttctcccaccctgaggcccctactgtgtaccaggcccgggtaaggtaccagtcacatactcgcacttaggcctcacagttcatcccattttatgcacaaggcgactcaaagactgagtctggcccagagaaggcctgcaggagctccgagccccgcctgggcgccgggagcaggggcggggtcgtccgggaccctttcccggaagggaggccgcaggggcctgcggggcggggcctgcggggcgaggcccggggcgcgtcccggaaccagagacggggcagcgctcgagttcctgcgcgggactgccaaggcacgaccacgggccggaaggctgccaggcccagtgggcaagcgaagaaatgaaccaccgcaacgcgggcgcttcggggcggggccgagtgcgaacctgagccccaaatcccgacccaggcaggggcggggcccggagcggggccttggaggcccagcccgcgcggcgacgtctccgcgtggcgtcacggcaccgactgacggccacccaccatggccgcagaccagcgcccgaaggccgacacgctggccctgaggcaacggctcatcagctcttcctgcagactcttttttcccgaggatcctgttaagattgtccgggcccaagggcagtacatgtacgatgaacagggggcagaatacatcgattgcatcagcaatgtggcgcacgttgggcactgccaccctctcgtggtccaagcagcacatgagcagaaccaggtgctcaacaccaacagccggtacctgcatgacaacatcgtggactatgcgcagaggctgtcagagaccctgccggagcagctctgtgtgttctatttcctgaattctggagacggtcccaccccatatcctgctagaaggaatgctgctgtcatgaagcttccataaaaaccaaggggactggattcagagagcttccagataactgaacatacagaggttctagaagggtggtgcgcccagggagggcacaggaagctccatgcccttccttcatacctcaccctatgcatctctttatctgtatcttttataatatcctttataataaaccagtaaatgtatttcccttagttttgtgagccaactccagcccgggcaacagagtgagactgtctcaaaaa

SEQ ID NO: 378597 - DNA, 424 bp, Homo sapiens
ctgccagggcatctgacatgttctttgtccctggctcagtttgggggcagcccagtgtcctgcgctgtggggctggccgtcctgaatgtcttggagaaggagcagctccaggatcatgccaccagtgtaggcagcttcctgatgcagctcctcgggcagcaaaaaatcaaacatcccatcgtcggggatgtcaggtgaggctctgggggcagcagtcaccacccacctgccaaggcccagtgtggtaccattttcttcacctcctaacaacctgggatggtggggttatgtccgctctcaagaggaactgagacactgagaggtgctattgcccaaaacggctctcctggggaggagaaagctaggacatgacctgatccctagctacccctgagcctctctcctctgtccacaccaaagatct

SEQ ID NO: 378598 - DNA, 1188 bp, Homo sapiens
tgagttgatctatgaacattattcactatgacccagaaaatcccacgaagtcgtgcatgttagaaggatgaaaccctcatgttcactgtaaactgtgaaggtgctcaggccatcacaggtatgcctatatgaaaagccaccaagtatctgaaatattttcttttacagaaattatgtgtaccatttcagtcttagaaagtggagttggtcgctgtacgcaagacagacattggggctggactcaccatcagtggccccgaaaaggtactgaaatttgcttacaagtgcagagttatgctgaacttaagggtatagatgtagattccctggttattgagcacatccagggaaaaggcacccataatgtaccacctgacttacagaactcatgggcagatgaacccatccacaaactcccctgccacatccagatgatgcttagtgaaaagaaacaccttgttccaaaagcagaaaaggaggatgcacggaagaaaaagataccccagaagaaacataaacttaagagacaaacaaattcagccaaaagaaaatgcaaataaaagttcaaaacaaaacaaaacaaaaaaacctctaaaattcataaaacacaaaatgacaaactctattaaatatgcccctatgatatctcttagataaaagttggccgtaatagagaaaatgaagataggtgttggtgactggcagattctgggtctacgatgaatcagagaaggatggttttcactttgttttacatttttttaatgcttgatgttgacttggtagaaagatgataataaagagattcttctgtctatgtgtttcttttagattactcatgtggactgaagaaaaaaaattaaatttgttaaagaaagtgagtttgatttaggattgtgactgaggacaatagcctggaagcagttctgacagatggctgctatgtaatattttggttcacagtttataagagacatgtgggccctgtgctctatcttgttttttcttcaaagcataattctggagagctggagagtcccagagtcaggaatgttataaagtcaggctggaaaccagaaataagtaacatgactaaacatttgtgtgtttttttgttttgttttgagacagagtctcgctctattgcccaggctgtagtgcagtggtgcaatctcggctctctgcaac

SEQ ID NO: 378599 - DNA, 1232 bp, Homo sapiens
  misc_feature (2)..(2): n is a, c, g, or t
  misc_feature (4)..(4): n is a, c, g, or t
  misc_feature (6)..(8): n is a, c, g, or t
gncncnnnggcgtcttgcaccaaagggaggtcgggatctcggttttccggccccgagagggaccaggtgcctccgccatagcttctgtcgctccatcgcccgcactgtgactggactgttagagggatccgtggagaggaggccaggacacctggaagccgggaaatggattcagtggtctttgaggatgtagatgtgaacttcacccaggaggagtgggctttgctggatccttcccagaagaatctctacagagatgtgatgcaggaaaccttcaggaacctggcttcagaaaaaaatggaaagatcagaaaattgaagatgagtacaaaaatcccaggagaaacctaagtcttagaaagtggagttggtcgctgtacgcaagacagacattggggctggactcaccatcagtggccccgaaaagaactcatgggcagatgaacccatccacaaactcccctgccacatccagatgatgcttagtgaaaagaaacaccttgttccaaaagcagaaaaggaggatgcacggaagaaaaagataccccagaagaaacataaacttaagagacaaacaaattcagccaaaagaaaatgcaaataaaagttcaaaacaaaacaaaacaaaaaaacctctaaaattcataaaacacaaaatgacaaactctattaaatatgcccctatgatatctcttagataaaagttggccgtaatagagaaaatgaagataggtgttggtgactggcagattctgggtctacgatgaatcagagaaggatggttttcactttgttttacatttttttaatgcttgatgttgacttggtagaaagatgataataaagagattcttctgtctatgtgtttcttttagattactcatgtggactgaagaaaaaaaattaaatttgttaaagaaagtgagtttgatttaggattgtgactgaggacaatagcctggaagcagttctgacagatggctgctatgtaatattttggttcacagtttataagagacatgtgggccctgtgctctatcttgttttttcttcaaagcataattctggagagctggagagtcccagagtcaggaatgttataaagtcaggctggaaaccagaaataagtaacatgactaaacatttgtgtgtttttttgttttgttttgagacagagtctcgctctattgcccaggctgtagtgcagtggtgcaatctcggctctctgcaac

SEQ ID NO: 378600 - DNA, 1681 bp, Homo sapiens
  misc_feature (2)..(2): n is a, c, g, or t
  misc_feature (4)..(4): n is a, c, g, or t
  misc_feature (6)..(8): n is a, c, g, or t
  misc_feature (1588)..(1588): n is a, c, g, or t
  misc_feature (1590)..(1591): n is a, c, g, or t
  misc_feature (1599)..(1599): n is a, c, g, or t
gncncnnnggcgtcttgcaccaaagggaggtcgggatctcggttttccggccccgagagggaccaggtgcctccgccatagcttctgtcgctccatcgcccgcactgtgactggactgttagagggatccgtggagaggaggccaggacacctggaagccgggaaatggattcagtggtctttgaggatgtagatgtgaacttcacccaggaggagtgggctttgctggatccttcccagaagaatctctacagagatgtgatgcaggaaaccttcaggaacctggcttcagaaaaaaatggaaagatcagaaaattgaagatgagtacaaaaatcccaggagaaacctaagaggtcttatgggagagagactcttagaaagtaagaaagatcatcagcatggagaaattttgacccaggttccagatgacatgctgaagaagaaaactccccgagtaaaatcatgtggagaagtcagcgtgggtcatgcatcccttaataggcaccacagagctgacactggacacaagccatatgagtatcaggaatatggacagaagccatataaatgtacatactgtaagaaagccttcagtgatctcccctactttcgaacacatgaatgggctcacactggggggaaaccttatgattgtgaggaatgtggaaaaagctttatttcccgttcaagcattcgaagacacaggataatgcacagtggagatggaccctacaaatgtaacttttgtgggaaagccttgatgtgtctcagtttgtatcttatccacaaacgaactcacactggagagaaaccatatgaatgtaaacagtgtggtaaagcctttagtcattctggtagccttcgaatacatgaaagaactcacactggagagaagccttatgaatgcagtgagtgtgggaaagcattccatagttccacatgcctccatgcacataaaataactcacactggggagaagccgtatgaatgtaaacagtgtgggaaagcctttgtttctttcaattccgttcgatatcatgaaagaactcacactggagagaagccctatgaatgtaagcaatgtgggaaagccttcagatctgcctcgcaccttcgaacacatggaaggactcacactggagagaaaccctatgaatgtaaacaatgtggtaaagcctttggatgtgcctcgagcgttaaaatccatgaaaggactcacactggagaaaaaccctgtagctccaacacttcgaaaggccaaggcgagaagattgcttaattcacataagattcctagaagccaccgaatccaatcatggtaaaaatgtgtttccctcaaatcatgggaaccatcgcaaaattattctgaagcttctgcagtcactgtcatttgacagcattcagaaataaatgccagtagcccaggagcaaaaatttttgggagtagtttagctggggcctcactcagatacctaggacacagagttggaaataactcttaagagagacacacctccagtaagaccttaagacagttctgtcataaaaaaaatacgaggtttggccgggtgcagtggctcatgcctntnntcccagcnctttgggaggccgaggcaggcggaccacgaggtcagtagttcgagaccagcctggtcaatatggtgaaaccccatctctact

SEQ ID NO: 378601 - DNA, 1063 bp, Homo sapiens
aatgatacattttcatgcactctcattgcaacttcatagtttctaacatttattcttctggggtccgctttggttctctcatttgacgtcatcttttttggcttcatccagctgattcacattggtagaaatacttttctatgttacttgtagtcatgtgaaacctaatctcacccttgcaatctggactgcatgttttatagaatctatattgtgatttttcatgtgtatattcctgtcatgtttgtttgctaaccaaaacaagagcaaagcaacccaaagcctaatgggtaacaatttcaagggcaagcacgaagatttcagctggatacaaacactgcatgattgatggtaggctgtgtcatatttacctgtagtcaattatgtgttccttttgctttgtagtgtctcctgagcaaccgcctttattcacggtaaacatattttctttaattattaacaaaatgctctgtgatatatacatgatatgttaatcattatgttgtcaaacccattcagcatacggtgaaagacagagatcacatttcaactagattcttaggaggtatggattcactaacttccagtgaaggtaaatttgccgctacaaatttcgttctagaaaatgtagatgaaaatattgaaaatgctcatagttttttgattcccactttttatccaagtgagatggaaggatttgatgtaaatatgctgatgttcttgttaatatctttgtttataaaatgatttttaaggcataaggcggacattttacacggtgagctctagcccaaatgcttttcctttaaagttgtcatcagctaaagatcccagttttgaattcctgtgcatgttagggatttgaggaggtgtattttgacactaaatattttcagtgcttcaaaattgattgcaatactcttctgtcttcttcatctagagaaaagctatacctgctgactttacaattgttttagaacttcaacgcctttatttcagcgttgttacattgagaatcttaatcacatcttctgattaccggattgagtttctgcatgtgtgt

SEQ ID NO: 378602 - DNA, 1522 bp, Homo sapiens
aggcaagaattcggcacgaggaagcccctgagtagctgctccgggagctgtggtgccctctccttctccctttggctcctctcctgctgccttacagtgcccccagagccggctaggggcatggacttcacctcctggtcctctcttcctcaggtatggcgttgacggtggatgtggccgggccagcgccctggggcttccgtatcacagggggcagggatttccacacgcccatcatggtgactaaggtggccgagcggggcaaagccaaggacgctgacctccggcctggagacataatcgtggccatcaacggggaaagcgcggagggcatgctgcatgccgaggcccagagcaagatccgccagagcccctcgcccctgcggctgcagctggaccggtctcaggctacgtctccagggcagaccaatggggacagctccttggaagtgctggcgactcgcttccagggctccgtgaggacatacactgagagtcagtcctccttaaggtcctcctactccagcccaacctccctcagcccgagggccggcagccccttctcaccaccaccctctagcagctccctcactggagaggcagccatcagccgcaggccggcctcggccgcgctggcgactcggcggtgctggtgctgccgccttccccgggccctcgttcctccaggcccagcatggactcggaagggggaagcctcctcctggacgaggactcggaagtcttcaagatgctgcaggaaaatcgcgagggacgggcggccccccgacagtccagctcctttcggctcttgcaggaagccctggaggctgaggagagaggtggcacgccagccttcttgcccagctcactgagcccccagtcctccctgcccgcctccagggccctggccacccctcccaagctccacacttgtgagaagtgcagtaccagcatcgcgaaccaggctgtgcgcatccaggagggccggtaccgccaccccggctgctacacctgtgccgactgtgggctgaacctgaagatgcgcgggcacttctgggtgggtgacgagctgtactgtgagaagcatgcccgccagcgctactccgcacctgccaccctcagctctcgggcctgagcccgccatgccctcagcctgcctcactgctgggccagggtcatgcctatataagttggcatggcagggacaatggtgggcagttgctcttacatgagctaagtttggagacctgaggcccctttgtcctcgctgggtgggccaaggtctgggacctgtcttggactgtgggagactcaccctcaccttgccaggcctctcccctgcaggactggcattgcactagtctgaggtggccactgcctttgatcaacctttgtgtgcgagggtctaagtagggtcgaacacagaagtgggaaggagaggggtgggccaggggctaatggtgtcactgtgtaaagtttttgacatactagctctataaatatatgaatatggacaaaataa

SEQ ID NO: 378603 - DNA, 703 bp, Homo sapiens
gcgcctccaggccctggaggcgggcagggaggactgggggctcagtgagctgggcaagaaggctggcgtgcccgcctccagggccctggccacccctcccaagctccacacttgtgagaagtgcagtaccagcatcgcgaaccaggctgtgcgcatccaggagggccggtaccgccaccccggctgctacacctgtgccgactgtgggctgaacctgaagatgcgcgggcacttctgggtgggtgacgagctgtactgtgagaagcatgcccgccagcgctactccgcacctgccaccctcagctctcgggcctgagcccgccatgccctcagcctgcctcactgctgggccagggtcatgcctatataagttggcatggcagggacaatggtgggcagttgctcttacatgagctaagtttggagacctgaggcccctttgtcctcgctgggtgggccaaggtctgggacctgtcttggactgtgggagactcaccctcaccttgccaggcctctcccctgcaggactggcattgcactagtctgaggtggccactgcctttgatcaacctttgtgtgcgagggtctaagtagggtcgaacacagaagtgggaaggagaggggtgggccaggggctaatggtgtcactgtgtaaagtttttgacatactagctctataaatatatgaatatggacaaaataa

SEQ ID NO: 378604 - DNA, 421 bp, Homo sapiens
tcctcagagccatgctggcagccctgggaggaaagctcagtaactgcccactggggaataatgggcagttactgagctttcctcctcagagccatgctggcagccctgggacagagaacggtgtggctttggctgcctctgcatggaatcttgccccggactcctgaagactgcacaaggaatgaggaagatcagggacaacctgggaactgaataactttcaaagccagtgctcagcttctctgctccgtactagcgtttacaggtcttaattcaaaccagatgcctgtactagtttttagaccccaagtcaacctttctgagccacagcttcccgctgggaataatgatgcctgccctatctacctcacagacttgttatgaggataaagtgagattaaactgcctcaaagtgctttgt

SEQ ID NO: 378605 - DNA, 3063 bp, Homo sapiens
cagagtcgggtagacggcagcgggagcggtggcgtctccccgccttccctccctcccgggcctgggcgcccagccggacaggtgagcggcagccaggtgagcgcgcccacctgcgcctctccgcgcggcccgccctccccggcgccgggctcctctccgcgcccctgtcggcgcggaaccctggcctcgtccgcggcccagctccctggagcctcgcatcagcgggggcgcccccgcgagctgcgctctccccggccggagcgctcctcctccagcccccagcccgcagggtactttgccctcggagcgaaggaggctccagaactggtagagccgggccatcgggctgggcacctccccgcggcgcccgcagcgcggagtccactgaccggctcaaaggtatggcgttgacggtggatgtggccgggccagcgccctggggcttccgtatcacagggggcagggatttccacacgcccatcatggtgactaaggtggccgagcggggcaaagccaaggacgctgacctccggcctggagacataatcgtggccatcaacggggaaagcgcggagggcatgctgcatgccgaggcccagagcaagatccgccagagcccctcgcccctgcggctgcagctggaccggtctcaggctacgtctccagggcagaccaatggggacagctccttggaagtgctggcgactcgcttccagggctccgtgaggacatacactgagagtcagtcctccttaaggtcctcctactccagcccaacctccctcagcccgagggccggcagccccttctcaccaccaccctctagcagctccctcactggagaggcagccatcagccgcagcttccagagtctggcatgttccccgggcctccccgctgctgaccgcctgtcctactcaggccgccctggaagccgacaggccggcctcggccgcgctggcgactcggcggtgctggtgctgccgccttccccgggccctcgttcctccaggcccagcatggactcggaagggggaagcctcctcctggacgaggactcggaagtcttcaagatgctgcaggaaaatcgcgagggacgggcggccccccgacagtccagctcctttcggctcttgcaggaagccctggaggctgaggagagagatggggctggcgagggcctggcacggggctgcatagtgcctggagtcaccagcacctacagacggatccccgacgctgcccacgggtgctcatcctgggagagaggtgacaagttcagaggtgtcggcagggaggcactctttctcaaactggcctcccgggactcaggagtggagatggcagttggggacagccccctggccgccttaccgggcctttctcaggactccctggactttgaatcctcagggagttctgagccccccgcccaggtaggccgactcctggccagccagaagctgggggaggtgttggagcggtcccgccggctcccaacagctcccaccagcttgtcaggacaacaccgctccctgcggctggcaagcaagcctgagcgtgaagtgccccttggagcagggcaacaggagtccatggaggcagacacagacctagaggcaggcctggaagaagaggcggtggggggcctggggcctggagcctgggcctgcctccccgggcagggtcttcgctatctggaacacctgtgcctggtgctggagcagatggcaaggctccagcagctctacctgcagctgcggatccagaggcccccaggggatcccggcgaggaggagtcgacccgagcccctttaccgtccccgttacacaccccaggcaatcgggggcaggggccatgggagctgctaagccagacagagcacacaggagcaaaggctgcttcacccccaaaggtggaggtgcccagtgccaaccctcccaggctgccagaaaccccagtggagccaacgtaccacttgccatcctcccagggacacaagcgggatatctcccactgggacaaggtcaaggtcctgctcaaccggatctgccggagaagccaccaccaccctgagccccctgcccctcctgatggctctgaccccaggatcgagtccagggacctccctgaaaggcctcagtgccgcccccaccggaagacctttatgccatcattagtggttaagaagcaacgagcaaaaaacctttctgtaggctgagacctctcggtgcacctggtgaccctgggtggaggggacttgctgtgaagtcttcctcgccctctgccctcttgctgcttctccacattgccaggaaaagctgctgacgcctgccctcctctcttgagtcgagggctgaatctttctcctctaagcagtctggtcaggaaccttggtttcttgagaggcccccaagatgccgcagctccagggctcttcctcctcaccagaaatccctgggcttccacaatgtgaactcactcattgtcaggtgtccgtggagtgtttttggcatggtgacctgtctgggcccagcatgttgcagatgtgtatttatgcgcaatggtatgcatatctctgtgtgactgtcagtgttgcaagctggctggatccaaccatctcttctgaaataatgcatccaaagggttgatattctgggggaggtcactgcagaaggatggaactgacctttattccccagtgggcagttactgagctttcctcctcagagccatgctggcagccctgggacagagaacggtgtggctttggctgcctctgcatggaatcttgccccggactcctgaagactgcacaaggaatgaggaagatcagggacaacctgggaactgaataactttcaaagccagtgctcagcttctctgctccgtactagcgtttacaggtcttaattcaaaccagatgcctgtactagtttttagaccccaagtcaacctttctgagccacagcttcccgctgggaataatgatgcctgccctatctacctcacagacttgttatgaggataaagtgagattaaactgcctcaaagtgctttgt

SEQ ID NO: 378606 - DNA, 2935 bp, Homo sapiens
aggcaagaattcggcacgaggaagcccctgagtagctgctccgggagctgtggtgccctctccttctccctttggctcctctcctgctgccttacagtgcccccagagccggctaggggcatggacttcacctcctggtcctctcttcctcaggtatggcgttgacggtggatgtggccgggccagcgccctggggcttccgtatcacagggggcagggatttccacacgcccatcatggtgactaaggtggccgagcggggcaaagccaaggacgctgacctccggcctggagacataatcgtggccatcaacggggaaagcgcggagggcatgctgcatgccgaggcccagagcaagatccgccagagcccctcgcccctgcggctgcagctggaccggtctcaggctacgtctccagggcagaccaatggggacagctccttggaagtgctggcgactcgcttccagggctccgtgaggacatacactgagagtcagtcctccttaaggtcctcctactccagcccaacctccctcagcccgagggccggcagccccttctcaccaccaccctctagcagctccctcactggagaggcagccatcagccgcagcttccagagtctggcatgttccccgggcctccccgctgctgaccgcctgtcctactcaggccgccctggaagccgacaggccggcctcggccgcgctggcgactcggcggtgctggtgctgccgccttccccgggccctcgttcctccaggcccagcatggactcggaagggggaagcctcctcctggacgaggactcggaagtcttcaagatgctgcaggaaaatcgcgagggacgggcggccccccgacagtccagctcctttcggctcttgcaggaagccctggaggctgaggagagaggtggcacgccagccttcttgcccagctcactgagcccccagtcctccctgcccgcctccagggccctggccacccctcccaagctccacacttgtgagaagtgcagtaccagcatcgcatggggctggcgagggcctggcacggggctgcatagtgcctggagtcaccagcacctacagacggatccccgacgctgcccacgggtgctcatcctgggagagaggtgacaagttcagaggtgtcggcagggaggcactctttctcaaactggcctcccgggactcaggagtggagatggcagttggggacagccccctggccgccttaccgggcctttctcaggactccctggactttgaatcctcagggagttctgagccccccgcccaggtaggccgactcctggccagccagaagctgggggaggtgttggagcggtcccgccggctcccaacagctcccaccagcttgtcaggacaacaccgctccctgcggctggcaagcaagcctgagcgtgaagtgccccttggagcagggcaacaggagtccatggaggcagacacagacctagaggcaggcctggaagaagaggcggtggggggcctggggcctggagcctgggcctgcctccccgggcagggtcttcgctatctggaacacctgtgcctggtgctggagcagatggcaaggctccagcagctctacctgcagctgcggatccagaggcccccaggggatcccggcgaggaggagtcgacccgagcccctttaccgtccccgttacacaccccaggcaatcgggggcaggggccatgggagctgctaagccagacagagcacacaggagcaaaggctgcttcacccccaaaggtggaggtgcccagtgccaaccctcccaggctgccagaaaccccagtggagccaacgtaccacttgccatcctcccagggacacaagcgggatatctcccactgggacaaggtcaaggtcctgctcaaccggatctgccggagaagccaccaccaccctgagccccctgcccctcctgatggctctgaccccaggatcgagtccagggacctccctgaaaggcctcagtgccgcccccaccggaagacctttatgccatcattagtggttaagaagcaacgagcaaaaaacctttctgtaggctgagacctctcggtgcacctggtgaccctgggtggaggggacttgctgtgaagtcttcctcgccctctgccctcttgctgcttctccacattgccaggaaaagctgctgacgcctgccctcctctcttgagtcgagggctgaatctttctcctctaagcagtctggtcaggaaccttggtttcttgagaggcccccaagatgccgcagctccagggctcttcctcctcaccagaaatccctgggcttccacaatgtgaactcactcattgtcaggtgtccgtggagtgtttttggcatggtgacctgtctgggcccagcatgttgcagatgtgtatttatgcgcaatggtatgcatatctctgtgtgactgtcagtgttgcaagctggctggatccaaccatctcttctgaaataatgcatccaaagggttgatattctgggggaggtcactgcagaaggatggaactgacctttattccccagtgggcagttactgagctttcctcctcagagccatgctggcagccctgggacagagaacggtgtggctttggctgcctctgcatggaatcttgccccggactcctgaagactgcacaaggaatgaggaagatcagggacaacctgggaactgaataactttcaaagccagtgctcagcttctctgctccgtactagcgtttacaggtcttaattcaaaccagatgcctgtactagtttttagaccccaagtcaacctttctgagccacagcttcccgctgggaataatgatgcctgccctatctacctcacagacttgttatgaggataaagtgagattaaactgcctcaaagtgctttgt

SEQ ID NO: 378607 - DNA, 2833 bp, Homo sapiens
caacgagaggcggctctatggccttgaggtccccggagagagggttgccaggtatggcgttgacggtggatgtggccgggccagcgccctggggcttccgtatcacagggggcagggatttccacacgcccatcatggtgactaaggtggccgagcggggcaaagccaaggacgctgacctccggcctggagacataatcgtggccatcaacggggaaagcgcggagggcatgctgcatgccgaggcccagagcaagatccgccagagcccctcgcccctgcggctgcagctggaccggtctcaggctacgtctccagggcagaccaatggggacagctccttggaagtgctggcgactcgcttccagggctccgtgaggacatacactgagagtcagtcctccttaaggtcctcctactccagcccaacctccctcagcccgagggccggcagccccttctcaccaccaccctctagcagctccctcactggagaggcagccatcagccgcagcttccagagtctggcatgttccccgggcctccccgctgctgaccgcctgtcctactcaggccgccctggaagccgacaggccggcctcggccgcgctggcgactcggcggtgctggtgctgccgccttccccgggccctcgttcctccaggcccagcatggactcggaagggggaagcctcctcctggacgaggactcggaagtcttcaagatgctgcaggaaaatcgcgagggacgggcggccccccgacagtccagctcctttcggctcttgcaggaagccctggaggctgaggagagaggtggcacgccagccttcttgcccagctcactgagcccccagtcctccctgcccgcctccagggccctggccacccctcccaagctccacacttgtgagaagtgcagtaccagcatcgcatggggctggcgagggcctggcacggggctgcatagtgcctggagtcaccagcacctacagacggatccccgacgctgcccacgggtgctcatcctgggagagaggtgacaagttcagaggtgtcggcagggaggcactctttctcaaactggcctcccgggactcaggagtggagatggcagttggggacagccccctggccgccttaccgggcctttctcaggactccctggactttgaatcctcagggagttctgagccccccgcccaggtaggccgactcctggccagccagaagctgggggaggtgttggagcggtcccgccggctcccaacagctcccaccagcttgtcaggacaacaccgctccctgcggctggcaagcaagcctgagcgtgaagtgccccttggagcagggcaacaggagtccatggaggcagacacagacctagaggcaggcctggaagaagaggcggtggggggcctggggcctggagcctgggcctgcctccccgggcagggtcttcgctatctggaacacctgtgcctggtgctggagcagatggcaaggctccagcagctctacctgcagctgcggatccagaggcccccaggggatcccggcgaggaggagtcgacccgagcccctttaccgtccccgttacacaccccaggcaatcgggggcaggggccatgggagctgctaagccagacagagcacacaggagcaaaggctgcttcacccccaaaggtggaggtgcccagtgccaaccctcccaggctgccagaaaccccagtggagccaacgtaccacttgccatcctcccagggacacaagcgggatatctcccactgggacaaggtcaaggtcctgctcaaccggatctgccggagaagccaccaccaccctgagccccctgcccctcctgatggctctgaccccaggatcgagtccagggacctccctgaaaggcctcagtgccgcccccaccggaagacctttatgccatcattagtggttaagaagcaacgagcaaaaaacctttctgtaggctgagacctctcggtgcacctggtgaccctgggtggaggggacttgctgtgaagtcttcctcgccctctgccctcttgctgcttctccacattgccaggaaaagctgctgacgcctgccctcctctcttgagtcgagggctgaatctttctcctctaagcagtctggtcaggaaccttggtttcttgagaggcccccaagatgccgcagctccagggctcttcctcctcaccagaaatccctgggcttccacaatgtgaactcactcattgtcaggtgtccgtggagtgtttttggcatggtgacctgtctgggcccagcatgttgcagatgtgtatttatgcgcaatggtatgcatatctctgtgtgactgtcagtgttgcaagctggctggatccaaccatctcttctgaaataatgcatccaaagggttgatattctgggggaggtcactgcagaaggatggaactgacctttattccccagtgggcagttactgagctttcctcctcagagccatgctggcagccctgggacagagaacggtgtggctttggctgcctctgcatggaatcttgccccggactcctgaagactgcacaaggaatgaggaagatcagggacaacctgggaactgaataactttcaaagccagtgctcagcttctctgctccgtactagcgtttacaggtcttaattcaaaccagatgcctgtactagtttttagaccccaagtcaacctttctgagccacagcttcccgctgggaataatgatgcctgccctatctacctcacagacttgttatgaggataaagtgagattaaactgcctcaaagtgctttgt

SEQ ID NO: 378608 - DNA, 1729 bp, Homo sapiens
cagagtcgggtagacggcagcgggagcggtggcgtctccccgccttccctccctcccgggcctgggcgcccagccggacaggtgagcggcagccaggtgagcgcgcccacctgcgcctctccgcgcggcccgccctccccggcgccgggctcctctccgcgcccctgtcggcgcggaaccctggcctcgtccgcggcccagctccctggagcctcgcatcagcgggggcgcccccgcgagctgcgctctccccggccggagcgctcctcctccagcccccagcccgcagggtactttgccctcggagcgaaggaggctccagaactggtagagccgggccatcgggctgggcacctccccgcggcgcccgcagcgcggagtccactgaccggctcaaaggtatggcgttgacggtggatgtggccgggccagcgccctggggcttccgtatcacagggggcagggatttccacacgcccatcatggtgactaaggtggccgagcggggcaaagccaaggacgctgacctccggcctggagacataatcgtggccatcaacggggaaagcgcggagggcatgctgcatgccgaggcccagagcaagatccgccagagcccctcgcccctgcggctgcagctggaccggtctcaggctacgtctccagggcagaccaatggggacagctccttggaagtgctggcgactcgcttccagggctccgtgaggacatacactgagagtcagtcctccttaaggtcctcctactccagcccaacctccctcagcccgagggccggcagccccttctcaccaccaccctctagcagctccctcactggagaggcagccatcagccgcagcttccagagtctggcatgttccccgggcctccccgctgctgaccgcctgtcctactcaggccgccctggaagccgacaggccggcctcggccgcgctggcgactcggcggtgctggtgctgccgccttccccgggccctcgttcctccaggcccagcatggactcggaagggggaagcctcctcctggacgaggactcggaagtcttcaagatgctgcaggaaaatcgcgagggacgggcggccccccgacagtccagctcctttcggctcttgcaggaagccctggaggctgaggagagaggaaccaggctgtgcgcatccaggagggccggtaccgccaccccggctgctacacctgtgccgactgtgggctgaacctgaagatgcgcgggcacttctgggtgggtgacgagctgtactgtgagaagcatgcccgccagcgctactccgcacctgccaccctcagctctcgggcctgagcccgccatgccctcagcctgcctcactgctgggccagggtcatgcctatataagttggcatggcagggacaatggtgggcagttgctcttacatgagctaagtttggagacctgaggcccctttgtcctcgctgggtgggccaaggtctgggacctgtcttggactgtgggagactcaccctcaccttgccaggcctctcccctgcaggactggcattgcactagtctgaggtggccactgcctttgatcaacctttgtgtgcgagggtctaagtagggtcgaacacagaagtgggaaggagaggggtgggccaggggctaatggtgtcactgtgtaaagtttttgacatactagctctataaatatatgaatatggacaaaataa

SEQ ID NO: 378609 - DNA, 3157 bp, Homo sapiens
cagagtcgggtagacggcagcgggagcggtggcgtctccccgccttccctccctcccgggcctgggcgcccagccggacaggtgagcggcagccaggtgagcgcgcccacctgcgcctctccgcgcggcccgccctccccggcgccgggctcctctccgcgcccctgtcggcgcggaaccctggcctcgtccgcggcccagctccctggagcctcgcatcagcgggggcgcccccgcgagctgcgctctccccggccggagcgctcctcctccagcccccagcccgcagggtactttgccctcggagcgaaggaggctccagaactggtagagccgggccatcgggctgggcacctccccgcggcgcccgcagcgcggagtccactgaccggctcaaaggtatggcgttgacggtggatgtggccgggccagcgccctggggcttccgtatcacagggggcagggatttccacacgcccatcatggtgactaaggtggccgagcggggcaaagccaaggacgctgacctccggcctggagacataatcgtggccatcaacggggaaagcgcggagggcatgctgcatgccgaggcccagagcaagatccgccagagcccctcgcccctgcggctgcagctggaccggtctcaggctacgtctccagggcagaccaatggggacagctccttggaagtgctggcgactcgcttccagggctccgtgaggacatacactgagagtcagtcctccttaaggtcctcctactccagcccaacctccctcagcccgagggccggcagccccttctcaccaccaccctctagcagctccctcactggagaggcagccatcagccgcagcttccagagtctggcatgttccccgggcctccccgctgctgaccgcctgtcctactcaggccgccctggaagccgacaggccggcctcggccgcgctggcgactcggcggtgctggtgctgccgccttccccgggccctcgttcctccaggcccagcatggactcggaagggggaagcctcctcctggacgaggactcggaagtcttcaagatgctgcaggaaaatcgcgagggacgggcggccccccgacagtccagctcctttcggctcttgcaggaagccctggaggctgaggagagaggtggcacgccagccttcttgcccagctcactgagcccccagtcctccctgcccgcctccagggccctggccacccctcccaagctccacacttgtgagaagtgcagtaccagcatcgcatggggctggcgagggcctggcacggggctgcatagtgcctggagtcaccagcacctacagacggatccccgacgctgcccacgggtgctcatcctgggagagaggtgacaagttcagaggtgtcggcagggaggcactctttctcaaactggcctcccgggactcaggagtggagatggcagttggggacagccccctggccgccttaccgggcctttctcaggactccctggactttgaatcctcagggagttctgagccccccgcccaggtaggccgactcctggccagccagaagctgggggaggtgttggagcggtcccgccggctcccaacagctcccaccagcttgtcaggacaacaccgctccctgcggctggcaagcaagcctgagcgtgaagtgccccttggagcagggcaacaggagtccatggaggcagacacagacctagaggcaggcctggaagaagaggcggtggggggcctggggcctggagcctgggcctgcctccccgggcagggtcttcgctatctggaacacctgtgcctggtgctggagcagatggcaaggctccagcagctctacctgcagctgcggatccagaggcccccaggggatcccggcgaggaggagtcgacccgagcccctttaccgtccccgttacacaccccaggcaatcgggggcaggggccatgggagctgctaagccagacagagcacacaggagcaaaggctgcttcacccccaaaggtggaggtgcccagtgccaaccctcccaggctgccagaaaccccagtggagccaacgtaccacttgccatcctcccagggacacaaggtcaaggtcctgctcaaccggatctgccggagaagccaccaccaccctgagccccctgcccctcctgatggctctgaccccaggatcgagtccagggacctccctgaaaggcctcagtgccgcccccaccggaagacctttatgccatcattagtggttaagaagcaacgagcaaaaaacctttctgtaggctgagacctctcggtgcacctggtgaccctgggtggaggggacttgctgtgaagtcttcctcgccctctgccctcttgctgcttctccacattgccaggaaaagctgctgacgcctgccctcctctcttgagtcgagggctgaatctttctcctctaagcagtctggtcaggaaccttggtttcttgagaggcccccaagatgccgcagctccagggctcttcctcctcaccagaaatccctgggcttccacaatgtgaactcactcattgtcaggtgtccgtggagtgtttttggcatggtgacctgtctgggcccagcatgttgcagatgtgtatttatgcgcaatggtatgcatatctctgtgtgactgtcagtgttgcaagctggctggatccaaccatctcttctgaaataatgcatccaaagggttgatattctgggggaggtcactgcagaaggatggaactgacctttattccccagtgggcagttactgagctttcctcctcagagccatgctggcagccctgggacagagaacggtgtggctttggctgcctctgcatggaatcttgccccggactcctgaagactgcacaaggaatgaggaagatcagggacaacctgggaactgaataactttcaaagccagtgctcagcttctctgctccgtactagcgtttacaggtcttaattcaaaccagatgcctgtactagtttttagaccccaagtcaacctttctgagccacagcttcccgctgggaataatgatgcctgccctatctacctcacagacttgttatgaggataaagtgagattaaactgcctcaaagtgctttgt

SEQ ID NO: 378610 - DNA, 4032 bp, Homo sapiens
cagagtcgggtagacggcagcgggagcggtggcgtctccccgccttccctccctcccgggcctgggcgcccagccggacaggtgagcggcagccaggtgagcgcgcccacctgcgcctctccgcgcggcccgccctccccggcgccgggctcctctccgcgcccctgtcggcgcggaaccctggcctcgtccgcggcccagctccctggagcctcgcatcagcgggggcgcccccgcgagctgcgctctccccggccggagcgctcctcctccagcccccagcccgcagggtactttgccctcggagcgaaggaggctccagaactggtagagccgggccatcgggctgggcacctccccgcggcgcccgcagcgcggagtccactgaccggctcaaaggtatggcgttgacggtggatgtggccgggccagcgccctggggcttccgtatcacagggggcagggatttccacacgcccatcatggtgactaaggtggccgagcggggcaaagccaaggacgctgacctccggcctggagacataatcgtggccatcaacggggaaagcgcggagggcatgctgcatgccgaggcccagagcaagatccgccagagcccctcgcccctgcggctgcagctggaccggtctcaggctacgtctccagggcagaccaatggggacagctccttggaagtgctggcgactcgcttccagggctccgtgaggacatacactgagagtcagtcctccttaaggtcctcctactccagcccaacctccctcagcccgagggccggcagccccttctcaccaccaccctctagcagctccctcactggagaggcagccatcagccgcagcttccagagtctggcatgttccccgggcctccccgctgctgaccgcctgtcctactcaggccgccctggaagccgacaggccggcctcggccgcgctggcgactcggcggtgctggtgctgccgccttccccgggccctcgttcctccaggcccagcatggactcggaagggggaagcctcctcctggacgaggactcggaagtcttcaagatgctgcaggaaaatcgcgagggacgggcggccccccgacagtccagctcctttcggctcttgcaggaagccctggaggctgaggagagaggtggcacgccagccttcttgcccagctcactgagcccccagtcctccctgcccgcctccagggccctggccacccctcccaagctccacacttgtgagaagtgcagtaccagcatcgcatggggctggcgagggcctggcacggggctgcatagtgcctggagtcaccagcacctacagacggatccccgacgctgcccacgggtgctcatcctgggagagaggtgacaagttcagaggtgtcggcagggaggcactctttctcaaactggcctcccgggactcaggagtggagatggcagttggggacagccccctggccgccttaccgggcctttctcaggactccctggactttgaatcctcagggagttctgagccccccgcccaggtaggccgactcctggccagccagaagctgggggaggtgttggagcggtcccgccggctcccaacagctcccaccagcttgtcaggacaacaccgctccctgcggctggcaagcaagcctgagcgtgaagtgccccttggagcagggcaacaggagtccatggaggcagacacagacctagaggcaggcctggaagaagaggcggtggggggcctggggcctggagcctgggcctgcctccccgggcagggtcttcgctatctggaacacctgtgcctggtgctggagcagatggcaaggctccagcagctctacctgcagctgcggatccagaggcccccaggggatcccggcgaggaggagtcgacccgagcccctttaccgtccccgttacacaccccaggcaatcgggggcaggggccatgggagctgctaagccagacagagcacacaggagcaaaggctgcttcacccccaaaggtggaggtgcccagtgccaaccctcccaggctgccagaaaccccagtggagccaacgtaccacttgccatcctcccagggacacaagcgggatatctcccactgggacaaggtcaaggtcctgctcaaccggatctgccggagaagccaccaccaccctgagccccctgcccctcctgatggctctgaccccaggatcgagtccagggacctccctgaaaggcctcagtgccgcccccaccggaagacctttatgccatcattagtggttaagaagcaacgagcaaaaaacctttctgtaggctgagacctctcggtgcacctggtgaccctgggtggaggggacttgctgtgaagtcttcctcgccctctgccctcttgctgcttctccacattgccaggaaaagctgctgacgcctgccctcctctcttgagtcgagggctgaatctttctcctctaagcagtctggtcaggaaccttggtttcttgagaggcccccaagatgccgcagctccagggctcttcctcctcaccagaaatccctgggcttccacaatgtgaactcactcattgtcaggtgtccgtggagtgtttttggcatggtgacctgtctgggcccagcatgttgcagatgtgtatttatgcgcaatggtatgcatatctctgtgtgactgtcagtgttgcaagctggctggatccaaccatctcttctgaaataatgcatccaaagggttgatattctgggggaggtcactgcagaaggatggaactgacctttattccccagtgggcagttactgagctttcctcctcagagccatgctggcagccctgggacagagaacggtgtggctttggctgcctctgcatggaatcttgccccggactcctgaagactgcacaaggaatgaggaagatcagggacaacctgggaactgaataactttcaaagccagtgctcagcttctctgctccgtactagcgtttacaggtcttaattcaaaccagatgcctgtactagtttttagaccccaagtcaacctttctgagccacagcttcccgctgggaataatgatgcctgccctatctacctcacagacttgttatgaggataaagtgagattaaactgcctcaaagtgctttgtaaacctcaggtgaataggaaaggggaaagtaaggctggagtgatgatggggaggtcggaggataagggggggctgggattgctaatggggactaaaatggccagtctcctggcaagattttgagcaggtcatttcattgaggcctcttagatttcatatttgagaattagggcactgattcctgactggctaggcatggtggtcactggcttgagtcagaccaggaatgtctcttagaaatggtcactgataggcatccttctcctccagtcaggaggggctggtttccttatctgttgcagtctcgactgccagagggaggcgagcgtggtaggcagtcgggggtcccttgtgtttggggggcccagctcccgcttcctttgagcccggaaccaatgatccgaagccttctttcctgatgggattctttagcgaggacactaccgaggcgcgacttcctgacgcgcatccgatccgggaaggcgcacttccgctccccagttgccgcgggatggcaagccggcgtgggggaagggagaggtcggcggagacgagggagggaccatatccgggagagcggcagcttccgaccagtggtcgcgcttccggagaggcgcttccggtggcggcggcagcagcggctgtggtggttccgggtgtctttgtccccccggtgtcgctgcctggcccgcaggtgggttggggggccccctgccgcccctctgccccttcgcccctccgcccctccgctggccgaggggctgcgagggccgggcggcgaagatgcgtggggcgcggaaggggccgagcccctctttggactgcaagtcccgtctccctggcaacggcct

SEQ ID NO: 378611 - DNA, 2579 bp, Homo sapiens
cagagtcgggtagacggcagcgggagcggtggcgtctccccgccttccctccctcccgggcctgggcgcccagccggacaggtgagcggcagccaggtgagcgcgcccacctgcgcctctccgcgcggcccgccctccccggcgccgggctcctctccgcgcccctgtcggcgcggaaccctggcctcgtccgcggcccagctccctggagcctcgcatcagcgggggcgcccccgcgagctgcgctctccccggccggagcgctcctcctccagcccccagcccgcagggtactttgccctcggagcgaaggaggctccagaactggtagagccgggccatcgggctgggcacctccccgcggcgcccgcagcgcggagtccactgaccggctcaaaggtatggcgttgacggtggatgtggccgggccagcgccctggggcttccgtatcacagggggcagggatttccacacgcccatcatggtgactaaggtggccgagcggggcaaagccaaggacgctgacctccggcctggagacataatcgtggccatcaacggggaaagcgcggagggcatgctgcatgccgaggcccagagcaagatccgccagagcccctcgcccctgcggctgcagctggaccggtctcaggctacgtctccagggcagaccaatggggacagctccttggaagtgctggcgactcgcttccagggctccgtgaggacatacactgagagtcagtcctccttaaggtcctcctactccagcccaacctccctcagcccgagggccggcagccccttctcaccaccaccctctagcagctccctcactggagaggcagccatcagccgcagcttccagagtctggcatgttccccgggcctccccgctgctgaccgcctgtcctactcaggccgccctggaagccgacaggccggcctcggccgcgctggcgactcggcggtgctggtgctgccgccttccccgggccctcgttcctccaggcccagcatggactcggaagggggaagcctcctcctggacgaggactcggaagtcttcaagatgctgcaggaaaatcgcgagggacgggcggccccccgacagtccagctcctttcggctcttgcaggaagccctggaggctgaggagagaggtggcacgccagccttcttgcccagctcactgagcccccagtcctccctgcccgcctccagggccctggccacccctcccaagctccacacttgtgagaagtgcagtaccagcatcgcatggggctggcgagggcctggcacggggctgcatagtgcctggagtcaccagcacctacagacggatccccgacgctgcccacgggtgctcatcctgggagagaggtgacaagttcagaggtgtcggcagggaggcactctttctcaaactggcctcccgggactcaggagtggagatggcagttggggacagccccctggccgccttaccgggcctttctcaggactccctggactttgaatcctcagggagttctgagccccccgcccaggtaggccgactcctggccagccagaagctgggggaggtgttggagcggtcccgccggctcccaacagctcccaccagcttgtcaggacaacaccgctccctgcggctggcaagcaagcctgagcgtgaagtgccccttggagcagggcaacaggagtccatggaggcagacacagacctagaggcaggcctggaagaagaggcggtggggggcctggggcctggagcctgggcctgcctccccgggcagggtcttcgctatctggaacacctgtgcctggtgctggagcagatggcaaggctccagcagctctacctgcagctgcggatccagaggcccccaggggatcccggcgaggaggagtcgacccgagcccctttaccgtccccgttacacaccccaggcaatcgggggcaggggccatgggagctgctaagccagacagagcacacaggagcaaaggctgcttcacccccaaaggtggaggtgcccagtgccaaccctcccaggctgccagaaaccccagtggagccaacgtaccacttgccatcctcccagggacacaaggatcgagtccagggacctccctgaaaggcctcagtgccgcccccaccggaagacctttatgccatcattagtggttaagaagcaacgagcaaaaaacctttctgtaggctgagacctctcggtgcacctggtgaccctgggtggaggggacttgctgtgaagtcttcctctgcctctgcatggaatcttgccccggactcctgaagactgcacaaggaatgaggaagatcagggacaacctgggaactgaataactttcaaagccagtgctcagcttctctgctccgtactagcgtttacaggtcttaattcaaaccagatgcctgtactagtttttagaccccaagtcaacctttctgagccacagcttcccgctgggaataatgatgcctgccctatctacctcacagacttgttatgaggataaagtgagattaaactgcctcaaagtgctttgt

SEQ ID NO: 378612 - DNA, 1446 bp, Homo sapiens
cagagtcgggtagacggcagcgggagcggtggcgtctccccgccttccctccctcccgggcctgggcgcccagccggacaggtgagcggcagccaggtgagcgcgcccacctgcgcctctccgcgcggcccgccctccccggcgccgggctcctctccgcgcccctgtcggcgcggaaccctggcctcgtccgcggcccagctccctggagcctcgcatcagcgggggcgcccccgcgagctgcgctctccccggccggagcgctcctcctccagcccccagcccgcagggtactttgccctcggagcgaaggaggctccagaactggtagagccgggccatcgggctgggcacctccccgcggcgcccgcagcgcggagtccactgaccggctcaaaggtatggcgttgacggtggatgtggccgggccagcgccctggggcttccgtatcacagggggcagggatttccacacgcccatcatggtgactaaggtggccgagcggggcaaagccaaggacgctgacctccggcctggagacataatcgtggccatcaacggggaaagcgcggagggcatgctgcatgccgaggcccagagcaagatccgccagagcccctcgcccctgcggctgcagctggaccggtctcaggctacgtctccagggcagaccaatggggacagctccttggaagtgctggcgactcgcttccagggctccgtgaggacatacactgagagtcagtcctccttaaggtcctcctactccagcccaacctccctcagcccgagggccggcagccccttctcaccaccaccctctagcagctccctcactggagaggcagccatcagccgcagcttccagagtctggcatgttccccgggcctccccgctgctgaccgcctgtcctactcaggccgccctggaagccgacaggccggcctcggccgcgctggcgactcggcggtgctggtgctgccgccttccccgggccctcgttcctccaggcccagcatggactcggaagggggaagcctcctcctggacgaggactcggaagtcttcaagatgctgcaggaaaatcgcgagggacgggcggccccccgacagtccagctcctttcggctcttgcaggaagccctggaggctgaggagagaggtggcacgccagccttcttgcccagctcactgagcccccagtcctccctgcccgcctccagggccctggccaccccctcaccttgccaggcctctcccctgcaggactggcattgcactagtctgaggtggccactgcctttgatcaacctttgtgtgcgagggtctaagtagggtcgaacacagaagtgggaaggagaggggtgggccaggggctaatggtgtcactgtgtaaagtttttgacatactagctctataaatatatgaatatggacaaaataa

SEQ ID NO: 378613 - DNA, 771 bp, Homo sapiens
atattaggaaaatattaggtataatttgagacaggtctcactcagtactctggctggagtgcagtggtcaatctcggctcgctgtagccatgacctcctgggctcaagtgatcctcccacctcagccttccaaagtgttgggattataggcatgcaccaccgcacctggccctacccttcatactttagtattaatgttttagtatatttgccttaaagtttaatgacattctccttgctacctgtccacaatacattccatccattcagaaaattacactgaccacggaggccgttgtcagtgttgcaagctggctggatccaaccatctcttctgaaataatgcatccaaagggttgatattctgggggaggtcactgcagaaggatggaactgacctttattccccagtgggcagttactgagctttcctcctcagagccatgctggcagccctgggacagagaacggtgtggctttggctgcctctgcatggaatcttgccccggactcctgaagactgcacaaggaatgaggaagatcagggacaacctgggaactgaataactttcaaagccagtgctcagcttctctgctccgtactagcgtttacaggtcttaattcaaaccagatgcctgtactagtttttagaccccaagtcaacctttctgagccacagcttcccgctgggaataatgatgcctgccctatctacctcacagacttgttatgaggataaagtgagattaaactgcctcaaagtgctttgt

SEQ ID NO: 378614 - DNA, 1847 bp, Homo sapiens
cagagtcgggtagacggcagcgggagcggtggcgtctccccgccttccctccctcccgggcctgggcgcccagccggacaggtgagcggcagccaggtgagcgcgcccacctgcgcctctccgcgcggcccgccctccccggcgccgggctcctctccgcgcccctgtcggcgcggaaccctggcctcgtccgcggcccagctccctggagcctcgcatcagcgggggcgcccccgcgagctgcgctctccccggccggagcgctcctcctccagcccccagcccgcagggtactttgccctcggagcgaaggaggctccagaactggtagagccgggccatcgggctgggcacctccccgcggcgcccgcagcgcggagtccactgaccggctcaaaggtatggcgttgacggtggatgtggccgggccagcgccctggggcttccgtatcacagggggcagggatttccacacgcccatcatggtgactaaggtggccgagcggggcaaagccaaggacgctgacctccggcctggagacataatcgtggccatcaacggggaaagcgcggagggcatgctgcatgccgaggcccagagcaagatccgccagagcccctcgcccctgcggctgcagctggaccggtctcaggctacgtctccagggcagaccaatggggacagctccttggaagtgctggcgactcgcttccagggctccgtgaggacatacactgagagtcagtcctccttaaggtcctcctactccagcccaacctccctcagcccgagggccggcagccccttctcaccaccaccctctagcagctccctcactggagaggcagccatcagccgcagcttccagagtctggcatgttccccgggcctccccgctgctgaccgcctgtcctactcaggccgccctggaagccgacaggccggcctcggccgcgctggcgactcggcggtgctggtgctgccgccttccccgggccctcgttcctccaggcccagcatggactcggaagggggaagcctcctcctggacgaggactcggaagtcttcaagatgctgcaggaaaatcgcgagggacgggcggccccccgacagtccagctcctttcggctcttgcaggaagccctggaggctgaggagagaggtggcacgccagccttcttgcccagctcactgagcccccagtcctccctgcccgcctccagggccctggccacccctcccaagctccacacttgtgagaagtgcagtaccagcatcgcgaaccaggctgtgcgcatccaggagggccggtaccgccaccccggctgctacacctgtgccgactgtgggctgaacctgaagatgcgcgggcacttctgggtgggtgacgagctgtactgtgagaagcatgcccgccagcgctactccgcacctgccaccctcagctctcgggcctgagcccgccatgccctcagcctgcctcactgctgggccagggtcatgcctatataagttggcatggcagggacaatggtgggcagttgctcttacatgagctaagtttggagacctgaggcccctttgtcctcgctgggtgggccaaggtctgggacctgtcttggactgtgggagactcaccctcaccttgccaggcctctcccctgcaggactggcattgcactagtctgaggtggccactgcctttgatcaacctttgtgtgcgagggtctaagtagggtcgaacacagaagtgggaaggagaggggtgggccaggggctaatggtgtcactgtgtaaagtttttgacatactagctctataaatatatgaatatggacaaaataa

SEQ ID NO: 378615 - DNA, 3181 bp, Homo sapiens
cagagtcgggtagacggcagcgggagcggtggcgtctccccgccttccctccctcccgggcctgggcgcccagccggacaggtgagcggcagccaggtgagcgcgcccacctgcgcctctccgcgcggcccgccctccccggcgccgggctcctctccgcgcccctgtcggcgcggaaccctggcctcgtccgcggcccagctccctggagcctcgcatcagcgggggcgcccccgcgagctgcgctctccccggccggagcgctcctcctccagcccccagcccgcagggtactttgccctcggagcgaaggaggctccagaactggtagagccgggccatcgggctgggcacctccccgcggcgcccgcagcgcggagtccactgaccggctcaaaggtatggcgttgacggtggatgtggccgggccagcgccctggggcttccgtatcacagggggcagggatttccacacgcccatcatggtgactaaggtggccgagcggggcaaagccaaggacgctgacctccggcctggagacataatcgtggccatcaacggggaaagcgcggagggcatgctgcatgccgaggcccagagcaagatccgccagagcccctcgcccctgcggctgcagctggaccggtctcaggctacgtctccagggcagaccaatggggacagctccttggaagtgctggcgactcgcttccagggctccgtgaggacatacactgagagtcagtcctccttaaggtcctcctactccagcccaacctccctcagcccgagggccggcagccccttctcaccaccaccctctagcagctccctcactggagaggcagccatcagccgcagcttccagagtctggcatgttccccgggcctccccgctgctgaccgcctgtcctactcaggccgccctggaagccgacaggccggcctcggccgcgctggcgactcggcggtgctggtgctgccgccttccccgggccctcgttcctccaggcccagcatggactcggaagggggaagcctcctcctggacgaggactcggaagtcttcaagatgctgcaggaaaatcgcgagggacgggcggccccccgacagtccagctcctttcggctcttgcaggaagccctggaggctgaggagagaggtggcacgccagccttcttgcccagctcactgagcccccagtcctccctgcccgcctccagggccctggccacccctcccaagctccacacttgtgagaagtgcagtaccagcatcgcatggggctggcgagggcctggcacggggctgcatagtgcctggagtcaccagcacctacagacggatccccgacgctgcccacgggtgctcatcctgggagagaggtgacaagttcagaggtgtcggcagggaggcactctttctcaaactggcctcccgggactcaggagtggagatggcagttggggacagccccctggccgccttaccgggcctttctcaggactccctggactttgaatcctcagggagttctgagccccccgcccaggtaggccgactcctggccagccagaagctgggggaggtgttggagcggtcccgccggctcccaacagctcccaccagcttgtcaggacaacaccgctccctgcggctggcaagcaagcctgagcgtgaagtgccccttggagcagggcaacaggagtccatggaggcagacacagacctagaggcaggcctggaagaagaggcggtggggggcctggggcctggagcctgggcctgcctccccgggcagggtcttcgctatctggaacacctgtgcctggtgctggagcagatggcaaggctccagcagctctacctgcagctgcggatccagaggcccccaggggatcccggcgaggaggagtcgacccgagcccctttaccgtccccgttacacaccccaggcaatcgggggcaggggccatgggagctgctaagccagacagagcacacaggagcaaaggctgcttcacccccaaaggtggaggtgcccagtgccaaccctcccaggctgccagaaaccccagtggagccaacgtaccacttgccatcctcccagggacacaagcgggatatctcccactgggacaaggtcaaggtcctgctcaaccggatctgccggagaagccaccaccaccctgagccccctgcccctcctgatggctctgaccccaggatcgagtccagggacctccctgaaaggcctcagtgccgcccccaccggaagacctttatgccatcattagtggttaagaagcaacgagcaaaaaacctttctgtaggctgagacctctcggtgcacctggtgaccctgggtggaggggacttgctgtgaagtcttcctcgccctctgccctcttgctgcttctccacattgccaggaaaagctgctgacgcctgccctcctctcttgagtcgagggctgaatctttctcctctaagcagtctggtcaggaaccttggtttcttgagaggcccccaagatgccgcagctccagggctcttcctcctcaccagaaatccctgggcttccacaatgtgaactcactcattgtcaggtgtccgtggagtgtttttggcatggtgacctgtctgggcccagcatgttgcagatgtgtatttatgcgcaatggtatgcatatctctgtgtgactgtcagtgttgcaagctggctggatccaaccatctcttctgaaataatgcatccaaagggttgatattctgggggaggtcactgcagaaggatggaactgacctttattccccagtgggcagttactgagctttcctcctcagagccatgctggcagccctgggacagagaacggtgtggctttggctgcctctgcatggaatcttgccccggactcctgaagactgcacaaggaatgaggaagatcagggacaacctgggaactgaataactttcaaagccagtgctcagcttctctgctccgtactagcgtttacaggtcttaattcaaaccagatgcctgtactagtttttagaccccaagtcaacctttctgagccacagcttcccgctgggaataatgatgcctgccctatctacctcacagacttgttatgaggataaagtgagattaaactgcctcaaagtgctttgt

SEQ ID NO: 378616 - DNA, 2062 bp, Homo sapiens
agtgtctgggggccgcgcccagctgggtcgggacgcgctccctgagctgcccgagctccgcggggactcgggccgggatcctcgggcggctgcattggccggggccggggccgggagcgggccatgatgggccggcggcgcgccttcgccgtggacggccgggatggggctggcgagggcctggcacggggctgcatagtgcctggagtcaccagcacctacagacggatccccgacgctgcccacgggtgctcatcctgggagagaggtgacaagttcagaggtgtcggcagggaggcactctttctcaaactggcctcccgggactcaggagtggagatggcagttggggacagccccctggccgccttaccgggcctttctcaggactccctggactttgaatcctcagggagttctgagccccccgcccaggtaggccgactcctggccagccagaagctgggggaggtgttggagcggtcccgccggctcccaacagctcccaccagcttgtcaggacaacaccgctccctgcggctggcaagcaagcctgagcgtgaagtgccccttggagcagggcaacaggagtccatggaggcagacacagacctagaggcaggcctggaagaagaggcggtggggggcctggggcctggagcctgggcctgcctccccgggcagggtcttcgctatctggaacacctgtgcctggtgctggagcagatggcaaggctccagcagctctacctgcagctgcggatccagaggcccccaggggatcccggcgaggaggagtcgacccgagcccctttaccgtccccgttacacaccccaggcaatcgggggcaggggccatgggagctgctaagccagacagagcacacaggagcaaaggctgcttcacccccaaaggtggaggtgcccagtgccaaccctcccaggctgccagaaaccccagtggagccaacgtaccacttgccatcctcccagggacacaagcgggatatctcccactgggacaaggtcaaggtcctgctcaaccggatctgccggagaagccaccaccaccctgagccccctgcccctcctgatggctctgaccccaggatcgagtccagggacctccctgaaaggcctcagtgccgcccccaccggaagacctttatgccatcattagtggttaagaagcaacgagcaaaaaacctttctgtaggctgagacctctcggtgcacctggtgaccctgggtggaggggacttgctgtgaagtcttcctcgccctctgccctcttgctgcttctccacattgccaggaaaagctgctgacgcctgccctcctctcttgagtcgagggctgaatctttctcctctaagcagtctggtcaggaaccttggtttcttgagaggcccccaagatgccgcagctccagggctcttcctcctcaccagaaatccctgggcttccacaatgtgaactcactcattgtcaggtgtccgtggagtgtttttggcatggtgacctgtctgggcccagcatgttgcagatgtgtatttatgcgcaatggtatgcatatctctgtgtgactgtcagtgttgcaagctggctggatccaaccatctcttctgaaataatgcatccaaagggttgatattctgggggaggtcactgcagaaggatggaactgacctttattccccagtgggcagttactgagctttcctcctcagagccatgctggcagccctgggacagagaacggtgtggctttggctgcctctgcatggaatcttgccccggactcctgaagactgcacaaggaatgaggaagatcagggacaacctgggaactgaataactttcaaagccagtgctcagcttctctgctccgtactagcgtttacaggtcttaattcaaaccagatgcctgtactagtttttagaccccaagtcaacctttctgagccacagcttcccgctgggaataatgatgcctgccctatctacctcacagacttgttatgaggataaagtgagattaaactgcctcaaagtgctttgt

SEQ ID NO: 378617 - DNA, 2191 bp, Homo sapiens
cggcacgaggggcgcaggccgtctaagggattgatggatgtggcctgccagggctttgcctaccacacagctcagagcacgggttccctgtcgctaacaaccgttgcgaagggaatcccatccacacatctcccagacagctggggccatatccgggctgcccgtggctgtccagtgaccgcccttcctcactgctccgggacacttctccctggggcagtgctgccagccttcaggaatgctgggggtgttgggggtggcctgcccagcctgacgctgactctccatgcagatggggctggcgagggcctggcacggggctgcatagtgcctggagtcaccagcacctacagacggatccccgacgctgcccacgggtgctcatcctgggagagaggtgacaagttcagaggtgtcggcagggaggcactctttctcaaactggcctcccgggactcaggagtggagatggcagttggggacagccccctggccgccttaccgggcctttctcaggactccctggactttgaatcctcagggagttctgagccccccgcccaggtaggccgactcctggccagccagaagctgggggaggtgttggagcggtcccgccggctcccaacagctcccaccagcttgtcaggacaacaccgctccctgcggctggcaagcaagcctgagcgtgaagtgccccttggagcagggcaacaggagtccatggaggcagacacagacctagaggcaggcctggaagaagaggcggtggggggcctggggcctggagcctgggcctgcctccccgggcagggtcttcgctatctggaacacctgtgcctggtgctggagcagatggcaaggctccagcagctctacctgcagctgcggatccagaggcccccaggggatcccggcgaggaggagtcgacccgagcccctttaccgtccccgttacacaccccaggcaatcgggggcaggggccatgggagctgctaagccagacagagcacacaggagcaaaggctgcttcacccccaaaggtggaggtgcccagtgccaaccctcccaggctgccagaaaccccagtggagccaacgtaccacttgccatcctcccagggacacaagcgggatatctcccactgggacaaggtcaaggtcctgctcaaccggatctgccggagaagccaccaccaccctgagccccctgcccctcctgatggctctgaccccaggatcgagtccagggacctccctgaaaggcctcagtgccgcccccaccggaagacctttatgccatcattagtggttaagaagcaacgagcaaaaaacctttctgtaggctgagacctctcggtgcacctggtgaccctgggtggaggggacttgctgtgaagtcttcctcgccctctgccctcttgctgcttctccacattgccaggaaaagctgctgacgcctgccctcctctcttgagtcgagggctgaatctttctcctctaagcagtctggtcaggaaccttggtttcttgagaggcccccaagatgccgcagctccagggctcttcctcctcaccagaaatccctgggcttccacaatgtgaactcactcattgtcaggtgtccgtggagtgtttttggcatggtgacctgtctgggcccagcatgttgcagatgtgtatttatgcgcaatggtatgcatatctctgtgtgactgtcagtgttgcaagctggctggatccaaccatctcttctgaaataatgcatccaaagggttgatattctgggggaggtcactgcagaaggatggaactgacctttattccccagtgggcagttactgagctttcctcctcagagccatgctggcagccctgggacagagaacggtgtggctttggctgcctctgcatggaatcttgccccggactcctgaagactgcacaaggaatgaggaagatcagggacaacctgggaactgaataactttcaaagccagtgctcagcttctctgctccgtactagcgtttacaggtcttaattcaaaccagatgcctgtactagtttttagaccccaagtcaacctttctgagccacagcttcccgctgggaataatgatgcctgccctatctacctcacagacttgttatgaggataaagtgagattaaactgcctcaaagtgctttgt

SEQ ID NO: 378618 - DNA, 4632 bp, Homo sapiens
  misc_feature (1477)..(1477): n is a, c, g, or t
  misc_feature (1488)..(1488): n is a, c, g, or t
  misc_feature (2461)..(2461): n is a, c, g, or t
aggcaagaattcggcacgaggaagcccctgagtagctgctccgggagctgtggtgccctctccttctccctttggctcctctcctgctgccttacagtgcccccagagccggctaggggcatggacttcacctcctggtcctctcttcctcaggtatggcgttgacggtggatgtggccgggccagcgccctggggcttccgtatcacagggggcagggatttccacacgcccatcatggtgactaaggtggccgagcggggcaaagccaaggacgctgacctccggcctggagacataatcgtggccatcaacggggaaagcgcggagggcatgctgcatgccgaggcccagagcaagatccgccagagcccctcgcccctgcggctgcagctggaccggtctcaggctacgtctccagggcagaccaatggggacagctccttggaagtgctggcgactcgcttccagggctccgtgaggacatacactgagagtcagtcctccttaaggtcctcctactccagcccaacctccctcagcccgagggccggcagccccttctcaccaccaccctctagcagctccctcactggagaggcagccatcagccgcagcttccagagtctggcatgttccccgggcctccccgctgctgaccgcctgtcctactcaggccgccctggaagccgacaggccggcctcggccgcgctggcgactcggcggtgctggtgctgccgccttccccgggccctcgttcctccaggcccagcatggactcggaagggggaagcctcctcctggacgaggactcggaagtcttcaagatgctgcaggaaaatcgcgagggacgggcggccccccgacagtccagctcctttcggctcttgcaggaagccctggaggctgaggagagaggtggcacgccagccttcttgcccagctcactgagcccccagtcctccctgcccgcctccagggccctggccacccctcccaagctccacacttgtgagaagtgcagtaccagcatcgcgaaccaggctgtgcgcatccaggagggccggtaccgccaccccggctgctacacctgtgccgactgtgggctgaacctgaagatgcgcgggcacttctgggaggacgcttgtgctatggagggaatgagattgtcactggaagctttggaggggatggtggagggcgccaagcggagggacaggaggaagaccaggagacccatccagccaagctggtgagacaacctctgatcctgaggaccggccgcccaccaagggttgggcccccggggccaggttgatctaccgacaccttccacttctttcctgggagagactgctggcttcattggtgattgatttggaggggggaaaaagggcagggtggctcaggctttaggcccaggtactggggaggcctgaggagccctcctggagctcaggaggccgaggctgccttnagctgtgatcntgccactgcattccagcctgggagagagagaggacctgtctgttgaaaaaaacacaaaaacaaatgaatgcatgtggccagtgccaggtgagctgccctgggggttcactggagttgaggcaggggacagtagtctcccctgccagcctaggattttgggcgtcattcacccactacccctagtgctagtcccagaggatgctgcggagggggcagcctcagctctcttttcagagaagatcaaagctgggcttcccagggtgcctggctggtccctgccggcagctttgtgctctccggctctttgtgaaaggaatcttggcgcagatgtttgtgttgcctcctcaggcacctgtagatataatttacaccatgatatcattgtctcaccttttgcctgggtggctgcctgagaaaggtctttctttttatagaaaagatcaaggctgtctggcgcgggactccatgagccccaggcgctggtcagaaacggggtagtctctttggcgccacctagtgtccagtttggcccatggcggggcccattcacggggcaacactgggcttctgggcacagcgggaatacagaaagatacagcactcctcatgccttcctggaggtagaaggccagtggcagcgactgagctggcatgaatgaataagaggatgtggcactgagcgccaagggctaccttggaacgcaccgaggagcgtcccgtgagttcaaagcagtggccgtgatgcaaaaggagggctgggtcttggagacgtggagaagaggaatgctgagtgatggggtggctgctggggggatgcttagctcagagcagtggctgatggggacactgagataagatcggaggggagctgtcaatgccagaagtggtttgaacttccccttgaggctctagggacattttgttttgagacatggtcttgctctattgcccaggctggagtgcagtggtacantcttagctcactgcagcctccacctcccaggctcaagagatcctcccacagcctcccaggtagctgggactacaggcgtgcaccaccacacccagctaatttttaagtttttttttttttttaagagatggggtctcactatgttgcccaggctggtctcgaacttcgggccccaagccatcctcccaccttggctttccaaagtgttgggattacaagcgtgagctaaccttgcccagcctctgggaacacttggaaggttttaagcagagaagtgacaggttggaaaagatggtttggattattgatatggacagattcccacctgtatgtagcacgccatgctgggccagcagtgtcataggagtggagggggataagtggggactggggacatgtgaaatgatgggcattccagtgaggcatcgaatgccttctgagggctttgtaggttccagctcaaatccccctctggctcttgttctttggtgtggcagccatctctcctcccaggggtcctgagggtttcagcaccagggttctctgcagccacacaatcagcccggctcgggagcaaactcccctggaagaacggagttatgagttggtcagcagaggaggctggggacaggcagtttttggtcttttacctctgatcttgtccccaacctaagccagctagctgcgtgctcccactccctctgccgcacgccgcccgtctatgttcccggactttgtccagtgcagtgccctcttcccttcctgcactgaggagattaactgaagtgacagattagagttagaagtggcccaaaggagcatctggtacaaccccctttggttagagaagggaaagtgacttttccaaagctgcacagctagacagtcataatggctaagctctgggggtgcttttgatgtgctagggatacttccaatgctttaactcacttaatcctcacaacccgagataggtactgttaccatcctctctgcagacgaggaaaccgaggaccaggaggttcagtaaatggtccaagtactcctagctagtaaggaatggatctacagcctgcctcccaggtttctggcttgtggggggcagagtttgtccctctgtcatcagaggcagccttccaggcacagctctggtcacctctggtcacaactggaggtcaccacagccctccccagcgctctgtaggctctcagctttgtgcttcctcccacgggtactagctccagctgagcttgcaggaaacccacttcctgaagccaggacttccccatgggaagtgcaggggccactgggcagcctgagggctgaccctgctcaggacactgtctgtctcaggaactcatggcagtggtttaccttgtcaggagtgcatggacgggctgcccctcccattccttcaagcatcactcagagagccctggcctggctctaggcttgggactgcggctgccacaggaagggggcatccccctactttgggtgttgggtcagatcctgcccccgtgcccgccagggctcaggttcctctgagctggtcctgggccaggacgcatctgcatggcggtggtggggaggaggggtgcgccatggcctggaggggagtgtgtgttggggtgtgtgtgtggaggttcttttgagtcacacacaaagcattgtgctgagacactgcattcctgctggctgggcttcctgtttccagatgcattcctgtcccagagtcaccacagagactgtttggaatcccgccccacattctccaaattcagggcgcgatctggcaaaggctccctcccccaccctcttactttggagggagtctgggctccctcctacccagggagggctggcagggctctggcacggccggggtgtgattccacacatcttcttggtcttgcataaggcagttcctggagacccagcactctggttctctctctgcctgtgagaagcggaatgggtactgtctaggaggactgggcagggtgggggcaacccagaggacccatggctagcagggaagggcctgggcttgaatgtgactctgttgagacatggccagcaattctggcacttggctgtcattcggctggcctgcgcagagattggctgtgggcctcagtttccccattttataaagttttaaaatctg

SEQ ID NO: 378619 - DNA, 3956 bp, Homo sapiens
cagagtcgggtagacggcagcgggagcggtggcgtctccccgccttccctccctcccgggcctgggcgcccagccggacaggtgagcggcagccaggtgagcgcgcccacctgcgcctctccgcgcggcccgccctccccggcgccgggctcctctccgcgcccctgtcggcgcggaaccctggcctcgtccgcggcccagctccctggagcctcgcatcagcgggggcgcccccgcgagctgcgctctccccggccggagcgctcctcctccagcccccagcccgcagggtactttgccctcggagcgaaggaggctccagaactggtagagccgggccatcgggctgggcacctccccgcggcgcccgcagcgcggagtccactgaccggctcaaaggtatggcgttgacggtggatgtggccgggccagcgccctggggcttccgtatcacagggggcagggatttccacacgcccatcatggtgactaaggtggccgagcggggcaaagccaaggacgctgacctccggcctggagacataatcgtggccatcaacggggaaagcgcggagggcatgctgcatgccgaggcccagagcaagatccgccagagcccctcgcccctgcggctgcagctggaccggtctcaggctacgtctccagggcagaccaatggggacagctccttggaagtgctggcgactcgcttccagggctccgtgaggacatacactgagagtcagtcctccttaaggtcctcctactccagcccaacctccctcagcccgagggccggcagccccttctcaccaccaccctctagcagctccctcactggagaggcagccatcagccgcagcttccagagtctggcatgttccccgggcctccccgctgctgaccgcctgtcctactcaggccgccctggaagccgacaggccggcctcggccgcgctggcgactcggcggtgctggtgctgccgccttccccgggccctcgttcctccaggcccagcatggactcggaagggggaagcctcctcctggacgaggactcggaagtcttcaagatgctgcaggaaaatcgcgagggacgggcggccccccgacagtccagctcctttcggctcttgcaggaagccctggaggctgaggagagaggtggcacgccagccttcttgcccagctcactgagcccccagtcctccctgcccgcctccagggccctggccacccctcccaagctccacacttgtgagaagtgcagtaccagcatcgcatggggctggcgagggcctggcacggggctgcatagtgcctggagtcaccagcacctacagacggatccccgacgctgcccacgggtgctcatcctgggagagaggtgacaagttcagaggtgtcggcagggaggcactctttctcaaactggcctcccgggactcaggagtggagatggcagttggggacagccccctggccgccttaccgggcctttctcaggactccctggactttgaatcctcagggagttctgagccccccgcccaggtaggccgactcctggccagccagaagctgggggaggtgttggagcggtcccgccggctcccaacagctcccaccagcttgtcaggacaacaccgctccctgcggctggcaagcaagcctgagcgtgaagtgccccttggagcagggcaacaggagtccatggaggcagacacagacctagaggcaggcctggaagaagaggcggtggggggcctggggcctggagcctgggcctgcctccccgggcagggtcttcgctatctggaacacctgtgcctggtgctggagcagatggcaaggctccagcagctctacctgcagctgcggatccagaggcccccaggggatcccggcgaggaggagtcgacccgagcccctttaccgtccccgttacacaccccaggcaatcgggggcaggggccatgggagctgctaagccagacagagcacacaggagcaaaggctgcttcacccccaaaggtggaggtgcccagtgccaaccctcccaggctgccagaaaccccagtggagccaacgtaccacttgccatcctcccagggacacaaggtaggggacaggtatatgtggggcaggtggtgggctggggtggggggaggggaggtgggggatgcatgggcaccctgggggccagcaactctggggaaatgacaggattgattcctgtttggagcaggcgacttgtcctggctgtggcgacagctgtctctgggagcttggtcgggggtctgagtgtggggagggctctgggtgacccctcatcctctgctcagcgggatatctcccactgggacaaggtcaaggtcctgctcaaccggatctgccggagaagccaccaccaccctgagccccctgcccctcctgatggctctgaccccaggtgagccccgtgcccagcccaggttagggcacggagaggagactgataagccaggatgctgagattgtcatgccagttgtcattattgtccccgcaaaacttgagaggcagtctgggaggggctgctagaagaaacagtagttaaaacaccccatttacagataaggaggcagggttctgggtggggttgggggtagttgcttttccaaagccgcacggtgagtcagtgacagctaggaccagaatgtgggaaatctgcctaccctagctcagcaacccctcaccctcaatgctgacatttaggccaccttccaggttcgtggggagagcaaggtggagcacaaaggatttcacagtgggtgaaggccatcatgcttcggggcttgtattgaatcgttctccaggaggaagaaataccaagtcatttaacagccccgggctgcgcccacacccagctacccaccagcagataaaccacgttctctcaactctagggccattgttagttttatttcccccttctagcctaatgtcttcttttcattccacaggatcgagtccagggacctccctgaaaggcctcagtgccgcccccaccggaagacctttatgccatcattagtggttaagaagcaacgagcaaaaaacctttctgtaggctgagacctctcggtgcacctggtgaccctgggtggaggggacttgctgtgaagtcttcctcgccctctgccctcttgctgcttctccacattgccaggaaaagctgctgacgcctgccctcctctcttgagtcgagggctgaatctttctcctctaagcagtctggtcaggaaccttggtttcttgagaggcccccaagatgccgcagctccagggctcttcctcctcaccagaaatccctgggcttccacaatgtgaactcactcattgtcaggtgtccgtggagtgtttttggcatggtgacctgtctgggcccagcatgttgcagatgtgtatttatgcgcaatggtatgcatatctctgtgtgactgtcagtgttgcaagctggctggatccaaccatctcttctgaaataatgcatccaaagggttgatattctgggggaggtcactgcagaaggatggaactgacctttattccccagtgggcagttactgagctttcctcctcagagccatgctggcagccctgggacagagaacggtgtggctttggctgcctctgcatggaatcttgccccggactcctgaagactgcacaaggaatgaggaagatcagggacaacctgggaactgaataactttcaaagccagtgctcagcttctctgctccgtactagcgtttacaggtcttaattcaaaccagatgcctgtactagtttttagaccccaagtcaacctttctgagccacagcttcccgctgggaataatgatgcctgccctatctacctcacagacttgttatgaggataaagtgagattaaactgcctcaaagtgctttgt

SEQ ID NO: 378620 - DNA, 1630 bp, Homo sapiens
cagagtcgggtagacggcagcgggagcggtggcgtctccccgccttccctccctcccgggcctgggcgcccagccggacaggtgagcggcagccaggtgagcgcgcccacctgcgcctctccgcgcggcccgccctccccggcgccgggctcctctccgcgcccctgtcggcgcggaaccctggcctcgtccgcggcccagctccctggagcctcgcatcagcgggggcgcccccgcgagctgcgctctccccggccggagcgctcctcctccagcccccagcccgcagggtactttgccctcggagcgaaggaggctccagaactggtagagccgggccatcgggctgggcacctccccgcggcgcccgcagcgcggagtccactgaccggctcaaaggtatggcgttgacggtggatgtggccgggccagcgccctggggcttccgtatcacagggggcagggatttccacacgcccatcatggtgactaaggtggccgagcggggcaaagccaaggacgctgacctccggcctggagacataatcgtggccatcaacggggaaagcgcggagggcatgctgcatgccgaggcccagagcaagatccgccagagcccctcgcccctgcggctgcagctggaccggtctcaggctacgtctccagggcagaccaatggggacagctccttggaagtgctggcgactcgcttccagggctccgtgaggacatacactgagagtcagtcctccttaaggtcctcctactccagcccaacctccctcagcccgagggccggcagccccttctcaccaccaccctctagcagctccctcactggagaggcagccatcagccgcagcttccagagtctggcatgttccccgggcctccccgctgctgaccgcctgtcctactcaggccgccctggaagccgacaggccggcctcggccgcgctggcgactcggcggtgctggtgctgccgccttccccgggccctcgttcctccaggcccagcatggactcggaagggggaagcctcctcctggacgaggactcggaagtcttcaagatgctgcaggaaaatcgcgagggacgggcggccccccgacagtccagctcctttcggctcttgcaggaagccctggaggctgaggagagaggtggcacgccagccttcttgcccagctcactgagcccccagtcctccctgcccgcctccagggccctggccacccctcccaagctccacacttgtgagaagtgcagtaccagcatcgcgaaccaggctgtgcgcatccaggagggccggtaccgccaccccggctgctacacctgtgccgactgtgggctgaacctgaagatgcgcgggcacttctgggtgggtgacgagctgtactgtgagaagcatgcccgccagcgctactccgcacctgccaccctcagctctcgggcctgagcccgccatgccctcagcctgcctcactgctgggccagggtcatgcctatataagttggcatggcagggacaatggtgggcagttgctcttacatgagctaagtttggagacctgaggcccctttggaacgtgttatccccccggtcgggctagtcgggggggtaccgag

SEQ ID NO: 378621 - DNA, 1689 bp, Homo sapiens
cagagtcgggtagacggcagcgggagcggtggcgtctccccgccttccctccctcccgggcctgggcgcccagccggacaggtgagcggcagccaggtgagcgcgcccacctgcgcctctccgcgcggcccgccctccccggcgccgggctcctctccgcgcccctgtcggcgcggaaccctggcctcgtccgcggcccagctccctggagcctcgcatcagcgggggcgcccccgcgagctgcgctctccccggccggagcgctcctcctccagcccccagcccgcagggtactttgccctcggagcgaaggaggctccagaactggtagagccgggccatcgggctgggcacctccccgcggcgcccgcagcgcggagtccactgaccggctcaaaggtatggcgttgacggtggatgtggccgggccagcgccctggggcttccgtatcacagggggcagggatttccacacgcccatcatggtgactaaggtggccgagcggggcaaagccaaggacgctgacctccggcctggagacataatcgtggccatcaacggggaaagcgcggagggcatgctgcatgccgaggcccagagcaagatccgccagagcccctcgcccctgcggctgcagctggaccggtctcaggctacgtctccagggcagaccaatggggacagctccttggaagtgctggcgactcgcttccagggctccgtgaggacatacactgagagtcagtcctccttaaggtcctcctactccagcccaacctccctcagcccgagggccggcagccccttctcaccaccaccctctagcagctccctcactggagaggcagccatcagccgcagcttccagagtctggcatgttccccgggcctccccgctgctgaccgcctgtcctactcaggccgccctggaagccgacagcatggactcggaagggggaagcctcctcctggacgaggactcggaagtcttcaagatgctgcaggaaaatcgcgagggacgggcggccccccgacagtccagctcctttcggctcttgcaggaagccctggaggctgaggagagaggtggcacgccagccttcttgcccagctcactgagcccccagtcctccctgcccgcctccagggccctggccacccctcccaagctccacacttgtgagaagtgcagtaccagcatcgcgaaccaggctgtgcgcatccaggagggccggtaccgccaccccggctgctacacctgtgccgactgtgggctgaacctgaagatgcgcgggcacttctgggtgggtgacgagctgtactgtgagaagcatgcccgccagcgctactccgcacctgccaccctcagctctcgggcctgagcccgccatgccctcagcctgcctcactgctgggccagggtcatgcctatataagttggcatggcagggacaatggtgggcagttgctcttacatgagctaagtttggagacctgaggcccctttgtttgtctcgtggtggcaggttgggactgttggacggggggatacctactggcggctttctggggatggtggtatgggtggatgtttgcacttggtgaggttaggtacatggggggagggcggtgtggcgggatgatgtattatggaaaacgtgtggaaaaagattcatgggggctaaggg

SEQ ID NO: 378622 - DNA, 732 bp, Homo sapiens
ccgtgagggaagtggggagaagctgtcaccccaacttgagttcaagaagactccttggaaggagaagaccaccaaattgagaatgaaaagtaagctgtagctattcttgggatggggcagtggccccatgctctggtccctggcctcagcagctgtcccagctcataaccccaagtgccggctttcccatcccgtctcaggatctgcgactcgacgggcaccagggctttcttcagcgaatatctaaactctctcaagtttctccagagactttcatacatctacaaagatgacctcattctgtaacagcatggatttaacccgctcttcaatgtcactcccccacagaatgcactgttcatcgtcaccctatccactatcgtcagtcttactaaaagtcaaacatcaacattagtactaactctggcattgtagcgatatctccaagagaaaattgttttgaacttttctgggaaaagttcacatacgttttcttaaaacgctagtttttacaatctcgctaccatgtggctttcctgaaggattaaatttctaatgtccttcaactagagagaggtaaaaatttttctagaacatgaattgcccactcccctcattccttctcagaaactaactgaattccagtgggtgtgcctggcaaacccaaaagcagtttctgttcaggatgctggtcttacctgtgaaggcgttcatgaacgtggagagggaccg

SEQ ID NO: 378623 - DNA, 969 bp, Homo sapiens
gggtggctcggtgggtggccttacagttaatttaggatagttccactaggcagttcacttgcagacaaattagctaaacagccttctcctttaaatattttccatgtcacagtgaaactctttacaatacaataaaggtacagttttaattacacgcttcctgacttttgtttagttgtagttttaaaacatttgctggcactctttttttcctttggctgggcagtaatagctggttctaagtatctggctaatgaatttaataatttcctgaactgggacttaaaggacctctgcaaaaaaaaaagaaaaaagctgctttttctttagtgtcctgcaacttcaaatcccatccacaacgctgcccattaggctaggcactggcacttgaactaaccctgaacgaggctcacaagccctcttgcttctctgttccatgctccttaaaggtggtacttgttaggtctatgaggcctgcatttgaaaatcaattctggcaattcttcttggagaaaggcaacgtaatgtttgctcaagtgacatactccaataataaataaacaccgtgcgtctgttggcagattatttcagtgccttgttagcaacaggtacctaattgcttctcattttcctgagatgattcaattgcactaaaccaggagagacaaattagattcagtggatcaccagcatgttctccaactaagttaaaagctttcctaagaggcaaagaagtttgtggatgtgataggagaaagatgaacaaacctagcacttgggggcctaggccaggggagggggtgccacaattacagtagtagtgaaacgccaggggacgttctttctggagggaccttagtttggagagaaaaacttaaaatgccacaggaaatattctacaaataggggaccaaataattttgagctcatttctcttaaggtctatcaaggtagatcttaattaaaacc

SEQ ID NO: 378624 - DNA, 305 bp, Homo sapiens
ctttgttgatcccgggacacaatagagctccacattgactagcttcttctttcatgtattaattattttcttcatacagaccctcttccaccttctatgaaggtagtccataggtattttgtggagcttttttgtgtgtgtggttagaatgaagagaatgtttttcattctgtcttctaactggcaatatatagaagttcttaattcataggttgcaattttgtacttttatattaacaatgaatctttatgtataatagaaaatatgatgagaaatgaagaaaataaaagtcatttacaatcca

SEQ ID NO: 378625 - DNA, 901 bp, Homo sapiens
gtgtttaaaagcaaacaccctgcctttcttgaaaccacagaaactgcttgtgaaacagccgatagggcaggctgccaaatacagactgttaaaaccaatctcttaatgacaaaatgtcaaacactgatgttaaaccttcattatgactgtggtgtgaggatttttctcaataagaaatgtttaggtgctgaactcccagtttcacattcagaatgcttctattatcaaattcctcttggtacatcatttccgagaggcttgtgtagctaatccactatctactgtacaggaaagattttaaataaacctattcccattcatcctcatctgtgtttttttgttttttgttttaatttcaagaagtaattttcttttgaggtgatttggaccaaccgtctcactagcttttcccatttaagataggagaactagattcagaattgtgtctttttcctaacagaagactggggccttaatctttaccccccaggctctgattaactgacttttctttttttagatggcatagaatcttctgtctgtctagagaattttgtttcttgccaggcactgtcaggaattagtattcattcctccctgctatcttcctgaagagctgtgaacctgctggtagcctgatggataagggtacagttgtttgtttatttattgagacagggtctcattctctcacccaggctggagtgcagtggcatgatcttggctcactgcaacctccgcctctcaggctcaagctatcccccaaccttagcctcctgagtagctgggaccacagtcatgtgccacaacacccagcaaatgttttgcgttttttgtagagacagggtttccccatgttgcctttgctggtcttgaactcctgggctcaagtgatccgcct

SEQ ID NO: 378626 - DNA, 375 bp, Homo sapiens
agttagatttagttatgtttgattagttagattcagtctaatttaatttaattaacttccgctgtgaggtcctgtaacaccctacactttccctatcataggaggcaatacagtgatacttctgcaagttcagctcagcccttggaccatacaatcctggattcaaattgcacctctacctcctagtggagtttgtcaagttacttaacctaagttcccctttccttatagatgaagtgagattaataaaacagggttatagaagagcatgtatattaagtgcctatacagtgcctgagacatcgtaaacaataaataagtactagatgctgtcatcatcaccatcaccatcaccatcaccaccaccatcaccat

SEQ ID NO: 378627 - DNA, 152 bp, Homo sapiens
acacaaggccatttcatgtcctcaatctttgttgatatgctttgcttattttaatggcttgcatgcattttttattgtgctgttgataatagttttacataattcataatgatacacaataaaagtttcattgcgttcacattcctttgtgg

SEQ ID NO: 378628 - DNA, 227 bp, Homo sapiens
gatatttaaccctatatgtcaaattgtaaaactgtgttttgttgagctgttcgttctgctattccataccaaacccctatcaaaatactccataggaatctcgtgaattacagacacacacacacacaccatgtatgtagctattcaattctagaacttctaataatgacctgaactccttcagaacctattcctaaggacggcagatttcatcagccaccattttg

SEQ ID NO: 378629 - DNA, 600 bp, Homo sapiens
tttcaatgtaaatgaaacagccttatatggaaaaaaaaatactatctaggactttcatagctagagaaaggtcaatgcctggcttcaaaggacagtctgattctcttgttaggggctagtgtggccagtgacttaagttgtaactagtgctcatttaccattctgaaaatcctagggcccttaagaagtatgcaaaaatctactgtgtgctgatcattgaaacaggaaagcctgtatagtagcatatctgtttacagtatgttttactgaatattttaagcccactattgagatctacagctcagaaaaaaagatttctttcaaaatattactgctcattgagaatgtgcttagtcaccaaagaggtctcatggagatgagtaagattaatgttaacatctgttctgcagcccatggatcaaggagtaatttcaactctcaaatcttacttaagaaatgcatcttgaggctgagcacggtggctcatgcctgtactcgcagcacttcgggaggccaaagctggtggatcgcttgagctcaggagttagagaccagccggggcagcatagtgagaccaccccctccactgccagtctctta

SEQ ID NO: 378630 - DNA, 551 bp, Homo sapiens
ggggaaatggcaattaaggagactcagtccctatcctcacagaacaccccatctgacacggaaatagctcctggcccgcaatgtggtaagatgcagtaatacgtgcaaggcccctgacttagtggcaatgatgtttaagccgagatctgaaggataactaacaacggcgtgccagagaaaagagtagcgggtggagagaggaggccaggggaatatttctgggcttggtaagtaagccaggtccctgccagacatggactgagaagagcaaagccaggagtgacagctgatgattattttttaactgaggaaggaagatccttgagaacggaacctcttgggaccttctacccagaacaccagagcacctcactgggatcagagccaggccatcgggtggattaagcaactaaaattgattgtcctgaaccatgagtctgtctgtttatggggagagaaactttgagatgaattaatccacaggtccaatgggactttgacattttaatttgtagaaataaaacttgcctttgattttgcaaaaaaaaaaa

SEQ ID NO: 378631 - DNA, 479 bp, Homo sapiens
cgaacctacttgagtcttgggggcattttcacgggttccctaaagggctctggaggactcctccagccatgactcatggatgcatctgcttcctattgccactcctcagcctccagtggtctcagtcttaccgcagacactccctgctggagcccctccacgttcaggtgaccagtgcccataggcacaacttccaatggcctggagcccactctctctagcaaggtgcttgcacacctggacatggagaacacccctaaaatgcagccacctctactgtccatgcaggctctgtgtctcacagctgcagggaacactgtcacctggaggtcccactcaccaggcctcagtgaagacggtcacatgctctgcatcctcccacttcatggcctaccccagctctccccacagatatctctgcacaaaccctccttgcctctctacacatcctctccctctgtggtccctagaagaacagg

SEQ ID NO: 378632 - DNA, 289 bp, Homo sapiens
ctgagctccagactagaaagtcactgttgaccattccctcctttctgaaaatactgccgtctattggctgccctaattccagaatcaggttttcctcctacttttttttaccaaatgtgtctcagtcttctgaaatctgtcactctcctgcttagagcccttctgttgttggaattcagtatgaattataaatccagggggtacctggctcccaccgtggtgcttccctccttgcactagctccagctatcctcatctgactcttctttcatttctacagacttcgctc

SEQ ID NO: 378633 - DNA, 518 bp, Homo sapiens
aaccaggaattgtgggaggttttcaatgtttaagaaactgtttaagaagttttctttatgatcaaaatatgtttattctctcaatttctgaaccaataattggcttgtcattttaaagccttaacaaagttattgtggcaaaatattttcttgaaaaataatgcatctaattttcgacttcctgtggccctactactatccttgcttcccaaaacaaaggtctccaactcaggcaaatacagtctctgcaaagtggaactcaaaatattaacgagtcactgcaagaaagaatacagtgtaaaggaaatttggatgggactgcaagtaaaatcaatgaagtctatccaaatgtagatcctggaggaatacaatctgtgtctcttacatcaagaaagacttagtactctccaagaataccattttgtaccaagttcaaactggaggatcacaagtctttacatgtgacttaggaaacaggaagaagcaaccaaaccaatctaagtgaggcttcattaagg

SEQ ID NO: 378634 - DNA, 98 bp, Homo sapiens
tcttgatttttagttatttggctggtagcacagagacagaataaaatccaaatttcttgattcacaggctattactatttttactgccgctctgctgc

SEQ ID NO: 378635 - DNA, 4010 bp, Homo sapiens
aagcttgcggccgcagctccgatttctccgtggacgatggcagccacgattcaggccatggagaggaagattgaatcgcaggctgctcacctgctttccctagaaggtcaaaccgggatggccgagaagaagctggctgattgcgagaagacagccgtggagttcgggaaccagctggagggcaagtgggccgtgctggggaccctgctgcaggagtacgggctgctgcagaggcggctggagaacgtggagaacctgctgcacaacaggaacttctggatcctgcggctgcccccgggcagcaagggggagtcccctaaggtgcctatgacatttgatgatgtggctgtgtagttctctgagcaagtgtggggcaagctggaggactggcagaaggagctctgcaagcacgtgatgaggggcaactgcgagatgctggtctctttggactacgccatctccaagtccgaggtcctctcccagattgaacaagggaaggagccctgcaactggcgccgccctgaccccaagattccagatgttcctgtggaccccagtccagatgcagaaactgaggcccagcagagattgagtaacttatgcgagttgtcactcacctcacacgccccagcaagcatccaggagagcctgcctcttggaatagaaatcagacatcccacaggaactctgaggttttcccactgctgccagatgtatgcaaggaacacgtgatcttcgtaattccagagcggggcaaactgcttggcacctcttcaataggtgacattcaatgaagatctctggcttcctgctctgtttgttctggttgccctggaaagcctgctgctcagcccatgccccgggacttcctccaccctcaccaggacattctttccatctcttgtctcctgtgtgcaagtccctttctcctggattccatgtcttgaatgtttcttaatttacttcctcattttggcagaggatgtcctccagttgttttctgggaatgatggttaacataacagacaccaagaaagggaagaggagccgacagcagagggggaagctgaaaagacgcacaaagaatggccataaaagatatgagtatgttgagtgattagtgatcggaaactacgagtgatatggtacaggtgtttgtagaagaacagtaaagccattgatcaggcaaccccagctttccagacagtcacttttcccagtggtcatacctggtctggaagattccccatcatctcgaataaagctgttgttgcttttaactccatggagagaccgaatggagtgagcccagcagggcatgctgggcaagagaggtcccccgagtcccaaataagaatttcaactagtataaaacgaggcagcgaacccacacgtggaagtctgataccgcttgcagaagggaattgaatagatgtctccctattggtaaggatgtggttttattgacttgaaataacaaagcccgcaagcaacaactgatcatccgcgggatgctgccacaaggaataattgagcactcattcagacacaggggaaaccactgcctctttcagtctttctcccagattccaacagtcagtgttacagcatttcaccttgttcacctccctgagaagacgttgcagctcactcaccccagtgggcactgggagcctctgctcaggtgggagacagatgccccccacatgcacatctggtgtttatgaagcagatactggggcttcataaacacagaaggggcagggaagtagccccagggcatagtgtggggcctcctgactaaaagtagcttgcaaacccctgcctataacagccacttcctggcagtcattgtgccacttaggagccctcctcaccgctcttcctttagttccttcactctgtatagaccctgccagagcagctcagggtggagcagctgcagccatgggacctgctccaggcaaggccctatgctacacagtccctgggggtgaggattccagaggagtcaattccctacccgcccttccaggggatggccgagatgagcgttcccacagggaaagtgaaagttgcaaggctgttgcggaaacaccaggggttccatctaggtcttgctgctcatctcacagaaagccagtcactgagacaagtattgtcagggaagaaggctttatccaggtgctacagacagggtgaacaagagatcagtctcaaatccatcatcatcaactgactaaaattaggggtttatatagcagggaagaaatgtaactacatgtgggaaaacagggattaacgaggggcaaggaagaggagttggccaacaggcagcaggtggtcacctggggaatcatgatgggtgaggggtctggcttctcactttccagatgtggggatctggtaaatttcagtttcttgataccgtctgggaggattgctggctggtttcctgagaaaggaattcagatgacataaatgtaaatttctccttgggtttcaagactgagagggtcaatttctaggtttattcaagaaaaaccataaacatcagttctatgggacaattgggcccatttcaaggctctgaggataagggttaatgaggggacagagtcgcctggagaagttcactggggcctacaagaaactagagaggcttcctggcaaagctctatgctgtctatcctctcttctctccttgcaggaagattccagtataatagacccgaggtgaaaaggcttttgttcaataagtagaaaactgaaggggggtgggaggcacatggatttgaaccagagaccgcttggcctgcaggcaaatgctgtaccttcagttgcacccctcacttgttacagctgtttctgataagcacttgtgcagccccatcagcacctcgatttcttcttggtgagtccatgggaacagccccactgcaaacaacccattcctgctctcctctttcctctaaacctcaacctcctcctacctggcagtccacaggcctacagcttctcctcagtgggaaagacatcagcttggaaaaccacttggaaagccaacgttatcctagaaaagctttttaaatgacccagcaggacaagtctccggatggccttggccaacccggtgcttccctcttttcttggttgtagttctcagaataactagagaatgtactgggagtgttgtcctgagataaggaggaactgtcctaaacctggactctgttcccatcacacctagaacaggatgtcctgcaacgctttagcccaatgatccaagttgcccttggggtataaaacttgacagcagagggcgttcagggtccctcagctgcagtgtgaagtgggacacacaggtgagactccatctgccctgggcaggttcctgagccttgggggaccagttcaccctacatcccaggcttctgttgtcccttgcctgcctgtaaggaataaagttgctttgcttaacttgctgtgtgagtgttctgcatcactggactcgagcaagtggtacaaactgcagattaataactggtacgtggtgaatctgcttcctaagtgtttgctgaattttgcggcccaggagatcatctggtgtttctgtgatgtgggaagattaaaagaaagaaaaatcaaacctcacacctaacaaatcagaatctcaaggtgggacccaaggcatctgtatacttgaccaccctcccaggtcattctggttctcagacatgtttggcaactttgattttagtctatacttgcatgttatatgcctgaaagaaaaaacaaagactaaaggcctgcatgagttcacacatcaccttaataacaagatcatagctagaaccacattcctagttttgggactttccattgccgcagcccaaaggatgactagattcctttccatctcttctccctccacttccttcccaggaacctcccctcaacctgccataggacctggggcaacctaaaggtaccaattggtatgtggtact

SEQ ID NO: 378636 - DNA, 3479 bp, Homo sapiens
aagcttgcggccgcagctccgatttctccgtggacgatggcagccacgattcaggccatggagaggaagattgaatcgcaggctgctcacctgctttccctagaaggtcaaaccgggatggccgagaagaagctggctgattgcgagaagacagccgtggagttcgggaaccagctggagggcaagtgggccgtgctggggaccctgctgcaggagtacgggctgctgcagaggcggctggagaacgtggagaacctgctgcacaacaggaacttctggatcctgcggctgcccccgggcagcaagggggagtcccctaaggtgcctatgacatttgatgatgtggctgtgtagttctctgagcaagtgtggggcaagctggaggactggcagaaggagctctgcaagcacgtgatgaggggcaactgcgagatgctggtctctttggactacgccatctccaagtccgaggtcctctcccagattgaacaagggaaggagccctgcaactggcgccgccctgaccccaagattccagatgttcctgtggaccccagtccagatgcagaaactgaggcccagcagagattgagtaacttatgcgagttgtcactcacctcacacgccccagcaagcatccaggagagcctgcctcttggaatagaaatcagacatcccacaggaactctgaggttttcccactgctgccagatgtatgcaaggaacacgtgatcttcgtaattccagagcggggcaaactgcttggcacctcttcaataggtgacattcaatgaagatctctggcttcctgctctgtttgttctggttgccctggaaagcctgctgctcagcccatgccccgggacttcctccaccctcaccaggacattctttccatctcttgtctcctgtgtgcaagtccctttctcctggattccatgtcttgaatgtttcttaatttacttcctcattttggcagaggatgtcctccagttgttttctgggaatgatggttaacataacagacaccaagaaagggaagaggagccgacagcagagggggaagctgaaaagacgcacaaagaatggccataaaagatatgagtatgttgagtgattagtgatcggaaactacgagtgatatggtacaggtgtttgtagaagaacagtaaagccattgatcaggcaaccccagctttccagacagtcacttttcccagtggtcatacctggtctggaagattccccatcatctcgaataaagctgttgttgcttttaactccatggagagaccgaatggagtgagcccagcagggcatgctgggcaagagaggtcccccgagtcccaaataagaatttcaactagtataaaacgaggcagcgaacccacacgtggaagtctgataccgcttgcagaagggaattgaatagatgtctccctattggtaaggatgtggttttattgacttgaaataacaaagcccgcaagcaacaactgatcatccgcgggatgctgccacaaggaataattgagcactcattcagacacaggggaaaccactgcctctttcagtctttctcccagattccaacagtcagtgttacagcatttcaccttgttcacctccctgagaagacgttgcagctcactcaccccagtgggcactgggagcctctgctcaggtgggagacagatgccccccacatgcacatctggtgtttatgaagcagatactggggcttcataaacacagaaggggcagggaagtagccccagggcatagtgtggggcctcctgactaaaagtagcttgcaaacccctgcctataacagccacttcctggcagtcattgtgccacttaggagccctcctcaccgctcttcctttagttccttcactctgtatagaccctgccagagcagctcagggtggagcagctgcagccatgggacctgctccaggcaaggccctatgctacacagtccctgggggtgaggattccagaggagtcaattccctacccgcccttccaggggatggccgagatgagcgttcccacagggaaagtgaaagttgcaaggctgttgcggaaacaccaggggttccatctaggtcttgctgctcatctcacagaaagccagtcactgagacaagtattgtcagggaagaaggctttatccaggtgctacagacagggtgaacaagagatcagtctcaaatccatcatcatcaactgactaaaattaggggtttatatagcagggaagaaatgtaactacatgtgggaaaacagggattaacgaggggcaaggaagaggagttggccaacaggcagcaggtggtcacctggggaatcatgatgggtgaggggtctggcttctcactttccagatgtggggatctggtaaatttcagtttcttgataccgtctgggaggattgctggctggtttcctgagaaaggaattcagatgacataaatgtaaatttctccttgggtttcaagactgagagggtcaatttctaggtttattcaagaaaaaccataaacatcagttctatgggacaattgggcccatttcaaggctctgaggataagggttaatgaggggacagagtcgcctggagaagttcactggggcctacaagaaactagagaggcttcctggcaaagctctatgctgtctatcctctcttctctccttgcaggaagattccagtataatagacccgaggtgaaaaggcttttgttcaataagtagaaaactgaaggggggtgggaggcacatggatttgaaccagagaccgcttggcctgcaggcaaatgctgtaccttcagttgcacccctcacttgttacagctgtttctgataagcacttgtgcagccccatcagcacctcgatttcttcttggtgagtccatgggaacagccccactgcaaacaacccattcctgctctcctctttcctctaaacctcaacctcctcctacctggcagtccacaggcctacagcttctcctcagtgggaaagacatcagcttggaaaaccacttggaaagccaacgttatcctagaaaagctttttaaatgacccagcaggacaagtctccggatggccttggccaacccggtgcttccctcttttcttggttgtagttctcagaataactagagaatgtactgggagtgttgtcctgagataaggaggaactgtcctaaacctggactctgttcccatcacacctagaacaggatgtcctgcaacgctttagcccaatgatccaagttgcccttggggtataaaacttgacagcagagggcgttcagggtccctcagctgcagtgtgaagtgggacacacaggtgagactccatctgccctgggcaggttcctgagccttgggggaccagttcaccctacatcccaggcttctgttgtcccttgcctgcctgtaaggaataaagttgctttgctta

SEQ ID NO: 378637 - DNA, 4087 bp, Homo sapiens
aagcttgcggccgcagctccgatttctccgtggacgatggcagccacgattcaggccatggagaggaagattgaatcgcaggctgctcacctgctttccctagaaggtcaaaccgggatggccgagaagaagctggctgattgcgagaagacagccgtggagttcgggaaccagctggagggcaagtgggccgtgctggggaccctgctgcaggagtacgggctgctgcagaggcggctggagaacgtggagaacctgctgcacaacaggaacttctggatcctgcggctgcccccgggcagcaagggggagtcccctaaggtgcctatgacatttgatgatgtggctgtgtagttctctgagcaagtgtggggcaagctggaggactggcagaaggagctctgcaagcacgtgatgaggggcaactgcgagatgctggtctctttggactacgccatctccaagtccgaggtcctctcccagattgaacaagggaaggagccctgcaactggcgccgccctgaccccaagattccagatgttcctgtggaccccagtccagatgcagaaactgaggcccagcagagattgagtaacttatgcgagttgtcactcacctcacacgccccagcaagcatccaggagagcctgcctcttggaatagaaatcagacatcccacaggaactctgaggttttcccactgctgccagatgtatgcaaggaacacgtgatcttcgtaattccagagcggggcaaactgcttggcacctcttcaataggtgacattcaatgaagatctctggcttcctgctctgtttgttctggttgccctggaaagcctgctgctcagcccatgccccgggacttcctccaccctcaccaggacattctttccatctcttgtctcctgtgtgcaagtccctttctcctggattccatgtcttgaatgtttcttaatttacttcctcattttggcagaggatgtcctccagttgttttctgggaatgctaatatgcaagtgaaccagtgacctgcagttctgcccacacagggttaataaccaatcagattctctcttttcaagatggttaacataacagacaccaagaaagggaagaggagccgacagcagagggggaagctgaaaagacgcacaaagaatggccataaaagatatgagtatgttgagtgattagtgatcggaaactacgagtgatatggtacaggtgtttgtagaagaacagtaaagccattgatcaggcaaccccagctttccagacagtcacttttcccagtggtcatacctggtctggaagattccccatcatctcgaataaagctgttgttgcttttaactccatggagagaccgaatggagtgagcccagcagggcatgctgggcaagagaggtcccccgagtcccaaataagaatttcaactagtataaaacgaggcagcgaacccacacgtggaagtctgataccgcttgcagaagggaattgaatagatgtctccctattggtaaggatgtggttttattgacttgaaataacaaagcccgcaagcaacaactgatcatccgcgggatgctgccacaaggaataattgagcactcattcagacacaggggaaaccactgcctctttcagtctttctcccagattccaacagtcagtgttacagcatttcaccttgttcacctccctgagaagacgttgcagctcactcaccccagtgggcactgggagcctctgctcaggtgggagacagatgccccccacatgcacatctggtgtttatgaagcagatactggggcttcataaacacagaaggggcagggaagtagccccagggcatagtgtggggcctcctgactaaaagtagcttgcaaacccctgcctataacagccacttcctggcagtcattgtgccacttaggagccctcctcaccgctcttcctttagttccttcactctgtatagaccctgccagagcagctcagggtggagcagctgcagccatgggacctgctccaggcaaggccctatgctacacagtccctgggggtgaggattccagaggagtcaattccctacccgcccttccaggggatggccgagatgagcgttcccacagggaaagtgaaagttgcaaggctgttgcggaaacaccaggggttccatctaggtcttgctgctcatctcacagaaagccagtcactgagacaagtattgtcagggaagaaggctttatccaggtgctacagacagggtgaacaagagatcagtctcaaatccatcatcatcaactgactaaaattaggggtttatatagcagggaagaaatgtaactacatgtgggaaaacagggattaacgaggggcaaggaagaggagttggccaacaggcagcaggtggtcacctggggaatcatgatgggtgaggggtctggcttctcactttccagatgtggggatctggtaaatttcagtttcttgataccgtctgggaggattgctggctggtttcctgagaaaggaattcagatgacataaatgtaaatttctccttgggtttcaagactgagagggtcaatttctaggtttattcaagaaaaaccataaacatcagttctatgggacaattgggcccatttcaaggctctgaggataagggttaatgaggggacagagtcgcctggagaagttcactggggcctacaagaaactagagaggcttcctggcaaagctctatgctgtctatcctctcttctctccttgcaggaagattccagtataatagacccgaggtgaaaaggcttttgttcaataagtagaaaactgaaggggggtgggaggcacatggatttgaaccagagaccgcttggcctgcaggcaaatgctgtaccttcagttgcacccctcacttgttacagctgtttctgataagcacttgtgcagccccatcagcacctcgatttcttcttggtgagtccatgggaacagccccactgcaaacaacccattcctgctctcctctttcctctaaacctcaacctcctcctacctggcagtccacaggcctacagcttctcctcagtgggaaagacatcagcttggaaaaccacttggaaagccaacgttatcctagaaaagctttttaaatgacccagcaggacaagtctccggatggccttggccaacccggtgcttccctcttttcttggttgtagttctcagaataactagagaatgtactgggagtgttgtcctgagataaggaggaactgtcctaaacctggactctgttcccatcacacctagaacaggatgtcctgcaacgctttagcccaatgatccaagttgcccttggggtataaaacttgacagcagagggcgttcagggtccctcagctgcagtgtgaagtgggacacacaggtgagactccatctgccctgggcaggttcctgagccttgggggaccagttcaccctacatcccaggcttctgttgtcccttgcctgcctgtaaggaataaagttgctttgcttaacttgctgtgtgagtgttctgcatcactggactcgagcaagtggtacaaactgcagattaataactggtacgtggtgaatctgcttcctaagtgtttgctgaattttgcggcccaggagatcatctggtgtttctgtgatgtgggaagattaaaagaaagaaaaatcaaacctcacacctaacaaatcagaatctcaaggtgggacccaaggcatctgtatacttgaccaccctcccaggtcattctggttctcagacatgtttggcaactttgattttagtctatacttgcatgttatatgcctgaaagaaaaaacaaagactaaaggcctgcatgagttcacacatcaccttaataacaagatcatagctagaaccacattcctagttttgggactttccattgccgcagcccaaaggatgactagattcctttccatctcttctccctccacttccttcccaggaacctcccctcaacctgccataggacctggggcaacctaaaggtaccaattggtatgtggtact

SEQ ID NO: 378638 - DNA, 3855 bp, Homo sapiens
aagcttgcggccgcagctccgatttctccgtggacgatggcagccacgattcaggccatggagaggaagattgaatcgcaggctgctcacctgctttccctagaaggtcaaaccgggatggccgagaagaagctggctgattgcgagaagacagccgtggagttcgggaaccagctggagggcaagtgggccgtgctggggaccctgctgcaggagtacgggctgctgcagaggcggctggagaacgtggagaacctgctgcacaacaggaacttctggatcctgcggctgcccccgggcagcaagggggagtcccctaaggtgcctatgacatttgatgatgtggctgtgtagttctctgagcaagtgtggggcaagctggaggactggcagaaggagctctgcaagcacgtgatgaggggcaactgcgagatgctggtctctttggactacgccatctccaagtccgaggtcctctcccagattgaacaagggaaggagccctgcaactggcgccgccctgaccccaagattccagatgttcctgtggaccccagtccagagatctctggcttcctgctctgtttgttctggttgccctggaaagcctgctgctcagcccatgccccgggacttcctccaccctcaccaggacattctttccatctcttgtctcctgtgtgcaagtccctttctcctggattccatgtcttgaatgtttcttaatttacttcctcattttggcagaggatgtcctccagttgttttctgggaatgctaatatgcaagtgaaccagtgacctgcagttctgcccacacagggttaataaccaatcagattctctcttttcaagatggttaacataacagacaccaagaaagggaagaggagccgacagcagagggggaagctgaaaagacgcacaaagaatggccataaaagatatgagtatgttgagtgattagtgatcggaaactacgagtgatatggtacaggtgtttgtagaagaacagtaaagccattgatcaggcaaccccagctttccagacagtcacttttcccagtggtcatacctggtctggaagattccccatcatctcgaataaagctgttgttgcttttaactccatggagagaccgaatggagtgagcccagcagggcatgctgggcaagagaggtcccccgagtcccaaataagaatttcaactagtataaaacgaggcagcgaacccacacgtggaagtctgataccgcttgcagaagggaattgaatagatgtctccctattggtaaggatgtggttttattgacttgaaataacaaagcccgcaagcaacaactgatcatccgcgggatgctgccacaaggaataattgagcactcattcagacacaggggaaaccactgcctctttcagtctttctcccagattccaacagtcagtgttacagcatttcaccttgttcacctccctgagaagacgttgcagctcactcaccccagtgggcactgggagcctctgctcaggtgggagacagatgccccccacatgcacatctggtgtttatgaagcagatactggggcttcataaacacagaaggggcagggaagtagccccagggcatagtgtggggcctcctgactaaaagtagcttgcaaacccctgcctataacagccacttcctggcagtcattgtgccacttaggagccctcctcaccgctcttcctttagttccttcactctgtatagaccctgccagagcagctcagggtggagcagctgcagccatgggacctgctccaggcaaggccctatgctacacagtccctgggggtgaggattccagaggagtcaattccctacccgcccttccaggggatggccgagatgagcgttcccacagggaaagtgaaagttgcaaggctgttgcggaaacaccaggggttccatctaggtcttgctgctcatctcacagaaagccagtcactgagacaagtattgtcagggaagaaggctttatccaggtgctacagacagggtgaacaagagatcagtctcaaatccatcatcatcaactgactaaaattaggggtttatatagcagggaagaaatgtaactacatgtgggaaaacagggattaacgaggggcaaggaagaggagttggccaacaggcagcaggtggtcacctggggaatcatgatgggtgaggggtctggcttctcactttccagatgtggggatctggtaaatttcagtttcttgataccgtctgggaggattgctggctggtttcctgagaaaggaattcagatgacataaatgtaaatttctccttgggtttcaagactgagagggtcaatttctaggtttattcaagaaaaaccataaacatcagttctatgggacaattgggcccatttcaaggctctgaggataagggttaatgaggggacagagtcgcctggagaagttcactggggcctacaagaaactagagaggcttcctggcaaagctctatgctgtctatcctctcttctctccttgcaggaagattccagtataatagacccgaggtgaaaaggcttttgttcaataagtagaaaactgaaggggggtgggaggcacatggatttgaaccagagaccgcttggcctgcaggcaaatgctgtaccttcagttgcacccctcacttgttacagctgtttctgataagcacttgtgcagccccatcagcacctcgatttcttcttggtgagtccatgggaacagccccactgcaaacaacccattcctgctctcctctttcctctaaacctcaacctcctcctacctggcagtccacaggcctacagcttctcctcagtgggaaagacatcagcttggaaaaccacttggaaagccaacgttatcctagaaaagctttttaaatgacccagcaggacaagtctccggatggccttggccaacccggtgcttccctcttttcttggttgtagttctcagaataactagagaatgtactgggagtgttgtcctgagataaggaggaactgtcctaaacctggactctgttcccatcacacctagaacaggatgtcctgcaacgctttagcccaatgatccaagttgcccttggggtataaaacttgacagcagagggcgttcagggtccctcagctgcagtgtgaagtgggacacacaggtgagactccatctgccctgggcaggttcctgagccttgggggaccagttcaccctacatcccaggcttctgttgtcccttgcctgcctgtaaggaataaagttgctttgcttaacttgctgtgtgagtgttctgcatcactggactcgagcaagtggtacaaactgcagattaataactggtacgtggtgaatctgcttcctaagtgtttgctgaattttgcggcccaggagatcatctggtgtttctgtgatgtgggaagattaaaagaaagaaaaatcaaacctcacacctaacaaatcagaatctcaaggtgggacccaaggcatctgtatacttgaccaccctcccaggtcattctggttctcagacatgtttggcaactttgattttagtctatacttgcatgttatatgcctgaaagaaaaaacaaagactaaaggcctgcatgagttcacacatcaccttaataacaagatcatagctagaaccacattcctagttttgggactttccattgccgcagcccaaaggatgactagattcctttccatctcttctccctccacttccttcccaggaacctcccctcaacctgccataggacctggggcaacctaaaggtaccaattggtatgtggtact

SEQ ID NO: 378639 - DNA, 3463 bp, Homo sapiens
aagcttgcggccgcagctccgatttctccgtggacgatggcagccacgattcaggccatggagaggaagattgaatcgcaggctgctcacctgctttccctagaaggtcaaaccgggatggccgagaagaagctggctgattgcgagaagacagccgtggagttcgggaaccagctggagggcaagtgggccgtgctggggaccctgctgcaggagtacgggctgctgcagaggcggctggagaacgtggagaacctgctgcacaacaggaacttctggatcctgcggctgcccccgggcagcaagggggagtcccctaaggtgcctatgacatttgatgatgtggctgtgtagttctctgagcaagtgtggggcaagctggaggactggcagaaggagctctgcaagcacgtgatgaggggcaactgcgagatgctggtctctttggactacgccatctccaagtccgaggtcctctcccagattgaacaagggaaggagccctgcaactggcgccgccctgaccccaagattccagatgttcctgtggaccccagtccagatgcagaaactgaggcccagcagagattgagtaacttatgcgagttgtcactcacctcacacgccccagcaagcatccaggagagcctgcctcttggaatagaaatcagacatcccacaggaactctgaggttttcccactgctgccagatgtatgcaaggaacacgtgatcttcgtaattccagagcggggcaaactgcttggcacctcttcaataggtgacattcaatgaagatctctggcttcctgctctgtttgttctggttgccctggaaagcctgctgctcagcccatgccccgggacttcctccaccctcaccaggacattctttccatctcttgtctcctgtgtgcaagtccctttctcctggattccatgtcttgaatgtttcttaatttacttcctcattttggcagaggatgtcctccagttgttttctgggaatgatggttaacataacagacaccaagaaagggaagaggagccgacagcagagggggaagctgaaaagacgcacaaagaatggccataaaagatatgagtatgttgagtgattagtgatcggaaactacgagtgatatggtacaggtgtttgtagaagaacagtaaagccattgatcaggcaaccccagctttccagacagtcacttttcccagtggtcatacctggtctggaagattccccatcatctcgaataaagctgttgttgcttttaactccatggagagaccgaatggagtgagcccagcagggcatgctgggcaagagaggtcccccgagtcccaaataagaatttcaactagtataaaacgaggcagcgaacccacacgtggaagtctgataccgcttgcagaagggaattgaatagatgtctccctattggtaaggatgtggttttattgacttgaaataacaaagcccgcaagcaacaactgatcatccgcgggatgctgccacaaggaataattgagcactcattcagacacaggggaaaccactgcctctttcagtctttctcccagattccaacagtcagtgttacagcatttcaccttgttcacctccctgagaagacgttgcagctcactcaccccagtgggcactgggagcctctgctcaggtgggagacagatgccccccacatgcacatctggtgtttatgaagcagatactggggcttcataaacacagaaggggcaaaggaagaggagttggccaacaggcagcaggtggtcacctggggaatcatgatgggtgaggggtctggcttctcactttccagatgtggggatctggtaaatttcagtttcttgataccgtctgggaggattgctggctggtttcctgagaaaggaattcagatgacataaatgtaaatttctccttgggtttcaagactgagagggtcaatttctaggtttattcaagaaaaaccataaacatcagttctatgggacaattgggcccatttcaaggctctgaggataagggttaatgaggggacagagtcgcctggagaagttcactggggcctacaagaaactagagaggcttcctggcaaagctctatgctgtctatcctctcttctctccttgcaggaagattccagtataatagacccgaggtgaaaaggcttttgttcaataagtagaaaactgaaggggggtgggaggcacatggatttgaaccagagaccgcttggcctgcaggcaaatgctgtaccttcagttgcacccctcacttgttacagctgtttctgataagcacttgtgcagccccatcagcacctcgatttcttcttggtgagtccatgggaacagccccactgcaaacaacccattcctgctctcctctttcctctaaacctcaacctcctcctacctggcagtccacaggcctacagcttctcctcagtgggaaagacatcagcttggaaaaccacttggaaagccaacgttatcctagaaaagctttttaaatgacccagcaggacaagtctccggatggccttggccaacccggtgcttccctcttttcttggttgtagttctcagaataactagagaatgtactgggagtgttgtcctgagataaggaggaactgtcctaaacctggactctgttcccatcacacctagaacaggatgtcctgcaacgctttagcccaatgatccaagttgcccttggggtataaaacttgacagcagagggcgttcagggtccctcagctgcagtgtgaagtgggacacacaggtgagactccatctgccctgggcaggttcctgagccttgggggaccagttcaccctacatcccaggcttctgttgtcccttgcctgcctgtaaggaataaagttgctttgcttaacttgctgtgtgagtgttctgcatcactggactcgagcaagtggtacaaactgcagattaataactggtacgtggtgaatctgcttcctaagtgtttgctgaattttgcggcccaggagatcatctggtgtttctgtgatgtgggaagattaaaagaaagaaaaatcaaacctcacacctaacaaatcagaatctcaaggtgggacccaaggcatctgtatacttgaccaccctcccaggtcattctggttctcagacatgtttggcaactttgattttagtctatacttgcatgttatatgcctgaaagaaaaaacaaagactaaaggcctgcatgagttcacacatcaccttaataacaagatcatagctagaaccacattcctagttttgggactttccattgccgcagcccaaaggatgactagattcctttccatctcttctccctccacttccttcccaggaacctcccctcaacctgccataggacctggggcaacctaaaggtaccaattggtatgtggtact

SEQ ID NO: 378640 - DNA, 2594 bp, Homo sapiens
aagcttgcggccgcagctccgatttctccgtggacgatggcagccacgattcaggccatggagaggaagattgaatcgcaggctgctcacctgctttccctagaaggtcaaaccgggatggccgagaagaagctggctgattgcgagaagacagccgtggagttcgggaaccagctggagggcaagtgggccgtgctggggaccctgctgcaggagtacgggctgctgcagaggcggctggagaacgtggagaacctgctgcacaacaggaacttctggatcctgcggctgcccccgggcagcaagggggagtcccctaaggtgcctatgacatttgatgatgtggctgtgtagttctctgagcaagtgtggggcaagctggaggactggcagaaggagctctgcaagcacgtgatgaggggcaactgcgagatgctggtctctttggactacgccatctccaagtccgaggtcctctcccagattgaacaagggaaggagccctgcaactggcgccgccctgaccccaagattccagatgttcctgtggaccccagtccagatgcagaaactgaggcccagcagagattgagtaacttatgcgagttgtcactcacctcacacgccccagcaagcatccaggagagcctgcctcttggaatagaaatcagacatcccacaggaactctgaggttttcccactgctgccagatgtatgcaaggaacacgtgatcttcgtaattccagagcggggcaaactgcttggcacctcttcaataggtgacattcaatgaagatctctggcttcctgctctgtttgttctggttgccctggaaagcctgctgctcagcccatgccccgggacttcctccaccctcaccaggacattctttccatctcttgtctcctgtgtgcaagtccctttctcctggattccatgtcttgaatgtttcttaatttacttcctcattttggcagaggatgtcctccagttgttttctgggaatgatggttaacataacagacaccaagaaagggaagaggagccgacagcagagggggaagctgaaaagacgcacaaagaatggccataaaagatatgagtatgttgagtgattagtgatcggaaactacgagtgatatggtacaggtgtttgtagaagaacagtaaagccattgatcaggcaaccccagctttccagacagtcacttttcccagtggtcatacctggtctggaagattccccatcatctcgaataaagctgttgttgcttttaactccatggagagaccgaatggagtgagcccagcagggcatgctgggcaagagaggtcccccgagtcccaaataagaatttcaactagtataaaacgaggcagcgaacccacacgtggaagtctgataccgcttgcagaagggaattgaatagatgtctccctattgctgtttctgataagcacttgtgcagccccatcagcacctcgatttcttcttggtgagtccatgggaacagccccactgcaaacaacccattcctgctctcctctttcctctaaacctcaacctcctcctacctggcagtccacaggcctacagcttctcctcagtgggaaagacatcagcttggaaaaccacttggaaagccaacgttatcctagaaaagctttttaaatgacccagcaggacaagtctccggatggccttggccaacccggtgcttccctcttttcttggttgtagttctcagaataactagagaatgtactgggagtgttgtcctgagataaggaggaactgtcctaaacctggactctgttcccatcacacctagaacaggatgtcctgcaacgctttagcccaatgatccaagttgcccttggggtataaaacttgacagcagagggcgttcagggtccctcagctgcagtgtgaagtgggacacacaggtgagactccatctgccctgggcaggttcctgagccttgggggaccagttcaccctacatcccaggcttctgttgtcccttgcctgcctgtaaggaataaagttgctttgcttaacttgctgtgtgagtgttctgcatcactggactcgagcaagtggtacaaactgcagattaataactggtacgtggtgaatctgcttcctaagtgtttgctgaattttgcggcccaggagatcatctggtgtttctgtgatgtgggaagattaaaagaaagaaaaatcaaacctcacacctaacaaatcagaatctcaaggtgggacccaaggcatctgtatacttgaccaccctcccaggtcattctggttctcagacatgtttggcaactttgattttagtctatacttgcatgttatatgcctgaaagaaaaaacaaagactaaaggcctgcatgagttcacacatcaccttaataacaagatcatagctagaaccacattcctagttttgggactttccattgccgcagcccaaaggatgactagattcctttccatctcttctccctccacttccttcccaggaacctcccctcaacctgccataggacctggggcaacctaaaggtaccaattggtatgtggtact

SEQ ID NO: 378641 - DNA, 3014 bp, Homo sapiens
aagcttgcggccgcagctccgatttctccgtggacgatggcagccacgattcaggccatggagaggaagattgaatcgcaggctgctcacctgctttccctagaaggtcaaaccgggatggccgagaagaagctggctgattgcgagaagacagccgtggagttcgggaaccagctggagggcaagtgggccgtgctggggaccctgctgcaggagtacgggctgctgcagaggcggctggagaacgtggagaacctgctgcacaacaggaacttctggatcctgcggctgcccccgggcagcaagggggagtcccctaaggtgcctatgacatttgatgatgtggctgtgtagttctctgagcaagtgtggggcaagctggaggactggcagaaggagctctgcaagcacgtgatgaggggcaactgcgagatgctggtctctttggactacgccatctccaagtccgaggtcctctcccagattgaacaagggaaggagccctgcaactggcgccgccctgaccccaagattccagatgttcctgtggaccccagtccagatgcagaaactgaggcccagcagagattgagtaacttatgcgagttgtcactcacctcacacgccccagcaagcatccaggagagcctgcctcttggaatagaaatcagacatcccacaggaactctgaggttttcccactgctgccagatgtatgcaaggaacacgtgatcttcgtaattccagagcggggcaaactgcttggcacctcttcaataggtgacattcaatgaagatctctggcttcctgctctgtttgttctggttgccctggaaagcctgctgctcagcccatgccccgggacttcctccaccctcaccaggacattctttccatctcttgtctcctgtgtgcaagtccctttctcctggattccatgtcttgaatgtttcttaatttacttcctcattttggcagaggatgtcctccagttgttttctgggaatgatggttaacataacagacaccaagaaagggaagaggagccgacagcagagggggaagctgaaaagacgcacaaagaatggccataaaagatatgagtatgttgagtgattagtgatcggaaactacgagtgatatggtacaggtgtttgtagaagaacagtaaagccattgatcaggcaaccccagctttccagacagtcacttttcccagtggtcatacctggtctggaagattccccatcatctcgaataaagctgttgttgcttttaactccatggagagaccgaatggagtgagcccagcagggcatgctgggcaagagaggtcccccgagtcccaaataagaatttcaactagtataaaacgaggcagcgaacccacacgtggaagtctgataccgcttgcagaagggaattgaatagatgtctccctattggtaaggatgtggttttattgacttgaaataacaaagcccgcaagcaacaactgatcatccgcgggatgctgccacaaggaataattgagcactcattcagacacaggggaaaccactgcctctttcagtctttctcccagattccaacagtcagtgttacagcatttcaccttgttcacctccctgagaagacgttgcagctcactcaccccagtgggcactgggagcctctgctcaggtgggagacagatgccccccacatgcacatctggtgtttatgaagcagatactggggcttcataaacacagaaggggcagggaagtagccccagggcatagtgtggggcctcctgactaaaagtagcttgcaaacccctgcctataacagccacttcctggcagtcattgtgccacttaggagccctcctcaccgctcttcctttagttccttcactctgtatagaccctgccagagcagctcagggtggagcagctgcagccatgggacctgctccaggcaaggccctatgctacacagtccctgggggtgaggattccagaggagtcaattccctacccgcccttccaggggatggccgagatgagcgttcccacagggaaagtgaaagttgcaaggctgttgcggaaacaccaggggttccatctaggtcttgctgctcatctcacagaaagccagtcactgagacaagtattgtcagggaagaaggctttatccaggtgctacagacagggtgaacaagagatcagtctcaaatccatcatcatcaactgactaaaattaggggtttatatagcagggaagaaatgtaactacatgtgggaaaacagggattaacgaggggcaaggaagaggagttggccaacaggcagcaggtggtcacctggggaatcatgatgggtgaggggtctggcttctcactttccagatgtggggatctggtaaatttcagtttcttgataccgtctgggaggattgctggctggtttcctgagaaaggaattcagatgacataaatgtaaatttctccttgggtttcaagactgagagggtcaatttctaggtttattcaagaaaaaccataaacatcagttctatgggacaattgggcccatttcaaggctctgaggataagggttaatgaggggacagagtcgcctggagaagttcactggggcctacaagaaactagagaggcttcctggcaaagctctatgctgtctatcctctcttctctccttgcaggaagattccagtataatagacccgaggtgaaaaggcttttgttcaataagtagaaaactgaaggggggtgggaggcacatggatttgaaccagagaccgcttggcctgcaggcaaatgctgtactgagacagtcctgactttattgatgagagctctcctcataaatttttaagtgacagttaagcagagttgactataggtatggggtccattgcactgtgtctggagtacctgcctgctgctcagcctgcccccgtcgatccatgagccagcactctcctgtcttccgtattccacagccta

SEQ ID NO: 378642 - DNA, 892 bp, Homo sapiens
aagcttgcggccgcagctccgatttctccgtggacgatggcagccacgattcaggccatggagaggaagattgaatcgcaggctgctcacctgctttccctagaaggtcaaaccgggatggccgagaagaagctggctgattgcgagaagacagccgtggagttcgggaaccagctggagggcaagtgggccgtgctggggaccctgctgcaggagtacgggctgctgcagaggcggctggagaacgtggagaacctgctgcacaacaggaacttctggatcctgcggctgcccccgggcagcaagggggagtcccctaaggtgcctatgacatttgatgatgtggctgtgtagttctctgagcaagtgtggggcaagctggaggactggcagaaggagctctgcaagcacgtgatgaggggcaactgcgagatgctggtctctttggactacgccatctccaagtccgaggtcctctcccagattgaacaagggaaggagccctgcaactggcgccgccctgaccccaagattccagatgttcctgtggaccccagtccagatgcagaaactgaggcccagcagagattgagtaacttatgcgagttgtcactcacctcacacgccccagcaagcatccaggagagcctgcctcttggaatagaaatcagacatcccacaggaactctgaggttttcccactgctgccagatgtatgcaaggaacacgtgatcttcgtaattccagagcggggcaaactgcttggcacctcttcaataggtgacattcaatgagtaagtgactgtgactactgtgactctcctgacagcctcagcctcctcaagtattcccctccaggttgtacttgtccttgttagcacagcctcatgag

SEQ ID NO: 378643 - DNA, 429 bp, Homo sapiens
ggatctcaccatgttgtccaggctggtcttcaactcttggcctcaagtgatcctcctacctggaactcccaaagtgctgggattataggtgtgagccacagtgccaagcctgttagttggtttttacacatcttggttttaacctctaactttcttatttttatctctcttactatcttttcctttgtctttttgttttattttactttctgggaagctgcctcagctttatttttcaaactttctatttaattttttatatcttctatccttttttcttaatttctaagttatctgttctataattgacccttttatgtgtcttgtttaacagatggaatattttctcatatttctctcagaatattaattagtttctttgacgttttcctctctttccagctaatatgcaagtgaaccagtgacctg

SEQ ID NO: 378644 - DNA, 246 bp, Homo sapiens
tgctgctcagcccatgccccgggacttcctccaccctcaccaggacattctttccatctcttgtctcctgtgtgcaagtccctttctcctggattccatgtcttgaatgtttcttaatttacttcctcattttggcagaggatgtcctccagttgttttctgggaatggtgagtagaggtgaattttttaagacctggcatgcctcgaaatgtccataattccacctacacacttgattagcagtc

SEQ ID NO: 378645 - DNA, 200 bp, Homo sapiens
tttgtttgtttcggatctttgcttttagctgttgttgcttttaactccatggagagaccgaatggagtgagcccagcagggcatgctgggcaagagaggtcccccgagtcccaaataagaatttcaactagtataaaacgaggcagcgaacccacacgtggaagtctgataccgcttgcagaagggaattgaatagatgt

SEQ ID NO: 378646 - DNA, 4044 bp, Homo sapiens
aactgcgggcggcgcagggcaggggcagtcagggagcagcggcggcagagacagggccgggcgggcgccgcctgcggagagcaccgggaggcgggccctgcgtggggccgcgcgcagcagcggcgacgactttatctgggccgcgggggacagcgcagggccatggaggaggcggccgcagctccgatttctccgtggacgatggcagccacgattcaggccatggagaggaagattgaatcgcaggctgctcacctgctttccctagaaggtcaaaccgggatggccgagaagaagctggctgattgcgagaagacagccgtggagttcgggaaccagctggagggcaagtgggccgtgctggggaccctgctgcaggagtacgggctgctgcagaggcggctggagaacgtggagaacctgctgcacaacaggaacttctggatcctgcggctgcccccgggcagcaagggggagtcccctaagactacgccatctccaagtccgaggtcctctcccagattgaacaagggaaggagccctgcaactggcgccgccctgaccccaagattccagatgttcctgtggaccccagtccagatgcagaaactgaggcccagcagagattgagtaacttatgcgagttgtcactcacctcacacgccccagcaagcatccaggagagcctgcctcttggaatagaaatcagacatcccacaggaactctgaggttttcccactgctgccagatgtatgcaaggaacacgtgatcttcgtaattccagagcggggcaaactgcttggcacctcttcaataggtgacattcaatgaagatctctggcttcctgctctgtttgttctggttgccctggaaagcctgctgctcagcccatgccccgggacttcctccaccctcaccaggacattctttccatctcttgtctcctgtgtgcaagtccctttctcctggattccatgtcttgaatgtttcttaatttacttcctcattttggcagaggatgtcctccagttgttttctgggaatgctaatatgcaagtgaaccagtgacctgcagttctgcccacacagggttaataaccaatcagattctctcttttcaagatggttaacataacagacaccaagaaagggaagaggagccgacagcagagggggaagctgaaaagacgcacaaagaatggccataaaagatatgagcaaccccagctttccagacagtcacttttcccagtggtcatacctggtctggaagattccccatcatctcgaataaagctgttgttgcttttaactccatggagagaccgaatggagtgagcccagcagggcatgctgggcaagagaggtcccccgagtcccaaataagaatttcaactagtataaaacgaggcagcgaacccacacgtggaagtctgataccgcttgcagaagggaattgaatagatgtctccctattggtaaggatgtggttttattgacttgaaataacaaagcccgcaagcaacaactgatcatccgcgggatgctgccacaaggaataattgagcactcattcagacacaggggaaaccactgcctctttcagtctttctcccagattccaacagtcagtgttacagcatttcaccttgttcacctccctgagaagacgttgcagctcactcaccccagtgggcactgggagcctctgctcaggtgggagacagatgccccccacatgcacatctggtgtttatgaagcagatactggggcttcataaacacagaaggggcagggaagtagccccagggcatagtgtggggcctcctgactaaaagtagcttgcaaacccctgcctataacagccacttcctggcagtcattgtgccacttaggagccctcctcaccgctcttcctttagttccttcactctgtatagaccctgccagagcagctcagggtggagcagctgcagccatgggacctgctccaggcaaggccctatgctacacagtccctgggggtgaggattccagaggagtcaattccctacccgcccttccaggggatggccgagatgagcgttcccacagggaaagtgaaagttgcaaggctgttgcggaaacaccaggggttccatctaggtcttgctgctcatctcacagaaagccagtcactgagacaagtattgtcagggaagaaggctttatccaggtgctacagacagggtgaacaagagatcagtctcaaatccatcatcatcaactgactaaaattaggggtttatatagcagggaagaaatgtaactacatgtgggaaaacagggattaacgaggggcaaggaagaggagttggccaacaggcagcaggtggtcacctggggaatcatgatgggtgaggggtctggcttctcactttccagatgtggggatctggtaaatttcagtttcttgataccgtctgggaggattgctggctggtttcctgagaaaggaattcagatgacataaatgtaaatttctccttgggtttcaagactgagagggtcaatttctaggtttattcaagaaaaaccataaacatcagttctatgggacaattgggcccatttcaaggctctgaggataagggttaatgaggggacagagtcgcctggagaagttcactggggcctacaagaaactagagaggcttcctggcaaagctctatgctgtctatcctctcttctctccttgcaggaagattccagtataatagacccgaggtgaaaaggcttttgttcaataagtagaaaactgaaggggggtgggaggcacatggatttgaaccagagaccgcttggcctgcaggcaaatgctgtaccttcagttgcacccctcacttgttacagctgtttctgataagcacttgtgcagccccatcagcacctcgatttcttcttggtgagtccatgggaacagccccactgcaaacaacccattcctgctctcctctttcctctaaacctcaacctcctcctacctggcagtccacaggcctacagcttctcctcagtgggaaagacatcagcttggaaaaccacttggaaagccaacgttatcctagaaaagctttttaaatgacccagcaggacaagtctccggatggccttggccaacccggtgcttccctcttttcttggttgtagttctcagaataactagagaatgtactgggagtgttgtcctgagataaggaggaactgtcctaaacctggactctgttcccatcacacctagaacaggatgtcctgcaacgctttagcccaatgatccaagttgcccttggggtataaaacttgacagcagagggcgttcagggtccctcagctgcagtgtgaagtgggacacacaggtgagactccatctgccctgggcaggttcctgagccttgggggaccagttcaccctacatcccaggcttctgttgtcccttgcctgcctgtaaggaataaagttgctttgcttaacttgctgtgtgagtgttctgcatcactggactcgagcaagtggtacaaactgcagattaataactggtacgtggtgaatctgcttcctaagtgtttgctgaattttgcggcccaggagatcatctggtgtttctgtgatgtgggaagattaaaagaaagaaaaatcaaacctcacacctaacaaatcagaatctcaaggtgggacccaaggcatctgtatacttgaccaccctcccaggtcattctggttctcagacatgtttggcaactttgattttagtctatacttgcatgttatatgcctgaaagaaaaaacaaagactaaaggcctgcatgagttcacacatcaccttaataacaagatcatagctagaaccacattcctagttttgggactttccattgccgcagcccaaaggatgactagattcctttccatctcttctccctccacttccttcccaggaacctcccctcaacctgccataggacctggggcaacctaaaggtaccaattggtatgtggtact

SEQ ID NO: 378647 - DNA, 4094 bp, Homo sapiens
aagcttgcggccgcagctccgatttctccgtggacgatggcagccacgattcaggccatggagaggaagattgaatcgcaggctgctcacctgctttccctagaaggtcaaaccgggatggccgagaagaagctggctgattgcgagaagacagccgtggagttcgggaaccagctggagggcaagtgggccgtgctggggaccctgctgcaggagtacgggctgctgcagaggcggctggagaacgtggagaacctgctgcacaacaggaacttctggatcctgcggctgcccccgggcagcaagggggagtcccctaaggtgcctatgacatttgatgatgtggctgtgtagttctctgagcaagtgtggggcaagctggaggactggcagaaggagctctgcaagcacgtgatgaggggcaactgcgagatgctggtctctttggactacgccatctccaagtccgaggtcctctcccagattgaacaagggaaggagccctgcaactggcgccgccctgaccccaagattccagatgttcctgtggaccccagtccagtttagtactgctaaactaaagtagattaatgagaagggagagagagccaagaccatcaagcagacaaagaatttctctcttcatatgcagaaactgaggcccagcagagattgagtaacttatgcgagttgtcactcacctcacacgccccagcaagcatccaggagagcctgcctcttggaatagaaatcagacatcccacaggaactctgaggttttcccactgctgccagatgtatgcaaggaacacgtgatcttcgtaattccagagcggggcaaactgcttggcacctcttcaataggtgacattcaatgaagatctctggcttcctgctctgtttgttctggttgccctggaaagcctgctgctcagcccatgccccgggacttcctccaccctcaccaggacattctttccatctcttgtctcctgtgtgcaagtccctttctcctggattccatgtcttgaatgtttcttaatttacttcctcattttggcagaggatgtcctccagttgttttctgggaatgatggttaacataacagacaccaagaaagggaagaggagccgacagcagagggggaagctgaaaagacgcacaaagaatggccataaaagatatgagtatgttgagtgattagtgatcggaaactacgagtgatatggtacaggtgtttgtagaagaacagtaaagccattgatcaggcaaccccagctttccagacagtcacttttcccagtggtcatacctggtctggaagattccccatcatctcgaataaagctgttgttgcttttaactccatggagagaccgaatggagtgagcccagcagggcatgctgggcaagagaggtcccccgagtcccaaataagaatttcaactagtataaaacgaggcagcgaacccacacgtggaagtctgataccgcttgcagaagggaattgaatagatgtctccctattggtaaggatgtggttttattgacttgaaataacaaagcccgcaagcaacaactgatcatccgcgggatgctgccacaaggaataattgagcactcattcagacacaggggaaaccactgcctctttcagtctttctcccagattccaacagtcagtgttacagcatttcaccttgttcacctccctgagaagacgttgcagctcactcaccccagtgggcactgggagcctctgctcaggtgggagacagatgccccccacatgcacatctggtgtttatgaagcagatactggggcttcataaacacagaaggggcagggaagtagccccagggcatagtgtggggcctcctgactaaaagtagcttgcaaacccctgcctataacagccacttcctggcagtcattgtgccacttaggagccctcctcaccgctcttcctttagttccttcactctgtatagaccctgccagagcagctcagggtggagcagctgcagccatgggacctgctccaggcaaggccctatgctacacagtccctgggggtgaggattccagaggagtcaattccctacccgcccttccaggggatggccgagatgagcgttcccacagggaaagtgaaagttgcaaggctgttgcggaaacaccaggggttccatctaggtcttgctgctcatctcacagaaagccagtcactgagacaagtattgtcagggaagaaggctttatccaggtgctacagacagggtgaacaagagatcagtctcaaatccatcatcatcaactgactaaaattaggggtttatatagcagggaagaaatgtaactacatgtgggaaaacagggattaacgaggggcaaggaagaggagttggccaacaggcagcaggtggtcacctggggaatcatgatgggtgaggggtctggcttctcactttccagatgtggggatctggtaaatttcagtttcttgataccgtctgggaggattgctggctggtttcctgagaaaggaattcagatgacataaatgtaaatttctccttgggtttcaagactgagagggtcaatttctaggtttattcaagaaaaaccataaacatcagttctatgggacaattgggcccatttcaaggctctgaggataagggttaatgaggggacagagtcgcctggagaagttcactggggcctacaagaaactagagaggcttcctggcaaagctctatgctgtctatcctctcttctctccttgcaggaagattccagtataatagacccgaggtgaaaaggcttttgttcaataagtagaaaactgaaggggggtgggaggcacatggatttgaaccagagaccgcttggcctgcaggcaaatgctgtaccttcagttgcacccctcacttgttacagctgtttctgataagcacttgtgcagccccatcagcacctcgatttcttcttggtgagtccatgggaacagccccactgcaaacaacccattcctgctctcctctttcctctaaacctcaacctcctcctacctggcagtccacaggcctacagcttctcctcagtgggaaagacatcagcttggaaaaccacttggaaagccaacgttatcctagaaaagctttttaaatgacccagcaggacaagtctccggatggccttggccaacccggtgcttccctcttttcttggttgtagttctcagaataactagagaatgtactgggagtgttgtcctgagataaggaggaactgtcctaaacctggactctgttcccatcacacctagaacaggatgtcctgcaacgctttagcccaatgatccaagttgcccttggggtataaaacttgacagcagagggcgttcagggtccctcagctgcagtgtgaagtgggacacacaggtgagactccatctgccctgggcaggttcctgagccttgggggaccagttcaccctacatcccaggcttctgttgtcccttgcctgcctgtaaggaataaagttgctttgcttaacttgctgtgtgagtgttctgcatcactggactcgagcaagtggtacaaactgcagattaataactggtacgtggtgaatctgcttcctaagtgtttgctgaattttgcggcccaggagatcatctggtgtttctgtgatgtgggaagattaaaagaaagaaaaatcaaacctcacacctaacaaatcagaatctcaaggtgggacccaaggcatctgtatacttgaccaccctcccaggtcattctggttctcagacatgtttggcaactttgattttagtctatacttgcatgttatatgcctgaaagaaaaaacaaagactaaaggcctgcatgagttcacacatcaccttaataacaagatcatagctagaaccacattcctagttttgggactttccattgccgcagcccaaaggatgactagattcctttccatctcttctccctccacttccttcccaggaacctcccctcaacctgccataggacctggggcaacctaaaggtaccaattggtatgtggtact

SEQ ID NO: 378648 - DNA, 2746 bp, Homo sapiens
aagcttgcggccgcagctccgatttctccgtggacgatggcagccacgattcaggccatggagaggaagattgaatcgcaggctgctcacctgctttccctagaaggtcaaaccgggatggccgagaagaagctggctgattgcgagaagacagccgtggagttcgggaaccagctggagggcaagtgggccgtgctggggaccctgctgcaggagtacgggctgctgcagaggcggctggagaacgtggagaacctgctgcacaacaggaacttctggatcctgcggctgcccccgggcagcaagggggagtcccctaaggtgcctatgacatttgatgatgtggctgtgtagttctctgagcaagtgtggggcaagctggaggactggcagaaggagctctgcaagcacgtgatgaggggcaactgcgagatgctggtctctttggactacgccatctccaagtccgaggtcctctcccagattgaacaagggaaggagccctgcaactggcgccgccctgaccccaagattccagatgttcctgtggaccccagtccagatgcagaaactgaggcccagcagagattgagtaacttatgcgagttgtcactcacctcacacgccccagcaagcatccaggagagcctgcctcttggaatagaaatcagacatcccacaggaactctgaggttttcccactgctgccagatgtatgcaaggaacacgtgatcttcgtaattccagagcggggcaaactgcttggcacctcttcaataggtgacattcaatgaagatctctggcttcctgctctgtttgttctggttgccctggaaagcctgctgctcagcccatgccccgggacttcctccaccctcaccaggacattctttccatctcttgtctcctgtgtgcaagtccctttctcctggattccatgtcttgaatgtttcttaatttacttcctcattttggcagaggatgtcctccagttgttttctgggaatgatggttaacataacagacaccaagaaagggaagaggagccgacagcagagggggaagctgaaaagacgcacaaagaatggccataaaagatatgagtatgttgagtgattagtgatcggaaactacgagtgatatggtacaggtgtttgtagaagaacagtaaagccattgatcaggcaaccccagctttccagacagtcacttttcccagtggtcatacctggtctggaagattccccatcatctcgaataaagctgttgttgcttttaactccatggagagaccgaatggagtgagcccagcagggcatgctgggcaagagaggtcccccgagtcccaaataagaatttcaactagtataaaacgaggcagcgaacccacacgtggaagtctgataccgcttgcagaagggaattgaatagatgtctccctattggaagattccagtataatagacccgaggtgaaaaggcttttgttcaataagtagaaaactgaaggggggtgggaggcacatggatttgaaccagagaccgcttggcctgcaggcaaatgctgtaccttcagttgcacccctcacttgttacagctgtttctgataagcacttgtgcagccccatcagcacctcgatttcttcttggtgagtccatgggaacagccccactgcaaacaacccattcctgctctcctctttcctctaaacctcaacctcctcctacctggcagtccacaggcctacagcttctcctcagtgggaaagacatcagcttggaaaaccacttggaaagccaacgttatcctagaaaagctttttaaatgacccagcaggacaagtctccggatggccttggccaacccggtgcttccctcttttcttggttgtagttctcagaataactagagaatgtactgggagtgttgtcctgagataaggaggaactgtcctaaacctggactctgttcccatcacacctagaacaggatgtcctgcaacgctttagcccaatgatccaagttgcccttggggtataaaacttgacagcagagggcgttcagggtccctcagctgcagtgtgaagtgggacacacaggtgagactccatctgccctgggcaggttcctgagccttgggggaccagttcaccctacatcccaggcttctgttgtcccttgcctgcctgtaaggaataaagttgctttgcttaacttgctgtgtgagtgttctgcatcactggactcgagcaagtggtacaaactgcagattaataactggtacgtggtgaatctgcttcctaagtgtttgctgaattttgcggcccaggagatcatctggtgtttctgtgatgtgggaagattaaaagaaagaaaaatcaaacctcacacctaacaaatcagaatctcaaggtgggacccaaggcatctgtatacttgaccaccctcccaggtcattctggttctcagacatgtttggcaactttgattttagtctatacttgcatgttatatgcctgaaagaaaaaacaaagactaaaggcctgcatgagttcacacatcaccttaataacaagatcatagctagaaccacattcctagttttgggactttccattgccgcagcccaaaggatgactagattcctttccatctcttctccctccacttccttcccaggaacctcccctcaacctgccataggacctggggcaacctaaaggtaccaattggtatgtggtact

SEQ ID NO: 378649 - DNA, 737 bp, Homo sapiens
aagcttgcggccgcagctccgatttctccgtggacgatggcagccacgattcaggccatggagaggaagattgaatcgcaggctgctcacctgctttccctagaaggtcaaaccgggatggccgagaagaagctggctgattgcgagaagacagccgtggagttcgggaaccagctggagggcaagtgggccgtgctggggaccctgctgcaggagtacgggctgctgcagaggcggctggagaacgtggagaacctgctgcacaacaggaacttctggatcctgcggctgcccccgggcagcaagggggagtcccctaaggtgcctatgacatttgatgatgtggctgtgtagttctctgagcaagtgtggggcaagctggaggactggcagaaggagctctgcaagcacgtgatgaggggcaactgcgagatgctggtctctttggactacgccatctccaagtccgaggtcctctcccagattgaacaagggaaggagccctgcaactggcgccgccctgaccccaagattccagatgttcctgtggaccccagtccaggtaagggctgggagaaggccagggaggcatcaggtattttgtgggaaacagagatggaaaggccaggaagggtgtgatctttccagagagagtcgaggagaaacatgaaacttacaggttttatgtcttgaattttttatagttgagttttaatctctaacttagtcagctaatg

SEQ ID NO: 378650 - DNA, 952 bp, Homo sapiens
aagcttgcggccgcagctccgatttctccgtggacgatggcagccacgattcaggccatggagaggaagattgaatcgcaggctgctcacctgctttccctagaaggtcaaaccgggatggccgagaagaagctggctgattgcgagaagacagccgtggagttcgggaaccagctggagggcaagtgggccgtgctggggaccctgaacgctttagcccaatgatccaagttgcccttggggtataaaacttgacagcagagggcgttcagggtccctcagctgcagtgtgaagtgggacacacaggtgagactccatctgccctgggcaggttcctgagccttgggggaccagttcaccctacatcccaggcttctgttgtcccttgcctgcctgtaaggaataaagttgctttgcttaacttgctgtgtgagtgttctgcatcactggactcgagcaagtggtacaaactgcagattaataactggtacgtggtgaatctgcttcctaagtgtttgctgaattttgcggcccaggagatcatctggtgtttctgtgatgtgggaagattaaaagaaagaaaaatcaaacctcacacctaacaaatcagaatctcaaggtgggacccaaggcatctgtatacttgaccaccctcccaggtcattctggttctcagacatgtttggcaactttgattttagtctatacttgcatgttatatgcctgaaagaaaaaacaaagactaaaggcctgcatgagttcacacatcaccttaataacaagatcatagctagaaccacattcctagttttgggactttccattgccgcagcccaaaggatgactagattcctttccatctcttctccctccacttccttcccaggaacctcccctcaacctgccataggacctggggcaacctaaaggtaccaattggtatgtggtact

SEQ ID NO: 378651 - DNA, 431 bp, Homo sapiens
cttgttcttggccagagccatgatagagagtatgtgtaaaaggcaaacactctgacacatacagacacacacacatcaagcagtttcccgtaaactctaccaggagttgctatgcttcagtgttgggttagaagaaggaaaagataaattgtactttaacctttgtaactgagctaaagaaaaaataagagagaaaacacaccatgtgctggccctggatcaggagacctggattctagtactggtatcctgaaattttgttgtgtccttgatcaggtgggtccccaactgtgggcccaagacccctgtctataaaataaaggggtaggtcatagctctgaaattctgttcagattatcctttagctctcacctgcactcagtgcatctaattaagtaaagacggaggcagcaggttacatgtcatgttgt

SEQ ID NO: 378652 - DNA, 388 bp, Homo sapiens
cctcatatcattgcttttagagcaaggacaattctggaagtgaaactacaataacactctgggctcctttccctctagtagtactcaacacacttgtaattacatgttcaaatttgtctttcttatttctacttaggttcatgaaggcaagggacatgcctgtgttgcttactttctcttggcaggcacatacagcaagtcttcaaaaaatgcttgttaactacaaattaagtgtttaagaagtccactgttaattagccgggcgcggtggcgggcgcctgtagtcccagctactcgggaggctgaggcaggagaatggcgtgaacccgggaagcggagcttgcagtgagccgagattgcgccactgcagtccgcagtccggcctggg

SEQ ID NO: 378653 - DNA, 1117 bp, Homo sapiens
  misc_feature (5)..(5): n is a, c, g, or t
  misc_feature (8)..(8): n is a, c, g, or t
  misc_feature (10)..(10): n is a, c, g, or t
  misc_feature (392)..(392): n is a, c, g, or t
  misc_feature (402)..(402): n is a, c, g, or t
caganggncnggcggcggcggcagcggccacggccaccaccgcggacgctattgttccctggtgttagacgcgctctccctccttctcatctgaagcgaacaatagcaggaaagagctttgctttctgtactctttgaaaagaagttccaagagcggagaaaaattccctgccgagcgtgctacggctctggaccctggagtggctgcaggcggcatggggctgcaagcaggcgctgggcgtccgggagccggggcgctgcggggccgcgccggggcgtcctgctgccgctgccgctgccgctgccgctgccgctgctcctgctgctgctgctacgcccgggcgccggcagggctgcggcgcagggcgaggcggaggcgcccaccctctatntgtggaagantggtccatggggccgatgtatgggagatgaatgtggtcccggaggcatccaaacgagggctgtgtggtgtgctcatgtggagggatggactacactgcatactaactgtaagcaggccgagagacccaataaccagcagaattgtttcaaagtttgcgattggcacaaagagttgtacgactggagactgggaccttggaatcagtgtcagcccgtgatttcaaaaagcctagagaaacctcttgagtgcattaagggggaagaaggtattcaggtgagggagatagcgtgcatccagaaagacaaagacattcctgcggaggatatcatctgtgagtactttgagcccaagcctctcctggagcaggcttgcctcattccttgccagcaagattgcatcgtgtctgaattttctgcctggtccgaatgctccaagacctgcggcagcgggctccagcaccggacgcgtcatgtggtggcgcccccgcagttcggaggctctggctgtccaaacctgacggagttccaggtgtgccaatccagtccatgcgaggccgaggagctcaggtacagcctgcatgtggggccctggagcacctgctcaatgccccactcccgacaagtaagacaagcaaggagacgcgggaagaataaagaacgggaaaaggaccgcagcaaaggagtaaaggatccagaagcccgcgagcttattaag

SEQ ID NO: 378654 - DNA, 930 bp, Homo sapiens
gacagagtgcagccttttcctcccctaatagaaaagccattgccctcttttcctcccctaatagaaaagccattgccctcttttcctccacccttaagaagacctgcatctgttggaccaacagacaactatccggcttacggccaggggagcccctgcagctgcacagaaccagtttcttatgtatctggcggtaattgggaaagcttctgagaaagtccatggggccgatgtatgggagatgaatgtggtcccggaggcatccaaacgagggctgtgtggtgtgctcatgtggagggatggactacactgcatactaactgtaagcaggccgagagacccaataaccagcagaattgtttcaaagtttgcgattggcacaaagagttgtacgactggagactgggaccttggaatcagtgtcagcccgtgatttcaaaaagcctagagaaacctcttgagtgcattaagggggaagaaggtattcaggtgagggagatagcgtgcatccagaaagacaaagacattcctgcggaggatatcatctgtgagtactttgagcccaagcctctcctggagcaggcttgcctcattccttgccagcaagattgcatcgtgtctgaattttctgcctggtccgaatgctccaagacctgcggcagcgggctccagcaccggacgcgtcatgtggtggcgcccccgcagttcggaggctctggctgtccaaacctgacggagttccaggtgtgccaatccagtccatgcgaggccgaggagctcaggtacagcctgcatgtggggccctggagcacctgctcaatgccccactcccgacaagtaagacaagcaaggagacgcgggaagaataaagaacgggaaaaggaccgcagcaaaggagtaaaggatccagaagcccgcgagcttattaag

SEQ ID NO: 378655 - DNA, 788 bp, Homo sapiens
  misc_feature (788)..(788): n is a, c, g, or t
gacagagtgcagccttttcctcccctaatagaaaagccattgccctcttttcctcccctaatagaaaagccattgccctcttttcctccacccttaagaagacctgcatctgttggaccaacagacaactatccggcttacggccaggggagcccctgcagctgcacagaaccagtttcttatgtatctggcggtaattgggaaagcttctgagaaagtccatggggccgatgtatgggagatgaatgtggtcccggaggcatccaaacgagggctgtgtggtgtgctcatgtggagggatggactacactgcatactaactgtaagcaggccgagagacccaataaccagcagcagcagggggacctatcaggacagagttcacatccatgtgaaaggccagccaccagttcaggagcacttgggagtgatctaggtgatgctatgagtgaagaagacatgcttcaggcaggctgtgcccatgtctttacgatctgtcagaaatgatttgaaagcagaaggaaaaaaataatacctttaaaaaataatttagatattcatactttccgacattatcctgtgtgattacagcatagggtccactttggtaatgtgtcaaagagatgaggaaataagacttttagcggtttgcaaacaaaatgatgggaaagtggaacaatgcgtcggttgtaggagtaaataatgatcttccaaatactagccaaagaggcattcagcaattaaaaacgaatagaatagttttgtaaaagaaaaaaaagaaaaagatn

SEQ ID NO: 378656 - DNA, 447 bp, Homo sapiens
cccaggagctgtgtgtgtctgtgtgtctgtctacctggcaaggagatatggcccccatcagactggagctccacagagcaggtcaagcgattctcctgcctcggcctcccaaggaactggaaccacaggcgcgcgccactgcgcccaaggattttcacttttaactgtacagtgaagcacagacttctgagccagactgcttggtctgaactctggtgtcaccacttagtaagttctggtttgaatgtactcactgagtggtcttcataaattacctctctgcacttgagtctcctgtctgtaaaatggggataataatcattacaacgaagcctcataggattctggtggagaccaaatgcattaatacatatgcaaagcatttggaacagctggcatatataagtgccatatatctattattaaaaatttttaaattataagaat

SEQ ID NO: 378657 - DNA, 523 bp, Homo sapiens
cccaggagctgtgtgtgtctgtgtgtctgtctacctggcaaggagatatggcccccatcagactggagctccacagagcagattggagtctggatctgtcacgcaggctggagtgcagtcgcgcgaatctcagctcactgcaacctatgcctcccaggtcaagcgattctcctgcctcggcctcccaaggaactggaaccacaggcgcgcgccactgcgcccaaggattttcacttttaactgtacagtgaagcacagacttctgagccagactgcttggtctgaactctggtgtcaccacttagtaagttctggtttgaatgtactcactgagtggtcttcataaattacctctctgcacttgagtctcctgtctgtaaaatggggataataatcattacaacgaagcctcataggattctggtggagaccaaatgcattaatacatatgcaaagcatttggaacagctggcatatataagtgccatatatctattattaaaaatttttaaattataagaat

SEQ ID NO: 378658 - DNA, 459 bp, Homo sapiens
tttgcagttttcatcagttgctggaaacttcattcctgcttgagtgtgtttggctaggagtgagaagtattaatacattttcttttaaaaggctgtgagagagagagagagaaagagagacagaaagagagagagagaaaaaaaccccccccccacccccccaacaaaacaaaaacccccccaagagatttggaagccgggcaattgactctgtgcagaggtaaaaccaaatatgatcatagatacgacagagaaagagacataaagatttcatggagctatccttgaaatgaaaggaaactaaagtttattgaacatctcccaggaactatccatctatgatctcatataattctcatggtaattccaaagttaggagtaattatctccatttcacagatattaagtctcaaggtcacacaaggtagaaattgagagagctgagattcaaacgcaggc

SEQ ID NO: 378659 - DNA, 588 bp, Homo sapiens
ataaaaatcattctcctttaaatattaagggggaaaagttttccattttctttggtatggtttttattatatcttgagggcaaagacttccaatttcaaaatggaaatcaatgagaaacatgattgaatttaggaaacatggttttacagccaacagttttgggctgtgccagaagttctgaaggctataactatatctataattcatactaatattttgaggatttgaaaagcagctgggtcttagtttcctgagaagctaacttcaagttggtaatgtcctatgttctttgggagccagagataccttgagatgagcttatttccttgcatttttcttcatgctcctcccacctctgtgggccatggaaacggttagatgggctaatgtgcctaaggaaataggccagaataagcaatacatggcagctcttgtgatcattctactcctggaaggagctccaaggggccaggaaattttcagggacttatcaggagatgaacgatggagatctgaggacacagaagcagttctattaaaaataatgccaaaaactacaattacttttgcacccgcctaataatagt

SEQ ID NO: 378660 - DNA, 556 bp, Homo sapiens
aaaggtagatcgtttgctgaattactgatcaattgaacttgatattataaaatggaagcttattaagcattgagatacttgaatattaacatggatgatttatgtctacatttttaaaaattatgagaacgtcctgttcagttgagtgactgcatttaagcaatccttccccttccttcagaatccccacctaatagccatgaagctgtagaaatggaaataaatccaaaatagcaccatcagaataagtgccatcagcaaaccagaaatttagttgtgttctggaaagccgaaagtaataaaaccctactgaaaaatacccctgaacagggaaggtcgtgacacagcaaaggaagaatcagacaggaacaagttttagtggtggtgggaacagcccccaggagccccaggaaagaccacatttccactggaccccaagagagaacaagtgcgaattgcttgcagtgatgggaacacctggccatccttcaaccattacccctccacccccatcctcacggattcccacacagagctttcaggatgattttttctc

SEQ ID NO: 378661 - DNA, 770 bp, Homo sapiens
atggagaaaacgaaactactggggaaagggagggctcactgagaaccatcccagtaacccgaccgccgctggtcttcgctggacaccatgaatcacactgtccaaaccttcttctctcctgtcaacagtggccagccccccaactatgagatgctcaaggaggagcacgaggtggctgtgctgggggcgccccacaaccctgctcccccgacgtccaccgtgatccacatccgcagcgagacctccgtgcccgaccatgtcgtctggtccctgttcaacaccctcttcatgaacccctgctgcctgggcttcatagcattcgcctactccgtgaagtctagggacaggaagatggttggcgacgtgaccggggcccaggcctatgcctccaccgccaagtgcctgaacatctgggccctgattttgggcatcctcatgaccattctgctcatcgtcatcccagtattaatcttccaagcccatcgatagatcaggagacatcactgaggccaggagatctacccatgacctgtatcctttgtactccaccttccattcctcgccctgctcccggagccaagtcctgtatcagccctttatcctcacacacttttttacgacggcattcaataaagtgtacgtgtttctggtaaaataaataaataaataaattcaaatatgaaaaaaaaaaaatggcctcgttggctacagcgtggagtgtgcgcccaacttttttttcttctatctcttatattctcctctttaattct

SEQ ID NO: 378662 - DNA, 682 bp, Homo sapiens
atggagaaaacgaaactactggggaaagggagggctcactgagaaccatcccagtaacccgaccgccgctggtcttcgctggacaccatgaatcacactgtccaaaccttcttctctcctgtcaacagtggccagccccccaactatgagatgctcaaggaggagcacgaggtggctgtgctgggggcgccccacaaccctgctcccccgacgtccaccgtgatccacatccgcagcgagacctccgtgcccgaccatgtcgtctggtccctgttcaacaccctcttcatgaacccctgctgcctgggcttcatagcattcgcctactccgtgaagtctagggacaggaagatggttggcgacgtgaccggggcccaggcctatgcctccaccgccaagtgcctgaacatctgggccctgattttgggcatcctcatgaccattctgctcatcgtcatcccagtattaatcttccaagcccatcgatagatcaggagacatcactgaggccaggagatctacccatgacctgtatcctttgtactccaccttccattcctcgccctgctcccggagccaagtcctgtatcagccctttatcctcacacacttttttacgacggcattcaataaagtgtacgtgtttctggtaaaataaataaataaataaattcaaatatga

SEQ ID NO: 378663 - DNA, 621 bp, Homo sapiens
gtcggtcctcataggttcgcaggagcatgaatcacactgtccaaaccttcttctctcctgtcaacagtggccagccccccaactatgagatgctcaaggaggagcacgaggtggctgtgctgggggcgccccacaaccctgctcccccgacgtccaccgtgatccacatccgcagcgagacctccgtgcccgaccatgtcgtctggtccctgttcaacaccctcttcatgaacccctgctgcctgggcttcatagcattcgcctactccgtgaagtctagggacaggaagatggttggcgacgtgaccggggcccaggcctatgcctccaccgccaagtgcctgaacatctgggccctgattttgggcatcctcatgaccattctgctcatcgtcatcccagtattaatcttccaagcccatcgatagatcaggagacatcactgaggccaggagatctacccatgacctgtatcctttgtactccaccttccattcctcgccctgctcccggagccaagtcctgtatcagccctttatcctcacacacttttttacgacggcattcaataaagtgtacgtgtttctggtaaaataaataaataaataaattcaaatatga

SEQ ID NO: 378664 - DNA, 745 bp, Homo sapiens
acatggctggctattaaggaggctcaggtggagggatctcttcagcccaggaatttaaggcttcagtgagctaagattgggccattgcactccagccagggcaacagaccaagacccagtctcaaaataaataaataaaaatgaaagaaagcagtgcactgaaaatcaatttaagtatttactggagttgtcttgaaggcccaatgggaaatgtcagtaagggcacatgagaaaacactttaagaacctattcttccaaagatctttccagtatcttatgacaacacagtaaattatacccactccaactgcaaaagctgaaactactctgctttctcacttacctacacttttgactttccaaatacatttctctcttcggatatgagctgcaaactccttatataaaggctccaactctgcagccctaattattctagttggcccaagaaaaatcctaattgttttatctaaggagacggaattttccaatactgtagaggcatgtgtgtgtgtttgctttaaggaagctgttttggtaataaaaagtcactgaaggtcataaattcatgttaacacatccagtgtacatgaagtaggcaccgagttaaactatttgtctactatatagcatgtcatcttaaaagccttattttttcctcaaaatattaactttatttttctccctgtaaaatcaagacacagttaaaatgtagccttcctcattttctgggaatactttcta

SEQ ID NO: 378665 - DNA, 135 bp, Homo sapiens
gcatagaccaaaaggttggcaattattatatatgcataggagaatgattattgatttttattttcctatgaatgttatttgatttcttgttaaaatgaagttatattatttgaataacaaaacttttttaaaaaa

SEQ ID NO: 378666 - DNA, 323 bp, Homo sapiens
gtaatgtagtccacggggattggcaaagaaagaagtagaatacgtgaagacaggggagggccaatgaataacagcaaataaacagtacagaagctgcagtggggctgagattacagtcagcatagccattcggatatgttatttacagacaagaatatgtgtttgtcaagtattgttggtataaaataagcttgttgtattcttctgcctctgaaattgaaccacggagaagactaagaaatatgcacaatagattacaaagccaaaaaaataaacaatcatgagctaagtcatgtactgagaaaaaaaaagtggaggctcag

SEQ ID NO: 378667 - DNA, 576 bp, Homo sapiens
ctagccaggctttgtagcatgtgcctgttgccccttctaattggaaggctgaggtgggaagatcacttgagcttgggaggttaaggctgcagtgagcagtggttgcaccacctcactccaacctggggtcagaaggagaccctatctcaaaaaaaacaactttgtaaactgtgatccacacctcagtgcagtgggataaaactgtccagtagccttggcctccgaggccctgtctgaatcctccttttttgcacctgtagctaaagggcagcaagtgttttctgtactctatattcacttttagacaagtcacttttagagacttgtttaaagattcaaaatgagttataataaaaaataaatgtaaaatatacctagcaattggtatcgattgacaagaaagctttctttgcttgttcccacatgaagaaaaaaggtgaagaattacaaaaggttggttcagcttttcaatttttttgtgttaagtgggtgtagctaggataattaatgtcccagggaacttttgtaaataaggaagaacattcctgtttattctttcattaatgctagttttga

SEQ ID NO: 378668 - DNA, 435 bp, Homo sapiens
ccctgcagtatgatctgaatgtggcccccaaagttcatgtgttggaaacctaatccctaatccaacagtgctgagagggtgagatcttaagaagtgattacatcatgagggatctgccctcgtgaacggaataatgtcactatctagggagtgggtttgttataaatgcaagcttagacaggcgtggaggcatgtgactgactgtagtcccagctactcaggagtctgaggcacaaggatccctttagcccaggctttagagaacacagtaagtcatgatcacaccactacattccagcctgggtaacaaagccagatcccatctctttaaaaactaaacttaaaaaagaaaaacaaacaacaaaaaccgagcttagcactttcttgtgctctcttgccaagttataatgcagcaagaaagctctcgccagatgc

SEQ ID NO: 378669 - DNA, 393 bp, Homo sapiens
tccaacatactgggaaagagaggacgctgtcatcaggtgttaggtgttagggaccccaggggactagcaatttggtttaatccaggaagtgggaaattgctagaatctttgaattcaggtttgagaagcagggcttgaaaccttttctaactcttcattcatccctttcctctaaaaatcttattgtatgcgccagctgggccacaaaatggaaatcttttttaaaataaactttttattttaggataattttagatttgtggaaaatttgcaaatatactacagagatgggttcttttcttttgagacagagtctcactctgttgcccaggctgaagtgcagtggtgcaatctcggcttactgccaccttcacctcctgggttcaagcgaat

SEQ ID NO: 378670 - DNA, 251 bp, Homo sapiens
acttgacaaaatacaacatcctccatgataaaaacacttaagaaactagaaataggaggaactccctcaatctgataaaagagtacctatgaaaaactcacaccaaacattatgtttaggagtaaagactgaaaacgttcatttcatctaagatcaagaatgagacagggtatctttcttgccacttctattcagcattgtactggaagttctagccagagcaattagtcaagaaaaagaaagaaaattca

SEQ ID NO: 378671 - DNA, 239 bp, Homo sapiens
gaatgagatctttgcccagcagagatgacaggtactaactctaccaatcagattctccttattgcaagtttgaaatggagacacacaaagtcatgaaccagcagggagcctgagggagcaaaacccttgagtaaccaagaagcctctcgaatgaacaggagaccagttgagtggtacttacctccctccaaccacatttcatctggttcatcttttttatttatttttgcttttccaga

SEQ ID NO: 378672 - DNA, 1123 bp, Homo sapiens
gcttctggaagttgccaggtactgttgacatttaagcatgtgcaattttggggcccatttttatgtttttggatccagatggttgttccaaaaggagcactgtccctgctgatcaagtgggaagcaaagaaacaagtttccttctgcgctgaaatccccggcgtggggcggctctgctgccgtcgccatggggctacagcatctcaccgcccaagagcggtgtgcctgtgtctaatgaacgtgttacatggcctgtgtggtcacttttctttgagaaccttgtcatgtgccctagcagatggcaggtttgcatttgggcatgaaaccgagcacagtgctggcacgatcactctatttcttgagacttacttaggtaataagaatttataattgaattaagttggctcttataattaattgctttgattctgatgatgtggacacatgattgcaagctaaataccaaatatcattatgtatcttttctgatatcgaaagaagggtagtttaaataaaaaaaattgtagcccccttgaataatgctttccgtttgcctaaaggtggaaactcataggtattcactaaataaagaaagaaaaagattacaaaagtagtgaccaagataaaaccagaggcttagggctctgagagttcagcctgggccgtgatgttcaggagcagctgtctacctgcagagtcctgggcaaaccacttaccctccacgggactgttttgtcctggttacaacgggaggagttgactgggtgaccccagggtctctttagctctaaaaattctcagattgtgtgactgtggtactctgaagggcaggttttggtaatagcatcaggaccgagtgtgtgtgctcacacatgcacacagacacccccactcatgatccaaagcacagctggtggcctttatcggccttgacgagtgtccttttcaaatggagactttatcaaacagtgacatggcatgtgctgtgaaaatggtgactgttttgatgtcttccagttggctggctcccatctttccagagggagcactggacttctgggtaaaggaaatagcagtgaccaggaacaagagagccaccctccacacacatacttttttcctg

SEQ ID NO: 378673 - DNA, 165 bp, Homo sapiens
ggagctgttatttttttaagtgtaggaatcagccacccccaactgtatatttctgattgagtgagctagagtgcagcctagatatctgtatgtctttaacactgtcagatcattatgaagtgtaatgtgtttgaaaactgctacagctgagcagttgtggttttt

SEQ ID NO: 378674 - DNA, 2179 bp, Homo sapiens
tggggatgggggtcctagatacctaggatttgatataagctctctccaaatttttacatattgacaactaactcaaaaacttacaaacactgtgctaatcaaatgaaacatgcctgtgagctgcattcaatccatggggcattggtttgcaagctatgttcttagaggtggtatgattttgtattgaaattaaatataaccaagagtatgtcaatttttgaccttggaacctggaccttttacctcatttatattctgtatttttgtatgtggggctttttggccagtcaaaatagaaagtctacagcttccattttataatctaacaagcaacaagaaacaacatttgaaaaagaaacaggaatatagccattttttctagcaccaataaaaatggaaatgtttttcatttgctttaagtcattaatcagctgaaaaagaatagaaagagaatttcattccataaagaacttcacctaaaactctcagtgaagcaaaacaaaactccatgtaactcactcttagctttaaatctttaaaaagtgtttcgaagggatattgagtaaaaatgcagttatctattaaaaatacaaaatgctatattatatgatgctatgaattgatactggagctgataaaacattaaagtaattattccaaatcagtgctgactgcaaaagcaatatttccaaagctctagcttattttctgcggtcttttaattcccttgaaatagctttcttcaagttgagcagcaatttgggacaaacattattctattgcacagattatggcatcttactctggtttacacacacagagcaagggcttacacacctgaattaagaattaactagcatgtggggacagcaatagggatagtcctaccacagacgaaaccatgcgctctacacgtccctggataaaatgtgacaagttagcccttgaatttgggtccccatgtcaccaaatagctctatatttaagttgtgttaatgtggtacgtttcagtggcataatgacccattcttatcgaggcctttgttccatattttatttgtgccaatctttcttaggttatgagccctaatagtttatggcagcagacaagagactcatttctaacccattaaattcaaatggactttcttccactgtccatttcatttttggagctgttataaactaccgaaaacatttgacaggatcccattgtggatctgatacacttaaacagtaaaatgatatctaaacatctgaaagccaaagaataacctagtgcacgtgttcattcatttgtagaatttaagccattgtattatattttccacttggaaccatgcctttagatacaaaagtgtaaagtaaaaagcaacattatcatgggatgtgagacggtaatccaaaagttgaagaccaatttttgttatccatattttggaagtatggatactgtttattttaatatcacttctctcatgggtcacttttccttagataggtaggtaggtagatagatagatagatagatgatagatagatagatagatagatagatagatagatagatagataatataatatattttcttctttcttaacctatgagcagagactttgatgatggaaattactttgtaacattccccatggagcctaggaaaaacaatagaaaaaaagcatgaaatctttttctcatagtgaaatagagaagattctaagattggaaatctgtgtatgtggtgttctatcccaaataaagagaatttagggaattcaggcaacaatttttttcctaattggaaactttgttctgatcctgagatgcccacacaccccacaggagacgcagtgctggcccaccacagtgtttggaacacggtcagcattcaggaaacacattcaaaatcgtctaactgaattccactatccacttgtgaatgcaaacaaaattcaaatttccctgaaaatttattcaacttctatatgccaagcacactgctaaaggcttatcttctaagtatatgcaggcataccctactcacacaaatagcttattaccagagataggaaattgcaggtaatttgggagaaattgtcatagccaaatttatggaaaaaataaaataaaaacttctctatggcctcttgatttaagaaaaaaacagaacaatacaaa

SEQ ID NO: 378675 - DNA, 3465 bp, Homo sapiens
ttaaaagtaagggggaaaagagtaaacgcgcgactccagcgcgcggctacctacgcttggtgcttgctttctccagccatcggagaccagagccgccccctctgctcgagaaaggggctcagcggcggcggaagcggagggggaccaccgtggagagcgcggtcccagcccggccactgcggatccctgaaaccaaaaagctcctgctgcttctgtaccccgcctgtccctcccagctgcgcagggccccttcgtgggatcatcagcccgaagacagggatggagaggcctctgtgctcccacctctgcagctgcctggctatgctggccctcctgtcccccctgagcctggcacagtatgacagctggccccattaccccgagtacttccagcaaccggctcctgagtatcaccagccccaggcccccgccaacgtggccaagattcagctgcgcctggctgggcagaagaggaagcacagcgagggccgggtggaggtgtactatgatggccagtggggcaccgtgtgcgatgacgacttctccatccacgctgcccacgtcgtctgccgggagctgggctacgtggaggccaagtcctggactgccagctcctcctacggcaagggagaagggcccatctggttagacaatctccactgtactggcaacgaggcgacccttgcagcatgcacctccaatggctggggcgtcactgactgcaagcacacggaggatgtcggtgtggtgtgcagcgacaaaaggattcctgggttcaaatttgacaattcgttgatcaaccagatagagaacctgaatatccaggtggaggacattcggattcgagccatcctctcaacctaccgcaagcgcaccccagtgatggagggctacgtggaggtgaaggagggcaagacctggaagcagatctgtgacaagcactggacggccaagaattcccgcgtggtctgcggcatgtttggcttccctggggagaggacatacaataccaaagtgtacaaaatgtttgcctcacggaggaagcagcgctactggccattctccatggactgcaccggcacagaggcccacatctccagctgcaagctgggcccccaggtgtcactggaccccatgaagaatgtcacctgcgagaatgggctaccggccgtggtgagttgtgtgcctgggcaggtcttcagccctgacggaccctcgagattccggaaagcgtacaagccagagcaacccctggtgcgactgagaggcggtgcctacatcggggagggccgcgtggaggtgctcaaaaatggagagtgggggaccgtctgcgacgacaagtgggacctggtgtcggccagtgtggtctgcagagagctgggctttgggagtgccaaagaggcagtcactggctcccgactggggcaagggatcggacccatccacctcaacgagatccagtgcacaggcaatgagaagtccattatagactgcaagttcaatgccgagtctcagggctgcaaccacgaggaggatgctggtgtgagatgcaacacccctgccatgggcttgcagaagaagctgcgcctgaacggcggccgcaatccctacgagggccgagtggaggtgctggtggagagaaacgggtcccttgtgtgggggatggtgtgtggccaaaactggggcatcgtggaggccatggtggtctgccgccagctgggcctgggattcgccagcaacgccttccaggagacctggtattggcacggagatgtcaacagcaacaaagtggtcatgagtggagtgaagtgctcgggaacggagctgtccctggcgcactgccgccacgacggggaggacgtggcctgcccccagggcggagtgcagtacggggccggagttgcctgctcagaaaccgcccctgacctggtcctcaatgcggagatggtgcagcagaccacctacctggaggaccggcccatgttcctgctgcagtgtgccatggaggagaactgcctctcggcctcagccgcgcagaccgaccccaccacgggctaccgccggctcctgcgcttctcctcccagatccacaacaatggccagtccgacttccggcccaagaacggccgccacgcgtggatctggcacgactgtcacaggcactaccacagcatggaggtgttcacccactatgacctgctgaacctcaatggcaccaaggtggcagagggccacaaggccagcttctgcttggaggacacagaatgtgaaggagacatccagaagaattacgagtgtgccaacttcggcgatcagggcatcaccatgggctgctgggacatgtaccgccatgacatcgactgccagtgggttgacatcactgacgtgccccctggagactacctgttccaggttgttattaaccccaacttcgaggttgcagaatccgattactccaacaacatcatgaaatgcaggagccgctatgacggccaccgcatctggatgtacaactgccacataggtggttccttcagcgaagagacggaaaaaaagtttgagcacttcagcgggctcttaaacaaccagctgtccccgcagtaaagaagcctgcgtggtcaactcctgtcttcaggccacaccacatcttccatgggacttccccccaacaactgagtctgaacgaatgccacgtgccctcacccagcccggcccccaccctgtccagacccctacagctgtgtctaagctcaggaggaaagggaccctcccatcattcatggggggctgctacctgacccttggggcctgagaaggccttgggggggtggggtttgtccacagagctgctggagcagcaccaagagccagtcttgaccgggatgaggcccacagacaggttgtcatcagcttgtcccattcaagccaccgagctcaccacagacacagtggagccgcgctcttctccagtgacacgtggacaaatgcgggctcatcagcccccccagagagggtcaggccgaaccccatttctcctcctcttaggtcattttcagcaaacttgaatatctagacctctcttccaatgaaaccctccagtctattatagtcacatagataatggtgccacgtgttttctgatttggtgagctcagacttggtgcttccctatccacaacccccaccccttgtttttcaagatactattattatattttcacagacttttgaagcacaaatttattggcatttaatattggacatctgggcccttggaagtacaaatctaaggaaaaaccaacccactgtgtaagtgactcatcttcctgttgttccaattctgtgggtttttgattcaacggtgctataaccagggtcctgggtgacagggcgctcactgagcaccatgtgtcatcacagacacttacacatacttgaaacttggaataaaagaaagatttatga

SEQ ID NO: 378676 - DNA, 462 bp, Homo sapiens
  misc_feature (15)..(15): n is a, c, g, or t
  misc_feature (44)..(44): n is a, c, g, or t
  misc_feature (47)..(47): n is a, c, g, or t
tcatcgtcatacccncgcgtatgtacgagggctgggtggcgcangangcggggcctggacttcaatattgctggtggtggtgcaaactgcaatgcgtaccccagaagggaagctggcagcttaaaagttagcagcgtgtgtgccctttgattcagagagccacttgcgcgtggctctccggagagatttctacctgggtccatgaatggacttacggaaggattccttggtaatgattctgagtgactgtgttgatggaggcaagcaaggtcttggacaagtcaaaggcggcagccatcggagaccagagccgccccctctgctcgagaaaggggctcagcggcggcggaagcggagggggaccaccgtggagagcgcggtcccagcccggccactgcggatccctgaaaccaagtaagagcgcttcccgcgccaccccctccccgaagcggttcgcgagaa

SEQ ID NO: 378677 - DNA, 4260 bp, Homo sapiens
  misc_feature (3887)..(3887): n is a, c, g, or t
  misc_feature (3895)..(3895): n is a, c, g, or t
  misc_feature (3897)..(3897): n is a, c, g, or t
  misc_feature (3899)..(3899): n is a, c, g, or t
ttaaaagtaagggggaaaagagtaaacgcgcgactccagcgcgcggctacctacgcttggtgcttgctttctccagccatcggagaccagagccgccccctctgctcgagaaaggggctcagcggcggcggaagcggagggggaccaccgtggagagcgcggtcccagcccggccactgcggatccctgaaaccaaaaagctcctgctgcttctgtaccccgcctgtccctcccagctgcgcagggccccttcgtgggatcatcagcccgaagacagggatggagaggcctctgtgctcccacctctgcagctgcctggctatgctggccctcctgtcccccctgagcctggcacagtatgacagctggccccattaccccgagtacttccagcaaccggctcctgagtatcaccagccccaggcccccgccaacgtggccaagattcagctgcgcctggctgggcagaagaggaagcacagcgagggccgggtggaggtgtactatgatggccagtggggcaccgtgtgcgatgacgacttctccatccacgctgcccacgtcgtctgccgggagctgggctacgtggaggccaagtcctggactgccagctcctcctacggcaagggagaagggcccatctggttagacaatctccactgtactggcaacgaggcgacccttgcagcatgcacctccaatggctggggcgtcactgactgcaagcacacggaggatgtcggtgtggtgtgcagcgacaaaaggattcctgggttcaaatttgacaattcgttgatcaaccagatagagaacctgaatatccaggtggaggacattcggattcgagccatcctctcaacctaccgcaagcgcaccccagtgatggagggctacgtggaggtgaaggagggcaagacctggaagcagatctgtgacaagcactggacggccaagaattcccgcgtggtctgcggcatgtttggcttccctggggagaggacatacaataccaaagtgtacaaaatgtttgcctcacggaggaagcagcgctactggccattctccatggactgcaccggcacagaggcccacatctccagctgcaagctgggcccccaggtgtcactggaccccatgaagaatgtcacctgcgagaatgggctaccggccgtggtgagttgtgtgcctgggcaggtcttcagccctgacggaccctcgagattccggaaagcgtacaagccagagcaacccctggtgcgactgagaggcggtgcctacatcggggagggccgcgtggaggtgctcaaaaatggagagtgggggaccgtctgcgacgacaagtgggacctggtgtcggccagtgtggtctgcagagagctgggctttgggagtgccaaagaggcagtcactggctcccgactggggcaagggatcggacccatccacctcaacgagatccagtgcacaggcaatgagaagtccattatagactgcaagttcaatgccgagtctcagggctgcaaccacgaggaggatgctggtgtgagatgcaacacccctgccatgggcttgcagaagaagctgcgcctgaacggcggccgcaatccctacgagggccgagtggaggtgctggtggagagaaacgggtcccttgtgtgggggatggtgtgtggccaaaactggggcatcgtggaggccatggtggtctgccgccagctgggcctgggattcgccagcaacgccttccaggagacctggtattggcacggagatgtcaacagcaacaaagtggtcatgagtggagtgaagtgctcgggaacggagctgtccctggcgcactgccgccacgacggggaggacgtggcctgcccccagggcggagtgcagtacggggccggagttgcctgctcagaaaccgcccctgacctggtcctcaatgcggagatggtgcagcagaccacctacctggaggaccggcccatgttcctgctgcagtgtgccatggaggagaactgcctctcggcctcagccgcgcagaccgaccccaccacgggctaccgccggctcctgcgcttctcctcccagatccacaacaatggccagtccgacttccggcccaagaacggccgccacgcgtggatctggcacgactgtcacaggcactaccacagcatggaggtgttcacccactatgacctgctgaacctcaatggcaccaaggtggcagagggccacaaggccagcttctgcttggaggacacagaatgtgaaggagacatccagaagaattacgagtgtgccaacttcggcgatcagggcatcaccatgggctgctgggacatgtaccgccatgacatcgactgccagtgggttgacatcactgacgtgccccctggagactacctgttccaggttgttattaaccccaacttcgaggttgcagaatccgattactccaacaacatcatgaaatgcaggagccgctatgacggccaccgcatctggatgtacaactgccacataggtggttccttcagcgaagagacggaaaaaaagtttgagcacttcagcgggctcttaaacaaccagctgtccccgcagtaaagaagcctgcgtggtcaactcctgtcttcaggccacaccacatcttccatgggacttccccccaacaactgagtctgaacgaatgccacgtgccctcacccagcccggcccccaccctgtccagacccctacagctgtgtctaagctcaggaggaaagggaccctcccatcattcatggggggctgctacctgacccttggggcctgagaaggccttgggggggtggggtttgtccacagagctgctggagcagcaccaagagccagtcttgaccgggatgaggcccacagacaggttgtcatcagcttgtcccattcaagccaccgagctcaccacagacacagtggagccgcgctcttctccagtgacacgtggacaaatgcgggctcatcagcccccccagagagggtcaggccgaaccccatttctcctcctcttaggtcattttcagcaaacttgaatatctagacctctcttccaatgaaaccctccagtctattatagtcacatagataatggtgccacgtgttttctgatttggtgagctcagacttggtgcttccctatccacaacccccaccccttgtttttcaagatactattattatattttcacagacttttgaagcacaaatttattggcatttaatattggacatctgggcccttggaagtacaaatctaaggaaaaaccaacccactgtgtaagtgactcatcttcctgttgttccaattctgtgggtttttgattcaacggtgctataaccagggtcctgggtgacagggcgctcactgagcaccatgtgtcatcacagacacttacacatacttgaaacttggaataaaagaaagatttatgaaacgtgtctgtgtttcctttgacccacagcacctgggccctgagcagcaggcttcctatgttcagtggccagaagcagagcttcaggtacattcgtggttttctccggtggacatgggtcctcagatcccctccagcccagtgtggccaccagggcacctccttcaatagactccaaaaggggcagctcctaccatctgggagaagcaatctaaggagatcacaaaaagtaacggaacaggagtcataatctttcttgaactcctgtggtttttactgaaacttgtcagaaggcataggagttgtgcgagggctggatgggaagtctagatttaaacagccaccaggcagcttatcaaagcaagagggcatccgttcacaggacaggggctcccagcaattcccagtggcagtggggctggnccaagccncnantcacccagacacaggggacttccccttgtgtcaacagcatgctagggcccagcaaactagagggtaggtaggaccaccttggcaccaactccactcaaaccacaattgaatgagggcgtcggcacgcattcagatctcacctcttgcctttgtttacatttattttgcaggaactggcactgactgacaggtaagaccaggaccagcccaggggtcccagaactgtctcacagcacaggccagaaggctggatacctgaactgccaaaggagtgtgggcaggtgctacacagcaggtgcaacccagctcccaaaattgggcaggctgtgcacagaggccctgcaggcccagtggggatcct

SEQ ID NO: 378678 - DNA, 4358 bp, Homo sapiens
  misc_feature (15)..(15): n is a, c, g, or t
  misc_feature (44)..(44): n is a, c, g, or t
  misc_feature (47)..(47): n is a, c, g, or t
  misc_feature (3985)..(3985): n is a, c, g, or t
  misc_feature (3993)..(3993): n is a, c, g, or t
  misc_feature (3995)..(3995): n is a, c, g, or t
  misc_feature (3997)..(3997): n is a, c, g, or t
tcatcgtcatacccncgcgtatgtacgagggctgggtggcgcangangcggggcctggacttcaatattgctggtggtggtgcaaactgcaatgcgtaccccagaagggaagctggcagcttaaaagttagcagcgtgtgtgccctttgattcagagagccacttgcgcgtggctctccggagagatttctacctgggtccatgaatggacttacggaaggattccttggtaatgattctgagtgactgtgttgatggaggcaagcaaggtcttggacaagtcaaaggcggcagaaagctcctgctgcttctgtaccccgcctgtccctcccagctgcgcagggccccttcgtgggatcatcagcccgaagacagggatggagaggcctctgtgctcccacctctgcagctgcctggctatgctggccctcctgtcccccctgagcctggcacagtatgacagctggccccattaccccgagtacttccagcaaccggctcctgagtatcaccagccccaggcccccgccaacgtggccaagattcagctgcgcctggctgggcagaagaggaagcacagcgagggccgggtggaggtgtactatgatggccagtggggcaccgtgtgcgatgacgacttctccatccacgctgcccacgtcgtctgccgggagctgggctacgtggaggccaagtcctggactgccagctcctcctacggcaagggagaagggcccatctggttagacaatctccactgtactggcaacgaggcgacccttgcagcatgcacctccaatggctggggcgtcactgactgcaagcacacggaggatgtcggtgtggtgtgcagcgacaaaaggattcctgggttcaaatttgacaattcgttgatcaaccagatagagaacctgaatatccaggtggaggacattcggattcgagccatcctctcaacctaccgcaagcgcaccccagtgatggagggctacgtggaggtgaaggagggcaagacctggaagcagatctgtgacaagcactggacggccaagaattcccgcgtggtctgcggcatgtttggcttccctggggagaggacatacaataccaaagtgtacaaaatgtttgcctcacggaggaagcagcgctactggccattctccatggactgcaccggcacagaggcccacatctccagctgcaagctgggcccccaggtgtcactggaccccatgaagaatgtcacctgcgagaatgggctaccggccgtggtgagttgtgtgcctgggcaggtcttcagccctgacggaccctcgagattccggaaagcgtacaagccagagcaacccctggtgcgactgagaggcggtgcctacatcggggagggccgcgtggaggtgctcaaaaatggagagtgggggaccgtctgcgacgacaagtgggacctggtgtcggccagtgtggtctgcagagagctgggctttgggagtgccaaagaggcagtcactggctcccgactggggcaagggatcggacccatccacctcaacgagatccagtgcacaggcaatgagaagtccattatagactgcaagttcaatgccgagtctcagggctgcaaccacgaggaggatgctggtgtgagatgcaacacccctgccatgggcttgcagaagaagctgcgcctgaacggcggccgcaatccctacgagggccgagtggaggtgctggtggagagaaacgggtcccttgtgtgggggatggtgtgtggccaaaactggggcatcgtggaggccatggtggtctgccgccagctgggcctgggattcgccagcaacgccttccaggagacctggtattggcacggagatgtcaacagcaacaaagtggtcatgagtggagtgaagtgctcgggaacggagctgtccctggcgcactgccgccacgacggggaggacgtggcctgcccccagggcggagtgcagtacggggccggagttgcctgctcagaaaccgcccctgacctggtcctcaatgcggagatggtgcagcagaccacctacctggaggaccggcccatgttcctgctgcagtgtgccatggaggagaactgcctctcggcctcagccgcgcagaccgaccccaccacgggctaccgccggctcctgcgcttctcctcccagatccacaacaatggccagtccgacttccggcccaagaacggccgccacgcgtggatctggcacgactgtcacaggcactaccacagcatggaggtgttcacccactatgacctgctgaacctcaatggcaccaaggtggcagagggccacaaggccagcttctgcttggaggacacagaatgtgaaggagacatccagaagaattacgagtgtgccaacttcggcgatcagggcatcaccatgggctgctgggacatgtaccgccatgacatcgactgccagtgggttgacatcactgacgtgccccctggagactacctgttccaggttgttattaaccccaacttcgaggttgcagaatccgattactccaacaacatcatgaaatgcaggagccgctatgacggccaccgcatctggatgtacaactgccacataggtggttccttcagcgaagagacggaaaaaaagtttgagcacttcagcgggctcttaaacaaccagctgtccccgcagtaaagaagcctgcgtggtcaactcctgtcttcaggccacaccacatcttccatgggacttccccccaacaactgagtctgaacgaatgccacgtgccctcacccagcccggcccccaccctgtccagacccctacagctgtgtctaagctcaggaggaaagggaccctcccatcattcatggggggctgctacctgacccttggggcctgagaaggccttgggggggtggggtttgtccacagagctgctggagcagcaccaagagccagtcttgaccgggatgaggcccacagacaggttgtcatcagcttgtcccattcaagccaccgagctcaccacagacacagtggagccgcgctcttctccagtgacacgtggacaaatgcgggctcatcagcccccccagagagggtcaggccgaaccccatttctcctcctcttaggtcattttcagcaaacttgaatatctagacctctcttccaatgaaaccctccagtctattatagtcacatagataatggtgccacgtgttttctgatttggtgagctcagacttggtgcttccctatccacaacccccaccccttgtttttcaagatactattattatattttcacagacttttgaagcacaaatttattggcatttaatattggacatctgggcccttggaagtacaaatctaaggaaaaaccaacccactgtgtaagtgactcatcttcctgttgttccaattctgtgggtttttgattcaacggtgctataaccagggtcctgggtgacagggcgctcactgagcaccatgtgtcatcacagacacttacacatacttgaaacttggaataaaagaaagatttatgaaacgtgtctgtgtttcctttgacccacagcacctgggccctgagcagcaggcttcctatgttcagtggccagaagcagagcttcaggtacattcgtggttttctccggtggacatgggtcctcagatcccctccagcccagtgtggccaccagggcacctccttcaatagactccaaaaggggcagctcctaccatctgggagaagcaatctaaggagatcacaaaaagtaacggaacaggagtcataatctttcttgaactcctgtggtttttactgaaacttgtcagaaggcataggagttgtgcgagggctggatgggaagtctagatttaaacagccaccaggcagcttatcaaagcaagagggcatccgttcacaggacaggggctcccagcaattcccagtggcagtggggctggnccaagccncnantcacccagacacaggggacttccccttgtgtcaacagcatgctagggcccagcaaactagagggtaggtaggaccaccttggcaccaactccactcaaaccacaattgaatgagggcgtcggcacgcattcagatctcacctcttgcctttgtttacatttattttgcaggaactggcactgactgacaggtaagaccaggaccagcccaggggtcccagaactgtctcacagcacaggccagaaggctggatacctgaactgccaaaggagtgtgggcaggtgctacacagcaggtgcaacccagctcccaaaattgggcaggctgtgcacagaggccctgcaggcccagtggggatcct

SEQ ID NO: 378679 - DNA, 4380 bp, Homo sapiens
  misc_feature (4007)..(4007): n is a, c, g, or t
  misc_feature (4015)..(4015): n is a, c, g, or t
  misc_feature (4017)..(4017): n is a, c, g, or t
  misc_feature (4019)..(4019): n is a, c, g, or t
ttaaaagtaagggggaaaagagtaaacgcgcgactccagcgcgcggctacctacgcttggtgcttgctttctccagccatcggagaccagagccgccccctctgctcgagaaaggggctcagcggcggcggaagcggagggggaccaccgtggagagcgcggtcccagcccggccactgcggatccctgaaaccaagttctgaactcccggtctccccagtccctggaggctgcctgcagctttgcttagcttctcagcctgttgatcactgccgtggaattggcgagtatcttccgggggaaagcagagacaaaaaaagctcctgctgcttctgtaccccgcctgtccctcccagctgcgcagggccccttcgtgggatcatcagcccgaagacagggatggagaggcctctgtgctcccacctctgcagctgcctggctatgctggccctcctgtcccccctgagcctggcacagtatgacagctggccccattaccccgagtacttccagcaaccggctcctgagtatcaccagccccaggcccccgccaacgtggccaagattcagctgcgcctggctgggcagaagaggaagcacagcgagggccgggtggaggtgtactatgatggccagtggggcaccgtgtgcgatgacgacttctccatccacgctgcccacgtcgtctgccgggagctgggctacgtggaggccaagtcctggactgccagctcctcctacggcaagggagaagggcccatctggttagacaatctccactgtactggcaacgaggcgacccttgcagcatgcacctccaatggctggggcgtcactgactgcaagcacacggaggatgtcggtgtggtgtgcagcgacaaaaggattcctgggttcaaatttgacaattcgttgatcaaccagatagagaacctgaatatccaggtggaggacattcggattcgagccatcctctcaacctaccgcaagcgcaccccagtgatggagggctacgtggaggtgaaggagggcaagacctggaagcagatctgtgacaagcactggacggccaagaattcccgcgtggtctgcggcatgtttggcttccctggggagaggacatacaataccaaagtgtacaaaatgtttgcctcacggaggaagcagcgctactggccattctccatggactgcaccggcacagaggcccacatctccagctgcaagctgggcccccaggtgtcactggaccccatgaagaatgtcacctgcgagaatgggctaccggccgtggtgagttgtgtgcctgggcaggtcttcagccctgacggaccctcgagattccggaaagcgtacaagccagagcaacccctggtgcgactgagaggcggtgcctacatcggggagggccgcgtggaggtgctcaaaaatggagagtgggggaccgtctgcgacgacaagtgggacctggtgtcggccagtgtggtctgcagagagctgggctttgggagtgccaaagaggcagtcactggctcccgactggggcaagggatcggacccatccacctcaacgagatccagtgcacaggcaatgagaagtccattatagactgcaagttcaatgccgagtctcagggctgcaaccacgaggaggatgctggtgtgagatgcaacacccctgccatgggcttgcagaagaagctgcgcctgaacggcggccgcaatccctacgagggccgagtggaggtgctggtggagagaaacgggtcccttgtgtgggggatggtgtgtggccaaaactggggcatcgtggaggccatggtggtctgccgccagctgggcctgggattcgccagcaacgccttccaggagacctggtattggcacggagatgtcaacagcaacaaagtggtcatgagtggagtgaagtgctcgggaacggagctgtccctggcgcactgccgccacgacggggaggacgtggcctgcccccagggcggagtgcagtacggggccggagttgcctgctcagaaaccgcccctgacctggtcctcaatgcggagatggtgcagcagaccacctacctggaggaccggcccatgttcctgctgcagtgtgccatggaggagaactgcctctcggcctcagccgcgcagaccgaccccaccacgggctaccgccggctcctgcgcttctcctcccagatccacaacaatggccagtccgacttccggcccaagaacggccgccacgcgtggatctggcacgactgtcacaggcactaccacagcatggaggtgttcacccactatgacctgctgaacctcaatggcaccaaggtggcagagggccacaaggccagcttctgcttggaggacacagaatgtgaaggagacatccagaagaattacgagtgtgccaacttcggcgatcagggcatcaccatgggctgctgggacatgtaccgccatgacatcgactgccagtgggttgacatcactgacgtgccccctggagactacctgttccaggttgttattaaccccaacttcgaggttgcagaatccgattactccaacaacatcatgaaatgcaggagccgctatgacggccaccgcatctggatgtacaactgccacataggtggttccttcagcgaagagacggaaaaaaagtttgagcacttcagcgggctcttaaacaaccagctgtccccgcagtaaagaagcctgcgtggtcaactcctgtcttcaggccacaccacatcttccatgggacttccccccaacaactgagtctgaacgaatgccacgtgccctcacccagcccggcccccaccctgtccagacccctacagctgtgtctaagctcaggaggaaagggaccctcccatcattcatggggggctgctacctgacccttggggcctgagaaggccttgggggggtggggtttgtccacagagctgctggagcagcaccaagagccagtcttgaccgggatgaggcccacagacaggttgtcatcagcttgtcccattcaagccaccgagctcaccacagacacagtggagccgcgctcttctccagtgacacgtggacaaatgcgggctcatcagcccccccagagagggtcaggccgaaccccatttctcctcctcttaggtcattttcagcaaacttgaatatctagacctctcttccaatgaaaccctccagtctattatagtcacatagataatggtgccacgtgttttctgatttggtgagctcagacttggtgcttccctatccacaacccccaccccttgtttttcaagatactattattatattttcacagacttttgaagcacaaatttattggcatttaatattggacatctgggcccttggaagtacaaatctaaggaaaaaccaacccactgtgtaagtgactcatcttcctgttgttccaattctgtgggtttttgattcaacggtgctataaccagggtcctgggtgacagggcgctcactgagcaccatgtgtcatcacagacacttacacatacttgaaacttggaataaaagaaagatttatgaaacgtgtctgtgtttcctttgacccacagcacctgggccctgagcagcaggcttcctatgttcagtggccagaagcagagcttcaggtacattcgtggttttctccggtggacatgggtcctcagatcccctccagcccagtgtggccaccagggcacctccttcaatagactccaaaaggggcagctcctaccatctgggagaagcaatctaaggagatcacaaaaagtaacggaacaggagtcataatctttcttgaactcctgtggtttttactgaaacttgtcagaaggcataggagttgtgcgagggctggatgggaagtctagatttaaacagccaccaggcagcttatcaaagcaagagggcatccgttcacaggacaggggctcccagcaattcccagtggcagtggggctggnccaagccncnantcacccagacacaggggacttccccttgtgtcaacagcatgctagggcccagcaaactagagggtaggtaggaccaccttggcaccaactccactcaaaccacaattgaatgagggcgtcggcacgcattcagatctcacctcttgcctttgtttacatttattttgcaggaactggcactgactgacaggtaagaccaggaccagcccaggggtcccagaactgtctcacagcacaggccagaaggctggatacctgaactgccaaaggagtgtgggcaggtgctacacagcaggtgcaacccagctcccaaaattgggcaggctgtgcacagaggccctgcaggcccagtggggatcct

SEQ ID NO: 378680 - DNA, 3977 bp, Homo sapiens
ttaaaagtaagggggaaaagagtaaacgcgcgactccagcgcgcggctacctacgcttggtgcttgctttctccagccatcggagaccagagccgccccctctgctcgagaaaggggctcagcggcggcggaagcggagggggaccaccgtggagagcgcggtcccagcccggccactgcggatccctgaaaccaaaaagctcctgctgcttctgtaccccgcctgtccctcccagctgcgcagggccccttcgtgggatcatcagcccgaagacagggatggagaggcctctgtgctcccacctctgcagctgcctggctatgctggccctcctgtcccccctgagcctggcacagtatgacagctggccccattaccccgagtacttccagcaaccggctcctgagtatcaccagccccaggcccccgccaacgtggccaagattcagctgcgcctggctgggcagaagaggaagcacagcgagggccgggtggaggtgtactatgatggccagtggggcaccgtgtgcgatgacgacttctccatccacgctgcccacgtcgtctgccgggagctgggctacgtggaggccaagtcctggactgccagctcctcctacggcaagggagaagggcccatctggttagacaatctccactgtactggcaacgaggcgacccttgcagcatgcacctccaatggctggggcgtcactgactgcaagcacacggaggatgtcggtgtggtgtgcagcgacaaaaggattcctgggttcaaatttgacaattcgttgatcaaccagatagagaacctgaatatccaggtggaggacattcggattcgagccatcctctcaacctaccgcaagcgcaccccagtgatggagggctacgtggaggtgaaggagggcaagacctggaagcagatctgtgacaagcactggacggccaagaattcccgcgtggtctgcggcatgtttggcttccctggggagaggacatacaataccaaagtgtacaaaatgtttgcctcacggaggaagcagcgctactggccattctccatggactgcaccggcacagaggcccacatctccagctgcaagctgggcccccaggtgtcactggaccccatgaagaatgtcacctgcgagaatgggctaccggccgtggtgagttgtgtgcctgggcaggtcttcagccctgacggaccctcgagattccggaaagcgtacaagccagagcaacccctggtgcgactgagaggcggtgcctacatcggggagggccgcgtggaggtgctcaaaaatggagagtgggggaccgtctgcgacgacaagtgggacctggtgtcggccagtgtggtctgcagagagctgggctttgggagtgccaaagaggcagtcactggctcccgactggggcaagggatcggacccatccacctcaacgagatccagtgcacaggcaatgagaagtccattatagactgcaagttcaatgccgagtctcagggctgcaaccacgaggaggatgctggtgtgagatgcaacacccctgccatgggcttgcagaagaagctgcgcctgaacggcggccgcaatccctacgagggccgagtggaggtgctggtggagagaaacgggtcccttgtgtgggggatggtgtgtggccaaaactggggcatcgtggaggccatggtggtctgccgccagctgggcctgggattcgccagcaacgccttccaggagacctggtattggcacggagatgtcaacagcaacaaagtggtcatgagtggagtgaagtgctcgggaacggagctgtccctggcgcactgccgccacgacggggaggacgtggcctgcccccagggcggagtgcagtacggggccggagttgcctgctcagaaaccgcccctgacctggtcctcaatgcggagatggtgcagcagaccacctacctggaggaccggcccatgttcctgctgcagtgtgccatggaggagaactgcctctcggcctcagccgcgcagaccgaccccaccacgggctaccgccggctcctgcgcttctcctcccagatccacaacaatggccagtccgacttccggcccaagaacggccgccacgcgtggatctggcacgactgtcacaggcactaccacagcatggaggtgttcacccactatgacctgctgaacctcaatggcaccaaggtggcagagggccacaaggccagcttctgcttggaggacacagaatgtgaaggagacatccagaagaattacgagtgtgccaacttcggcgatcagggcatcaccatgggctgctgggacatgtaccgccatgacatcgactgccagtgggttgacatcactgacgtgccccctggagactacctgttccaggttgttattaaccccaacttcgaggttgcagaatccgattactccaacaacatcatgaaatgcaggagccgctatgacggccaccgcatctggatgtacaactgccacataggtggttccttcagcgaagagacggaaaaaaagtttgagcacttcagcgggctcttaaacaaccagctgtccccgcagtaaagaagcctgcgtggtcaactcctgtcttcaggccacaccacatcttccatgggacttccccccaacaactgagtctgaacgaatgccacgtgccctcacccagcccggcccccaccctgtccagacccctacagctgtgtctaagctcaggaggaaagggaccctcccatcattcatggggggctgctacctgacccttggggcctgagaaggccttgggggggtggggtttgtccacagagctgctggagcagcaccaagagccagtcttgaccgggatgaggcccacagacaggttgtcatcagcttgtcccattcaagccaccgagctcaccacagacacagtggagccgcgctcttctccagtgacacgtggacaaatgcgggctcatcagcccccccagagagggtcaggccgaaccccatttctcctcctcttaggtcattttcagcaaacttgaatatctagacctctcttccaatgaaaccctccagtctattatagtcacatagataatggtgccacgtgttttctgatttggtgagctcagacttggtgcttccctatccacaacccccaccccttgtttttcaagatactattattatattttcacagacttttgaagcacaaatttattggcatttaatattggacatctgggcccttggaagtacaaatctaaggaaaaaccaacccactgtgtaagtgactcatcttcctgttgttccaattctgtgggtttttgattcaacggtgctataaccagggtcctgggtgacagggcgctcactgagcaccatgtgtcatcacagacacttacacatacttgaaacttggaataaaagaaagatttatgaaacgtgtctgtgtttcctttgacccacagcacctgggccctgagcagcaggcttcctatgttcagtggccagaagcagagcttcaggtacattcgtggttttctccggtggacatgggtcctcagatcccctccagcccagtgtggccaccagggcacctccttcaatagactccaaaaggggcagctcctaccatctgggagaagcaatctaaggagatcacaaaaagtaacggaacaggagtcataatctttcttgaactcctgtggtttttactgaaacttgtcagaaggcataggagttgtgcgagggctggatgggaagtctagatttaaacagccaccaggcagcttatcaaagcaagagggcatccgttcacaggacaggggctcccagcaattcccagtggcagtgggggggtggcctgtacgccagggatcccttacgaatcatgtcgtactgcccttgtgtaagaggatgcttgccagacccatatatgagtcacgggacaa

SEQ ID NO: 378681 - DNA, 3406 bp, Homo sapiens
ttaaaagtaagggggaaaagagtaaacgcgcgactccagcgcgcggctacctacgcttggtgcttgctttctccagccatcggagaccagagccgccccctctgctcgagaaaggggctcagcggcggcggaagcggagggggaccaccgtggagagcgcggtcccagcccggccactgcggatccctgaaaccaaaaagctcctgctgcttctgtaccccgcctgtccctcccagctgcgcagggccccttcgtgggatcatcagcccgaagacagggatggagaggcctctgtgctcccacctctgcagctgcctggctatgctggccctcctgtcccccctgagcctggcacagtatgacagctggccccattaccccgagtacttccagcaaccggctcctgagtatcaccagccccaggcccccgccaacgtggccaagattcagctgcgcctggctgggcagaagaggaagcacagcgagggccgggtggaggtgtactatgatggccagtggggcaccgtgtgcgatgacgacttctccatccacgctgcccacgtcgtctgccgggagctgggctacgtggaggccaagtcctggactgccagctcctcctacggcaagggagaagggcccatctggttagacaatctccactgtactggcaacgaggcgacccttgcagcatgcacctccaatggctggggcgtcactgactgcaagcacacggaggatgtcggtgtggtgtgcagcgacaaaaggattcctgggttcaaatttgacaattcgttgatcaaccagatagagaacctgaatatccaggtggaggacattcggattcgagccatcctctcaacctaccgcaagcgcaccccagtgatggagggctacgtggaggtgaaggagggcaagacctggaagcagatctgtgacaagcactggacggccaagaattcccgcgtggtctgcggcatgtttggcttccctggggagaggacatacaataccaaagtgtacaaaatgtttgcctcacggaggaagcagcgctactggccattctccatggactgcaccggcacagaggcccacatctccagctgcaagctgggcccccaggtgtcactggaccccatgaagaatgtcacctgcgagaatgggctaccggccgtggtgagttgtgtgcctgggcaggtcttcagccctgacggaccctcgagattccggaaagcgtacaagccagagcaacccctggtgcgactgagaggcggtgcctacatcggggagggccgcgtggaggtgctcaaaaatggagagtgggggaccgtctgcgacgacaagtgggacctggtgtcggccagtgtggtctgcagagagctgggctttgggagtgccaaagaggcagtcactggctcccgactggggcaagggatcggacccatccacctcaacgagatccagtgcacaggcaatgagaagtccattatagactgcaagttcaatgccgagtctcagggctgcaaccacgaggaggatgctggtgtgagatgcaacacccctgccatgggcttgcagaagaagctgcgcctgaacggcggccgcaatccctacgagggccgagtggaggtgctggtggagagaaacgggtcccttgtgtgggggatggtgtgtggccaaaactggggcatcgtggaggccatggtggtctgccgccagctgggcctgggattcgccagcaacgccttccaggagacctggtattggcacggagatgtcaacagcaacaaagtggtcatgagtggagtgaagtgctcgggaacggagctgtccctggcgcactgccgccacgacggggaggacgtggcctgcccccagggcggagtgcagtacggggccggagttgcctgctcagaaaccgcccctgacctggtcctcaatgcggagatggtgcagcagaccacctacctggaggaccggcccatgttcctgctgcagtgtgccatggaggagaactgcctctcggcctcagccgcgcagaccgaccccaccacgggctaccgccggctcctgcgcttctcctcccagatccacaacaatggccagtccgacttccggcccaagaacggccgccacgcgtggatctggcacgactgtcacaggcactaccacagcatggaggtgttcacccactatgacctgctgaacctcaatggcaccaaggtggcagagggccacaaggccagcttctgcttggaggacacagaatgtgaaggagacatccagaagaattacgagtgtgccaacttcggcgatcagggcatcaccatgggctgctgggacatgtaccgccatgacatcgactgccagtgggttgacatcactgacgtgccccctggagactacctgttccaggttgttattaaccccaacttcgaggttgcagaatccgattactccaacaacatcatgaaatgcaggagccgctatgacggccaccgcatctggatgtacaactgccacataggtggttccttcagcgaagagacggaaaaaaagtttgagcacttcagcgggctcttaaacaaccagctgtccccgcagtaaagaagcctgcgtggtcaactcctgtcttcaggccacaccacatcttccatgggacttccccccaacaactgagtctgaacgaatgccacgtgccctcacccagcccggcccccaccctgtccagacccctacagctgtgtctaagctcaggaggaaagggaccctcccatcattcatggggggctgctacctgacccttggggcctgagaaggccttgggggggtggggtttgtccacagagctgctggagcagcacccaagccaccgagctcaccacagacacagtggagccgcgctcttctccagtgacacgtggacaaatgcgggctcatcagcccccccagagagggtcaggccgaaccccatttctcctcctcttaggtcattttcagcaaacttgaatatctagacctctcttccaatgaaaccctccagtctattatagtcacatagataatggtgccacgtgttttctgatttggtgagctcagacttggtgcttccctatccacaacccccaccccttgtttttcaagatactattattatattttcacagacttttgaagcacaaatttattggcatttaatattggacatctgggcccttggaagtacaaatctaaggaaaaaccaacccactgtgtaagtgactcatcttcctgttgttccaattctgtgggtttttgattcaacggtgctataaccagggtcctgggtgacagggcgctcactgagcaccatgtgtcatcacagacacttacacatacttgaaacttggaataaaagaaagatttatga

SEQ ID NO: 378682 - DNA, 3486 bp, Homo sapiens
ttaaaagtaagggggaaaagagtaaacgcgcgactccagcgcgcggctacctacgcttggtgcttgctttctccagccatcggagaccagagccgccccctctgctcgagaaaggggctcagcggcggcggaagcggagggggaccaccgtggagagcgcggtcccagcccggccactgcggatccctgaaaccaaaaagctcctgctgcttctgtaccccgcctgtccctcccagctgcgcagggccccttcgtgggatcatcagcccgaagacagggatggagaggcctctgtgctcccacctctgcagctgcctggctatgctggccctcctgtcccccctgagcctggcacagtatgacagctggccccattaccccgagtacttccagcaaccggctcctgagtatcaccagccccaggcccccgccaacgtggccaagattcagctgcgcctggctgggcagaagaggaagcacagcgagggccgggtggaggtgtactatgatggccagtggggcaccgtgtgcgatgacgacttctccatccacgctgcccacgtcgtctgccgggagctgggctacgtggaggccaagtcctggactgccagctcctcctacggcaagggagaagggcccatctggttagacaatctccactgtactggcaacgaggcgacccttgcagcatgcacctccaatggctggggcgtcactgactgcaagcacacggaggatgtcggtgtggtgtgcagcgacaaaaggattcctgggttcaaatttgacaattcgttgatcaaccagatagagaacctgaatatccaggtggaggacattcggattcgagccatcctctcaacctaccgcaagcgcaccccagtgatggagggctacgtggaggtgaaggagggcaagacctggaagcagatctgtgacaagcactggacggccaagaattcccgcgtggtctgcggcatgtttggcttccctggggagaggacatacaataccaaagtgtacaaaatgtttgcctcacggaggaagcagcgctactggccattctccatggactgcaccggcacagaggcccacatctccagctgcaagctgggcccccaggtgtcactggaccccatgaagaatgtcacctgcgagaatgggctaccggccgtggtgagttgtgtgcctgggcaggtcttcagccctgacggaccctcgagattccggaaagcgtacaagccagagcaggaccgtgtgtctcttcagcaacccctggtgcgactgagaggcggtgcctacatcggggagggccgcgtggaggtgctcaaaaatggagagtgggggaccgtctgcgacgacaagtgggacctggtgtcggccagtgtggtctgcagagagctgggctttgggagtgccaaagaggcagtcactggctcccgactggggcaagggatcggacccatccacctcaacgagatccagtgcacaggcaatgagaagtccattatagactgcaagttcaatgccgagtctcagggctgcaaccacgaggaggatgctggtgtgagatgcaacacccctgccatgggcttgcagaagaagctgcgcctgaacggcggccgcaatccctacgagggccgagtggaggtgctggtggagagaaacgggtcccttgtgtgggggatggtgtgtggccaaaactggggcatcgtggaggccatggtggtctgccgccagctgggcctgggattcgccagcaacgccttccaggagacctggtattggcacggagatgtcaacagcaacaaagtggtcatgagtggagtgaagtgctcgggaacggagctgtccctggcgcactgccgccacgacggggaggacgtggcctgcccccagggcggagtgcagtacggggccggagttgcctgctcagaaaccgcccctgacctggtcctcaatgcggagatggtgcagcagaccacctacctggaggaccggcccatgttcctgctgcagtgtgccatggaggagaactgcctctcggcctcagccgcgcagaccgaccccaccacgggctaccgccggctcctgcgcttctcctcccagatccacaacaatggccagtccgacttccggcccaagaacggccgccacgcgtggatctggcacgactgtcacaggcactaccacagcatggaggtgttcacccactatgacctgctgaacctcaatggcaccaaggtggcagagggccacaaggccagcttctgcttggaggacacagaatgtgaaggagacatccagaagaattacgagtgtgccaacttcggcgatcagggcatcaccatgggctgctgggacatgtaccgccatgacatcgactgccagtgggttgacatcactgacgtgccccctggagactacctgttccaggttgttattaaccccaacttcgaggttgcagaatccgattactccaacaacatcatgaaatgcaggagccgctatgacggccaccgcatctggatgtacaactgccacataggtggttccttcagcgaagagacggaaaaaaagtttgagcacttcagcgggctcttaaacaaccagctgtccccgcagtaaagaagcctgcgtggtcaactcctgtcttcaggccacaccacatcttccatgggacttccccccaacaactgagtctgaacgaatgccacgtgccctcacccagcccggcccccaccctgtccagacccctacagctgtgtctaagctcaggaggaaagggaccctcccatcattcatggggggctgctacctgacccttggggcctgagaaggccttgggggggtggggtttgtccacagagctgctggagcagcaccaagagccagtcttgaccgggatgaggcccacagacaggttgtcatcagcttgtcccattcaagccaccgagctcaccacagacacagtggagccgcgctcttctccagtgacacgtggacaaatgcgggctcatcagcccccccagagagggtcaggccgaaccccatttctcctcctcttaggtcattttcagcaaacttgaatatctagacctctcttccaatgaaaccctccagtctattatagtcacatagataatggtgccacgtgttttctgatttggtgagctcagacttggtgcttccctatccacaacccccaccccttgtttttcaagatactattattatattttcacagacttttgaagcacaaatttattggcatttaatattggacatctgggcccttggaagtacaaatctaaggaaaaaccaacccactgtgtaagtgactcatcttcctgttgttccaattctgtgggtttttgattcaacggtgctataaccagggtcctgggtgacagggcgctcactgagcaccatgtgtcatcacagacacttacacatacttgaaacttggaataaaagaaagatttatga

SEQ ID NO: 378683 - DNA, 3177 bp, Homo sapiens
ttaaaagtaagggggaaaagagtaaacgcgcgactccagcgcgcggctacctacgcttggtgcttgctttctccagccatcggagaccagagccgccccctctgctcgagaaaggggctcagcggcggcggaagcggagggggaccaccgtggagagcgcggtcccagcccggccactgcggatccctgaaaccaaaaagctcctgctgcttctgtaccccgcctgtccctcccagctgcgcagggccccttcgtgggatcatcagcccgaagacagggatggagaggcctctgtgctcccacctctgcagctgcctggctatgctggccctcctgtcccccctgagcctggcacagtatgacagctggccccattaccccgagtacttccagcaaccggctcctgagtatcaccagccccaggcccccgccaacgtggccaagattcagctgcgcctggctgggcagaagaggaagcacagcgagggccgggtggaggtgtactatgatggccagtggggcaccgtgtgcgatgacgacttctccatccacgctgcccacgtcgtctgccgggagctgggctacgtggaggccaagtcctggactgccagctcctcctacggcaagggagaagggcccatctggttagacaatctccactgtactggcaacgaggcgacccttgcagcatgcacctccaatggctggggcgtcactgactgcaagcacacggaggatgtcggtgtggtgtgcagcgacaaaaggattcctgggttcaaatttgacaattcgttgatcaaccagatagagaacctgaatatccaggtggaggacattcggattcgagccatcctctcaacctaccgcaagcgcaccccagtgatggagggctacgtggaggtgaaggagggcaagacctggaagcagatctgtgacaagcactggacggccaagaattcccgcgtggtctgcggcatgtttggcttccctggggagaggacatacaataccaaagtgtacaaaatgtttgcctcacggaggaagcagcgctactggccattctccatggactgcaccggcacagaggcccacatctccagctgcaagctgggcccccaggtgtcactggaccccatgaagaatgtcacctgcgagaatgggctaccggccgtggtgagttgtgtgcctgggcaggtcttcagccctgacggaccctcgagattccggaaagcgtacaagccagaggatgctggtgtgagatgcaacacccctgccatgggcttgcagaagaagctgcgcctgaacggcggccgcaatccctacgagggccgagtggaggtgctggtggagagaaacgggtcccttgtgtgggggatggtgtgtggccaaaactggggcatcgtggaggccatggtggtctgccgccagctgggcctgggattcgccagcaacgccttccaggagacctggtattggcacggagatgtcaacagcaacaaagtggtcatgagtggagtgaagtgctcgggaacggagctgtccctggcgcactgccgccacgacggggaggacgtggcctgcccccagggcggagtgcagtacggggccggagttgcctgctcagaaaccgcccctgacctggtcctcaatgcggagatggtgcagcagaccacctacctggaggaccggcccatgttcctgctgcagtgtgccatggaggagaactgcctctcggcctcagccgcgcagaccgaccccaccacgggctaccgccggctcctgcgcttctcctcccagatccacaacaatggccagtccgacttccggcccaagaacggccgccacgcgtggatctggcacgactgtcacaggcactaccacagcatggaggtgttcacccactatgacctgctgaacctcaatggcaccaaggtggcagagggccacaaggccagcttctgcttggaggacacagaatgtgaaggagacatccagaagaattacgagtgtgccaacttcggcgatcagggcatcaccatgggctgctgggacatgtaccgccatgacatcgactgccagtgggttgacatcactgacgtgccccctggagactacctgttccaggttgttattaaccccaacttcgaggttgcagaatccgattactccaacaacatcatgaaatgcaggagccgctatgacggccaccgcatctggatgtacaactgccacataggtggttccttcagcgaagagacggaaaaaaagtttgagcacttcagcgggctcttaaacaaccagctgtccccgcagtaaagaagcctgcgtggtcaactcctgtcttcaggccacaccacatcttccatgggacttccccccaacaactgagtctgaacgaatgccacgtgccctcacccagcccggcccccaccctgtccagacccctacagctgtgtctaagctcaggaggaaagggaccctcccatcattcatggggggctgctacctgacccttggggcctgagaaggccttgggggggtggggtttgtccacagagctgctggagcagcaccaagagccagtcttgaccgggatgaggcccacagacaggttgtcatcagcttgtcccattcaagccaccgagctcaccacagacacagtggagccgcgctcttctccagtgacacgtggacaaatgcgggctcatcagcccccccagagagggtcaggccgaaccccatttctcctcctcttaggtcattttcagcaaacttgaatatctagacctctcttccaatgaaaccctccagtctattatagtcacatagataatggtgccacgtgttttctgatttggtgagctcagacttggtgcttccctatccacaacccccaccccttgtttttcaagatactattattatattttcacagacttttgaagcacaaatttattggcatttaatattggacatctgggcccttggaagtacaaatctaaggaaaaaccaacccactgtgtaagtgactcatcttcctgttgttccaattctgtgggtttttgattcaacggtgctataaccagggtcctgggtgacagggcgctcactgagcaccatgtgtcatcacagacacttacacatacttgaaacttggaataaaagaaagatttatga

SEQ ID NO: 378684 - DNA, 2678 bp, Homo sapiens
ttaaaagtaagggggaaaagagtaaacgcgcgactccagcgcgcggctacctacgcttggtgcttgctttctccagccatcggagaccagagccgccccctctgctcgagaaaggggctcagcggcggcggaagcggagggggaccaccgtggagagcgcggtcccagcccggccactgcggatccctgaaaccaaaaagctcctgctgcttctgtaccccgcctgtccctcccagctgcgcagggccccttcgtgggatcatcagcccgaagacagggatggagaggcctctgtgctcccacctctgcagctgcctggctatgctggccctcctgtcccccctgagcctggcacagtatgacagctggccccattaccccgagtacttccagcaaccggctcctgagtatcaccagccccaggcccccgccaacgtggccaagattcagctgcgcctggctgggcagaagaggaagcacagcgagggccgggtggaggtgtactatgatggccagtggggcaccgtgtgcgatgacgacttctccatccacgctgcccacgtcgtctgccgggagctgggctacgtggaggccaagtcctggatgccaaagaggcagtcactggctcccgactggggcaagggatcggacccatccacctcaacgagatccagtgcacaggcaatgagaagtccattatagactgcaagttcaatgccgagtctcagggctgcaaccacgaggaggatgctggtgtgagatgcaacacccctgccatgggcttgcagaagaagctgcgcctgaacggcggccgcaatccctacgagggccgagtggaggtgctggtggagagaaacgggtcccttgtgtgggggatggtgtgtggccaaaactggggcatcgtggaggccatggtggtctgccgccagctgggcctgggattcgccagcaacgccttccaggagacctggtattggcacggagatgtcaacagcaacaaagtggtcatgagtggagtgaagtgctcgggaacggagctgtccctggcgcactgccgccacgacggggaggacgtggcctgcccccagggcggagtgcagtacggggccggagttgcctgctcagaaaccgcccctgacctggtcctcaatgcggagatggtgcagcagaccacctacctggaggaccggcccatgttcctgctgcagtgtgccatggaggagaactgcctctcggcctcagccgcgcagaccgaccccaccacgggctaccgccggctcctgcgcttctcctcccagatccacaacaatggccagtccgacttccggcccaagaacggccgccacgcgtggatctggcacgactgtcacaggcactaccacagcatggaggtgttcacccactatgacctgctgaacctcaatggcaccaaggtggcagagggccacaaggccagcttctgcttggaggacacagaatgtgaaggagacatccagaagaattacgagtgtgccaacttcggcgatcagggcatcaccatgggctgctgggacatgtaccgccatgacatcgactgccagtgggttgacatcactgacgtgccccctggagactacctgttccaggttgttattaaccccaacttcgaggttgcagaatccgattactccaacaacatcatgaaatgcaggagccgctatgacggccaccgcatctggatgtacaactgccacataggtggttccttcagcgaagagacggaaaaaaagtttgagcacttcagcgggctcttaaacaaccagctgtccccgcagtaaagaagcctgcgtggtcaactcctgtcttcaggccacaccacatcttccatgggacttccccccaacaactgagtctgaacgaatgccacgtgccctcacccagcccggcccccaccctgtccagacccctacagctgtgtctaagctcaggaggaaagggaccctcccatcattcatggggggctgctacctgacccttggggcctgagaaggccttgggggggtggggtttgtccacagagctgctggagcagcaccaagagccagtcttgaccgggatgaggcccacagacaggttgtcatcagcttgtcccattcaagccaccgagctcaccacagacacagtggagccgcgctcttctccagtgacacgtggacaaatgcgggctcatcagcccccccagagagggtcaggccgaaccccatttctcctcctcttaggtcattttcagcaaacttgaatatctagacctctcttccaatgaaaccctccagtctattatagtcacatagataatggtgccacgtgttttctgatttggtgagctcagacttggtgcttccctatccacaacccccaccccttgtttttcaagatactattattatattttcacagacttttgaagcacaaatttattggcatttaatattggacatctgggcccttggaagtacaaatctaaggaaaaaccaacccactgtgtaagtgactcatcttcctgttgttccaattctgtgggtttttgattcaacggtgctataaccagggtcctgggtgacagggcgctcactgagcaccatgtgtcatcacagacacttacacatacttgaaacttggaataaaagaaagatttatga

SEQ ID NO: 378685 - DNA, 2262 bp, Homo sapiens
ttaaaagtaagggggaaaagagtaaacgcgcgactccagcgcgcggctacctacgcttggtgcttgctttctccagccatcggagaccagagccgccccctctgctcgagaaaggggctcagcggcggcggaagcggagggggaccaccgtggagagcgcggtcccagcccggccactgcggatccctgaaaccaaaaagctcctgctgcttctgtaccccgcctgtccctcccagctgcgcagggccccttcgtgggatcatcagcccgaagacagggatggagaggcctctgtgctcccacctctgcagctgcctggctatgctggccctcctgtcccccctgagcctggcacagtatgacagctggccccattaccccgagtacttccagcaaccggctcctgagtatcaccagccccaggcccccgccaacgtggccaagattcagctgcgcctggctgggcagaagaggaagcacagcgagggccgggtggaggtgtactatgatggccagtggggcaccgtgtgcgatgacgacttctccatccacgctgcccacgtcgtctgccgggagctgggctacgtggaggccaagtcctggactgccagctcctcctacggcaagggagaagggcccatctggttagacaatctccactgtactggcaacgaggcgacccttgcagcatgcacctccaatggctggggcgtcactgactgcaagcacacggaggatgtcggtgtggtgtgcagcgacaaaaggattcctgggttcaaatttgacaattcgttgatcaaccagatagagaacctgaatatccaggtggaggacattcggattcgagccatcctctcaacctaccgcaagcgcaccccagtgatggagggctacgtggaggtgaaggagggcaagacctggaagcagatctgtgacaagcactggacggccaagaattcccgcgtggtctgcggcatgtttggcttccctggggagaggacatacaataccaaagtgtacaaaatgtttgcctcacggaggaagcagcgctactggccattctccatggactgcaccggcacagaggcccacatctccagctgcaagctgggcccccaggtgtcactggaccccatgaagaatgtcacctgcgagaatgggctaccggccgtggtgagttgtgtgcctgggcaggtcttcagccctgacggaccctcgagattccggaaagcgtacaagccagagcaacccctggtgcgactgagaggcggtgcctacatcggggagggccgcgtggaggtgctcaaaaatggagagtgggggaccgtctgcgacgacaagtgggacctggtgtcggccagtgtggtctgcagagagctgggctttgggagtgccaaagaggcagtcactggctcccgactggggcaagggatcggacccatccacctcaacgagatccagtgcacaggcaatgagaagtccattatagactgcaagttcaatgccgagtctcagggctgcaaccacgaggaggatgctggtgtgagatgcaacacccctgccatgggcttgcagaagaagctgcgcctgaacggcggccgcaatccctacgagggccgagtggaggtgctggtggagagaaacgggtcccttgtgtgggggatggtgtgtggccaaaactggggcatcgtggaggccatggtggtctgccgccagctgggcctgggattcgccagcaacgccttccaggagacctggtattggcacggagatgtcaacagcaacaaagtggtcatgagtggagtgaagtgctcgggaacggagctgtccctggcgcactgccgccacgacggggaggacgtggcctgcccccagggcggagtgcagtacggggccggagttgcctgctcagaaaccgcccctgacctggtcctcaatgcggagatggtgcagcagaccacctacctggaggaccggcccatgttcctgctgcagtgtgccatggaggagaactgcctctcggcctcagccgcgcagaccgaccccaccacgggctaccgccggctcctgcgcttctcctcccagatccacaacaatggccagtccgactggggcaagggatcggacccatccacctcaacgagatccagtgcacaggcaatgagaagtccattatagactgcaagttcaatgccgagtctcagggctgcaaccacgaggaggatgctggtgtgagatgcaacacccctccatgggcttgca

SEQ ID NO: 378686 - DNA, 1974 bp, Homo sapiens
ttaaaagtaagggggaaaagagtaaacgcgcgactccagcgcgcggctacctacgcttggtgcttgctttctccagccatcggagaccagagccgccccctctgctcgagaaaggggctcagcggcggcggaagcggagggggaccaccgtggagagcgcggtcccagcccggccactgcggatccctgaaaccaaaaagctcctgctgcttctgtaccccgcctgtccctcccagctgcgcagggccccttcgtgggatcatcagcccgaagacagggatggagaggcctctgtgctcccacctctgcagctgcctggctatgctggccctcctgtcccccctgagcctggcacagtatgacagctggccccattaccccgagtacttccagcaaccggctcctgagtatcaccagccccaggcccccgccaacgtggccaagattcagctgcgcctggctgggcagaagaggaagcacagcgagggccgggtggaggtgtactatgatggccagtggggcaccgtgtgcgatgacgacttctccatccacgctgcccacgtcgtctgccgggagctgggctacgtggaggccaagtcctggactgccagctcctcctacggcaagggagaagggcccatctggttagacaatctccactgtactggcaacgaggcgacccttgcagcatgcacctccaatggctggggcgtcactgactgcaagcacacggaggatgtcggtgtggtgtgcagcgacaaaaggattcctgggttcaaatttgacaattcgttgatcaaccagatagagaacctgaatatccaggtggaggacattcggattcgagccatcctctcaacctaccgcaagcgcaccccagtgatggagggctacgtggaggtgaaggagggcaagacctggaagcagatctgtgacaagcactggacggccaagaattcccgcgtggtctgcggcatgtttggcttccctggggagaggacatacaataccaaagtgtacaaaatgtttgcctcacggaggaagcagcgctactggccattctccatggactgcaccggcacagaggcccacatctccagctgcaagctgggcccccaggtgtcactggaccccatgaagaatgtcacctgcgagaatgggctaccggccgtggtgagttgtgtgcctgggcaggtcttcagccctgacggaccctcgagattccggaaagcgtacaagccagagcaacccctggtgcgactgagaggcggtgcctacatcggggagggccgcgtggaggtgctcaaaaatggagagtgggggaccgtctgcgacgacaagtgggacctggtgtcggccagtgtggtctgcagagagctgggctttgggagtgccaaagaggcagtcactggctcccgactggggcaagggatcggacccatccacctcaacgagatccagtgcacaggcaatgagaagtccattatagactgcaagttcaatgccgagtctcagggctgcaaccacgaggaggatgctggtgtgagatgcaacacccctgccatgggcttgcagaagaaggtgatgggactggacacctagaggggactgtaactgaggctgcagaaagtatagccacagagctctggggtgaaccctggaagtgaccaggtgctgctgctagtactgctgcagacattgccacttggcatttgcaatgtttagttccccctcgaacctcgggcctggccctggcccggcagcaggcccaagcccctgtgtgcagtgtgagctggaaaggccctgcctccttgcatgttaacatctgaggtgagttacctcacctctgccccaccacctccaaagacaggcgtgggaccggctagccacaaccttatcaaaacacggtgcagcctggctgtgctctgctggctggaggcgttctctttcctctattcatgttcagaaaaaaac

SEQ ID NO: 378687 - DNA, 1817 bp, Homo sapiens
ttaaaagtaagggggaaaagagtaaacgcgcgactccagcgcgcggctacctacgcttggtgcttgctttctccagccatcggagaccagagccgccccctctgctcgagaaaggggctcagcggcggcggaagcggagggggaccaccgtggagagcgcggtcccagcccggccactgcggatccctgaaaccaaaaagctcctgctgcttctgtaccccgcctgtccctcccagctgcgcagggccccttcgtgggatcatcagcccgaagacagggatggagaggcctctgtgctcccacctctgcagctgcctggctatgctggccctcctgtcccccctgagcctggcacagtatgacagctggccccattaccccgagtacttccagcaaccggctcctgagtatcaccagccccaggcccccgccaacgtggccaagattcagctgcgcctggctgggcagaagaggaagcacagcgagggccgggtggaggtgtactatgatggccagtggggcaccgtgtgcgatgacgacttctccatccacgctgcccacgtcgtctgccgggagctgggctacgtggaggccaagtcctggactgccagctcctcctacggcaagggagaagggcccatctggttagacaatctccactgtactggcaacgaggcgacccttgcagcatgcacctccaatggctggggcgtcactgactgcaagcacacggaggatgtcggtgtggtgtgcagcgacaaaaggattcctgggttcaaatttgacaattcgttgatcaaccagatagagaacctgaatatccaggtggaggacattcggattcgagccatcctctcaacctaccgcaagcgcaccccagtgatggagggctacgtggaggtgaaggagggcaagacctggaagcagatctgtgacaagcactggacggccaagaattcccgcgtggtctgcggcatgtttggcttccctggggagaggacatacaataccaaagtgtacaaaatgtttgcctcacggaggaagcagcgctactggccattctccatggactgcaccggcacagaggcccacatctccagctgcaagctgggcccccaggtgtcactggaccccatgaagaatgtcacctgcgagaatgggctaccggccgtggtgagttgtgtgcctgggcaggtcttcagccctgacggaccctcgagattccggaaagcgtacaagccagaggctggagtgcaatggcatgatcttggttcactgcaacctccggctcctgggttcacgcgattctcctgcctcggcctcccaagtagctgagatgacaggcacccgccaccacgcctcgctaatttttgtatttttagtagagatggggtttcaccatgttggccaggctagtcttgaactcctgacctcagatggcccacccgcctcagcctcccaaagtgctgggattacagatgtgagcccactggccgatttcctagaacaagtaaagtagtccaaccacagcaggcttgacccagcctctgacaaagagcaaatgccctatctgtctcttcttgattcgcttttctttctcctcctcttcctttttcctgtatccatcaaagggtctctgtgatttctgtgttcaggaaacagcgaatatcttgtgagtgggtgggaatagcaactgggaagaggagagggagggataggagaagtgaccgatcatttctcaggggctgatgccctgtgccaggtaaaacctcagtacttagtgcactgtttgctgacgcggcatgagtagatgagac

SEQ ID NO: 378688 - DNA, 4478 bp, Homo sapiens
  misc_feature (15)..(15): n is a, c, g, or t
  misc_feature (44)..(44): n is a, c, g, or t
  misc_feature (47)..(47): n is a, c, g, or t
  misc_feature (4105)..(4105): n is a, c, g, or t
  misc_feature (4113)..(4113): n is a, c, g, or t
  misc_feature (4115)..(4115): n is a, c, g, or t
  misc_feature (4117)..(4117): n is a, c, g, or t
tcatcgtcatacccncgcgtatgtacgagggctgggtggcgcangangcggggcctggacttcaatattgctggtggtggtgcaaactgcaatgcgtaccccagaagggaagctggcagcttaaaagttagcagcgtgtgtgccctttgattcagagagccacttgcgcgtggctctccggagagatttctacctgggtccatgaatggacttacggaaggattccttggtaatgattctgagtgactgtgttgatggaggcaagcaaggtcttggacaagtcaaaggcggcagccatcggagaccagagccgccccctctgctcgagaaaggggctcagcggcggcggaagcggagggggaccaccgtggagagcgcggtcccagcccggccactgcggatccctgaaaccaaaaagctcctgctgcttctgtaccccgcctgtccctcccagctgcgcagggccccttcgtgggatcatcagcccgaagacagggatggagaggcctctgtgctcccacctctgcagctgcctggctatgctggccctcctgtcccccctgagcctggcacagtatgacagctggccccattaccccgagtacttccagcaaccggctcctgagtatcaccagccccaggcccccgccaacgtggccaagattcagctgcgcctggctgggcagaagaggaagcacagcgagggccgggtggaggtgtactatgatggccagtggggcaccgtgtgcgatgacgacttctccatccacgctgcccacgtcgtctgccgggagctgggctacgtggaggccaagtcctggactgccagctcctcctacggcaagggagaagggcccatctggttagacaatctccactgtactggcaacgaggcgacccttgcagcatgcacctccaatggctggggcgtcactgactgcaagcacacggaggatgtcggtgtggtgtgcagcgacaaaaggattcctgggttcaaatttgacaattcgttgatcaaccagatagagaacctgaatatccaggtggaggacattcggattcgagccatcctctcaacctaccgcaagcgcaccccagtgatggagggctacgtggaggtgaaggagggcaagacctggaagcagatctgtgacaagcactggacggccaagaattcccgcgtggtctgcggcatgtttggcttccctggggagaggacatacaataccaaagtgtacaaaatgtttgcctcacggaggaagcagcgctactggccattctccatggactgcaccggcacagaggcccacatctccagctgcaagctgggcccccaggtgtcactggaccccatgaagaatgtcacctgcgagaatgggctaccggccgtggtgagttgtgtgcctgggcaggtcttcagccctgacggaccctcgagattccggaaagcgtacaagccagagcaacccctggtgcgactgagaggcggtgcctacatcggggagggccgcgtggaggtgctcaaaaatggagagtgggggaccgtctgcgacgacaagtgggacctggtgtcggccagtgtggtctgcagagagctgggctttgggagtgccaaagaggcagtcactggctcccgactggggcaagggatcggacccatccacctcaacgagatccagtgcacaggcaatgagaagtccattatagactgcaagttcaatgccgagtctcagggctgcaaccacgaggaggatgctggtgtgagatgcaacacccctgccatgggcttgcagaagaagctgcgcctgaacggcggccgcaatccctacgagggccgagtggaggtgctggtggagagaaacgggtcccttgtgtgggggatggtgtgtggccaaaactggggcatcgtggaggccatggtggtctgccgccagctgggcctgggattcgccagcaacgccttccaggagacctggtattggcacggagatgtcaacagcaacaaagtggtcatgagtggagtgaagtgctcgggaacggagctgtccctggcgcactgccgccacgacggggaggacgtggcctgcccccagggcggagtgcagtacggggccggagttgcctgctcagaaaccgcccctgacctggtcctcaatgcggagatggtgcagcagaccacctacctggaggaccggcccatgttcctgctgcagtgtgccatggaggagaactgcctctcggcctcagccgcgcagaccgaccccaccacgggctaccgccggctcctgcgcttctcctcccagatccacaacaatggccagtccgacttccggcccaagaacggccgccacgcgtggatctggcacgactgtcacaggcactaccacagcatggaggtgttcacccactatgacctgctgaacctcaatggcaccaaggtggcagagggccacaaggccagcttctgcttggaggacacagaatgtgaaggagacatccagaagaattacgagtgtgccaacttcggcgatcagggcatcaccatgggctgctgggacatgtaccgccatgacatcgactgccagtgggttgacatcactgacgtgccccctggagactacctgttccaggttgttattaaccccaacttcgaggttgcagaatccgattactccaacaacatcatgaaatgcaggagccgctatgacggccaccgcatctggatgtacaactgccacataggtggttccttcagcgaagagacggaaaaaaagtttgagcacttcagcgggctcttaaacaaccagctgtccccgcagtaaagaagcctgcgtggtcaactcctgtcttcaggccacaccacatcttccatgggacttccccccaacaactgagtctgaacgaatgccacgtgccctcacccagcccggcccccaccctgtccagacccctacagctgtgtctaagctcaggaggaaagggaccctcccatcattcatggggggctgctacctgacccttggggcctgagaaggccttgggggggtggggtttgtccacagagctgctggagcagcaccaagagccagtcttgaccgggatgaggcccacagacaggttgtcatcagcttgtcccattcaagccaccgagctcaccacagacacagtggagccgcgctcttctccagtgacacgtggacaaatgcgggctcatcagcccccccagagagggtcaggccgaaccccatttctcctcctcttaggtcattttcagcaaacttgaatatctagacctctcttccaatgaaaccctccagtctattatagtcacatagataatggtgccacgtgttttctgatttggtgagctcagacttggtgcttccctatccacaacccccaccccttgtttttcaagatactattattatattttcacagacttttgaagcacaaatttattggcatttaatattggacatctgggcccttggaagtacaaatctaaggaaaaaccaacccactgtgtaagtgactcatcttcctgttgttccaattctgtgggtttttgattcaacggtgctataaccagggtcctgggtgacagggcgctcactgagcaccatgtgtcatcacagacacttacacatacttgaaacttggaataaaagaaagatttatgaaacgtgtctgtgtttcctttgacccacagcacctgggccctgagcagcaggcttcctatgttcagtggccagaagcagagcttcaggtacattcgtggttttctccggtggacatgggtcctcagatcccctccagcccagtgtggccaccagggcacctccttcaatagactccaaaaggggcagctcctaccatctgggagaagcaatctaaggagatcacaaaaagtaacggaacaggagtcataatctttcttgaactcctgtggtttttactgaaacttgtcagaaggcataggagttgtgcgagggctggatgggaagtctagatttaaacagccaccaggcagcttatcaaagcaagagggcatccgttcacaggacaggggctcccagcaattcccagtggcagtggggctggnccaagccncnantcacccagacacaggggacttccccttgtgtcaacagcatgctagggcccagcaaactagagggtaggtaggaccaccttggcaccaactccactcaaaccacaattgaatgagggcgtcggcacgcattcagatctcacctcttgcctttgtttacatttattttgcaggaactggcactgactgacaggtaagaccaggaccagcccaggggtcccagaactgtctcacagcacaggccagaaggctggatacctgaactgccaaaggagtgtgggcaggtgctacacagcaggtgcaacccagctcccaaaattgggcaggctgtgcacagaggccctgcaggcccagtggggatcct

SEQ ID NO: 378689 - DNA, 4209 bp, Homo sapiens
  misc_feature (3836)..(3836): n is a, c, g, or t
  misc_feature (3844)..(3844): n is a, c, g, or t
  misc_feature (3846)..(3846): n is a, c, g, or t
  misc_feature (3848)..(3848): n is a, c, g, or t
taacaggtccctttgtccttggcaggttctgaactcccggtctccccagtccctggaggctgcctgcagctttgcttagcttctcagcctgttgatcactgccgtggaattggcgagtatcttccgggggaaagcagagacaaaaaaagctcctgctgcttctgtaccccgcctgtccctcccagctgcgcagggccccttcgtgggatcatcagcccgaagacagggatggagaggcctctgtgctcccacctctgcagctgcctggctatgctggccctcctgtcccccctgagcctggcacagtatgacagctggccccattaccccgagtacttccagcaaccggctcctgagtatcaccagccccaggcccccgccaacgtggccaagattcagctgcgcctggctgggcagaagaggaagcacagcgagggccgggtggaggtgtactatgatggccagtggggcaccgtgtgcgatgacgacttctccatccacgctgcccacgtcgtctgccgggagctgggctacgtggaggccaagtcctggactgccagctcctcctacggcaagggagaagggcccatctggttagacaatctccactgtactggcaacgaggcgacccttgcagcatgcacctccaatggctggggcgtcactgactgcaagcacacggaggatgtcggtgtggtgtgcagcgacaaaaggattcctgggttcaaatttgacaattcgttgatcaaccagatagagaacctgaatatccaggtggaggacattcggattcgagccatcctctcaacctaccgcaagcgcaccccagtgatggagggctacgtggaggtgaaggagggcaagacctggaagcagatctgtgacaagcactggacggccaagaattcccgcgtggtctgcggcatgtttggcttccctggggagaggacatacaataccaaagtgtacaaaatgtttgcctcacggaggaagcagcgctactggccattctccatggactgcaccggcacagaggcccacatctccagctgcaagctgggcccccaggtgtcactggaccccatgaagaatgtcacctgcgagaatgggctaccggccgtggtgagttgtgtgcctgggcaggtcttcagccctgacggaccctcgagattccggaaagcgtacaagccagagcaacccctggtgcgactgagaggcggtgcctacatcggggagggccgcgtggaggtgctcaaaaatggagagtgggggaccgtctgcgacgacaagtgggacctggtgtcggccagtgtggtctgcagagagctgggctttgggagtgccaaagaggcagtcactggctcccgactggggcaagggatcggacccatccacctcaacgagatccagtgcacaggcaatgagaagtccattatagactgcaagttcaatgccgagtctcagggctgcaaccacgaggaggatgctggtgtgagatgcaacacccctgccatgggcttgcagaagaagctgcgcctgaacggcggccgcaatccctacgagggccgagtggaggtgctggtggagagaaacgggtcccttgtgtgggggatggtgtgtggccaaaactggggcatcgtggaggccatggtggtctgccgccagctgggcctgggattcgccagcaacgccttccaggagacctggtattggcacggagatgtcaacagcaacaaagtggtcatgagtggagtgaagtgctcgggaacggagctgtccctggcgcactgccgccacgacggggaggacgtggcctgcccccagggcggagtgcagtacggggccggagttgcctgctcagaaaccgcccctgacctggtcctcaatgcggagatggtgcagcagaccacctacctggaggaccggcccatgttcctgctgcagtgtgccatggaggagaactgcctctcggcctcagccgcgcagaccgaccccaccacgggctaccgccggctcctgcgcttctcctcccagatccacaacaatggccagtccgacttccggcccaagaacggccgccacgcgtggatctggcacgactgtcacaggcactaccacagcatggaggtgttcacccactatgacctgctgaacctcaatggcaccaaggtggcagagggccacaaggccagcttctgcttggaggacacagaatgtgaaggagacatccagaagaattacgagtgtgccaacttcggcgatcagggcatcaccatgggctgctgggacatgtaccgccatgacatcgactgccagtgggttgacatcactgacgtgccccctggagactacctgttccaggttgttattaaccccaacttcgaggttgcagaatccgattactccaacaacatcatgaaatgcaggagccgctatgacggccaccgcatctggatgtacaactgccacataggtggttccttcagcgaagagacggaaaaaaagtttgagcacttcagcgggctcttaaacaaccagctgtccccgcagtaaagaagcctgcgtggtcaactcctgtcttcaggccacaccacatcttccatgggacttccccccaacaactgagtctgaacgaatgccacgtgccctcacccagcccggcccccaccctgtccagacccctacagctgtgtctaagctcaggaggaaagggaccctcccatcattcatggggggctgctacctgacccttggggcctgagaaggccttgggggggtggggtttgtccacagagctgctggagcagcaccaagagccagtcttgaccgggatgaggcccacagacaggttgtcatcagcttgtcccattcaagccaccgagctcaccacagacacagtggagccgcgctcttctccagtgacacgtggacaaatgcgggctcatcagcccccccagagagggtcaggccgaaccccatttctcctcctcttaggtcattttcagcaaacttgaatatctagacctctcttccaatgaaaccctccagtctattatagtcacatagataatggtgccacgtgttttctgatttggtgagctcagacttggtgcttccctatccacaacccccaccccttgtttttcaagatactattattatattttcacagacttttgaagcacaaatttattggcatttaatattggacatctgggcccttggaagtacaaatctaaggaaaaaccaacccactgtgtaagtgactcatcttcctgttgttccaattctgtgggtttttgattcaacggtgctataaccagggtcctgggtgacagggcgctcactgagcaccatgtgtcatcacagacacttacacatacttgaaacttggaataaaagaaagatttatgaaacgtgtctgtgtttcctttgacccacagcacctgggccctgagcagcaggcttcctatgttcagtggccagaagcagagcttcaggtacattcgtggttttctccggtggacatgggtcctcagatcccctccagcccagtgtggccaccagggcacctccttcaatagactccaaaaggggcagctcctaccatctgggagaagcaatctaaggagatcacaaaaagtaacggaacaggagtcataatctttcttgaactcctgtggtttttactgaaacttgtcagaaggcataggagttgtgcgagggctggatgggaagtctagatttaaacagccaccaggcagcttatcaaagcaagagggcatccgttcacaggacaggggctcccagcaattcccagtggcagtggggctggnccaagccncnantcacccagacacaggggacttccccttgtgtcaacagcatgctagggcccagcaaactagagggtaggtaggaccaccttggcaccaactccactcaaaccacaattgaatgagggcgtcggcacgcattcagatctcacctcttgcctttgtttacatttattttgcaggaactggcactgactgacaggtaagaccaggaccagcccaggggtcccagaactgtctcacagcacaggccagaaggctggatacctgaactgccaaaggagtgtgggcaggtgctacacagcaggtgcaacccagctcccaaaattgggcaggctgtgcacagaggccctgcaggcccagtggggatcct

SEQ ID NO: 378690 - DNA, 3353 bp, Homo sapiens
ttaaaagtaagggggaaaagagtaaacgcgcgactccagcgcgcggctacctacgcttggtgcttgctttctccagccatcggagaccagagccgccccctctgctcgagaaaggggctcagcggcggcggaagcggagggggaccaccgtggagagcgcggtcccagcccggccactgcggatccctgaaaccaaaaagctcctgctgcttctgtaccccgcctgtccctcccagctgcgcagggccccttcgtgggatcatcagcccgaagacagggatggagaggcctctgtgctcccacctctgcagctgcctggctatgctggccctcctgtcccccctgagcctggcacagtatgacagctggccccattaccccgagtacttccagcaaccggctcctgagtatcaccagccccaggcccccgccaacgtggccaagattcagctgcgcctggctgggcagaagaggaagcacagcgagggccgggtggaggtgtactatgatggccagtggggcaccgtgtgcgatgacgacttctccatccacgctgcccacgtcgtctgccgggagctgggctacgtggaggccaagtcctggactgccagctcctcctacggcaagggagaagggcccatctggttagacaatctccactgtactggcaacgaggcgacccttgcagcatgcacctccaatggctggggcgtcactgactgcaagcacacggaggatgtcggtgtggtgtgcagcgacaaaaggattcctgggttcaaatttgacaattcgttgatcaaccagatagagaacctgaatatccaggtggaggacattcggattcgagccatcctctcaacctaccgcaagcgcaccccagtgatggagggctacgtggaggtgaaggagggcaagacctggaagcagatctgtgacaagcactggacggccaagaattcccgcgtggtctgcggcatgtttggcttccctggggagaggacatacaataccaaagtgtacaaaatgtttgcctcacggaggaagcagcgctactggccattctccatggactgcaccggcacagaggcccacatctccagctgcaagctgggcccccaggtgtcactggaccccatgaagaatgtcacctgcgagaatgggctaccggccgtggtgagttgtgtgcctgggcaggtcttcagccctgacggaccctcgagattccggaaagcgtacaagccagagcaacccctggtgcgactgagaggcggtgcctacatcggggagggccgcgtggaggtgctcaaaaatggagagtgggggaccgtctgcgacgacaagtgggacctggtgtcggccagtgtggtctgcagagagctgggctttgggagtgccaaagaggcagtcactggctcccgactggggcaagggatcggacccatccacctcaacgagatccagtgcacaggcaatgagaagtccattatagactgcaagttcaatgccgagtctcagggctgcaaccacgaggaggatgctggtgtgagatgcaacacccctgccatgggcttgcagaagaagctgcgcctgaacggcggccgcaatccctacgagggccgagtggaggtgctggtggagagaaacgggtcccttgtgtgggggatggtgtgtggccaaaactggggcatcgtggaggccatggtggtctgccgccagctgggcctgggattcgccagcaacgccttccaggagacctggtattggcacggagatgtcaacagcaacaaagtggtcatgagtggagtgaagtgctcgggaacggagctgtccctggcgcactgccgccacgacggggaggacgtggcctgcccccagggcggagtgcagtacggggccggagttgcctgctcagaaaccgcccctgacctggtcctcaatgcggagatggtgcagcagaccacctacctggaggaccggcccatgttcctgctgcagtgtgccatggaggagaactgcctctcggcctcagccgcgcagaccgaccccaccacgggctaccgccggctcctgcgcttctcctcccagatccacaacaatggccagtccgacttccggcccaagaacggccgccacgcgtggatctggcacgactgtcacaggcactaccacagcatggaggtgttcacccactatgacctgctgaacctcaatggcaccaaggtggcagagggccacaaggccagcttctgcttggaggacacagaatgtgaaggagacatccagaagaattacgagtgtgccaacttcggcgatcagggcatcaccatgggctgctgggacatgtaccgccatgacatcgactgccagtgggttgacatcactgacgtgccccctggagactacctgttccaggtggttccttcagcgaagagacggaaaaaaagtttgagcacttcagcgggctcttaaacaaccagctgtccccgcagtaaagaagcctgcgtggtcaactcctgtcttcaggccacaccacatcttccatgggacttccccccaacaactgagtctgaacgaatgccacgtgccctcacccagcccggcccccaccctgtccagacccctacagctgtgtctaagctcaggaggaaagggaccctcccatcattcatggggggctgctacctgacccttggggcctgagaaggccttgggggggtggggtttgtccacagagctgctggagcagcaccaagagccagtcttgaccgggatgaggcccacagacaggttgtcatcagcttgtcccattcaagccaccgagctcaccacagacacagtggagccgcgctcttctccagtgacacgtggacaaatgcgggctcatcagcccccccagagagggtcaggccgaaccccatttctcctcctcttaggtcattttcagcaaacttgaatatctagacctctcttccaatgaaaccctccagtctattatagtcacatagataatggtgccacgtgttttctgatttggtgagctcagacttggtgcttccctatccacaacccccaccccttgtttttcaagatactattattatattttcacagacttttgaagcacaaatttattggcatttaatattggacatctgggcccttggaagtacaaatctaaggaaaaaccaacccactgtgtaagtgactcatcttcctgttgttccaattctgtgggtttttgattcaacggtgctataaccagggtcctgggtgacagggcgctcactgagcaccatgtgtcatcacagacacttacacatacttgaaacttggaataaaagaaagatttatga

SEQ ID NO: 378691 - DNA, 3191 bp, Homo sapiens
ttaaaagtaagggggaaaagagtaaacgcgcgactccagcgcgcggctacctacgcttggtgcttgctttctccagccatcggagaccagagccgccccctctgctcgagaaaggggctcagcggcggcggaagcggagggggaccaccgtggagagcgcggtcccagcccggccactgcggatccctgaaaccaaaaagctcctgctgcttctgtaccccgcctgtccctcccagctgcgcagggccccttcgtgggatcatcagcccgaagacagggatggagaggcctctgtgctcccacctctgcagctgcctggctatgctggccctcctgtcccccctgagcctggcacagtatgacagctggccccattaccccgagtacttccagcaaccggctcctgagtatcaccagccccaggcccccgccaacgtggccaagattcagctgcgcctggctgggcagaagaggaagcacagcgagggccgggtggaggtgtactatgatggccagtggggcaccgtgtgcgatgacgacttctccatccacgctgcccacgtcgtctgccgggagctgggctacgtggaggccaagtcctggactgccagctcctcctacggcaagggagaagggcccatctggttagacaatctccactgtactggcaacgaggcgacccttgcagcatgcacctccaatggctggggcgtcactgactgcaagcacacggaggatgtcggtgtggtgtgcagcgacaaaaggattcctgggttcaaatttgacaattcgttgatcaaccagatagagaacctgaatatccaggtggaggacattcggattcgagccatcctctcaacctaccgcaagcgcaccccagtgatggagggctacgtggaggtgaaggagggcaagacctggaagcagatctgtgacaagcactggacggccaagaattcccgcgtggtctgcggcatgtttggcttccctggggagaggacatacaataccaaagtgtacaaaatgtttgcctcacggaggaagcagcgctactggccattctccatggactgcaccggcacagaggcccacatctccagctgcaagctgggcccccaggtgtcactggaccccatgaagaatgtcacctgcgagaatgggctaccggccgtggtgagttgtgtgcctgggcaggtcttcagccctgacggaccctcgagattccggaaagcgtacaagccagagcaacccctggtgcgactgagaggcggtgcctacatcggggagggccgcgtggaggtgctcaaaaatggagagtgggggaccgtctgcgacgacaagtgggacctggtgtcggccagtgtggtctgcagagagctgggctttgggagtgccaaagaggcagtcactggctcccgactggggcaagggatcggacccatccacctcaacgagatccagtgcacaggcaatgagaagtccattatagactgcaagttcaatgccgagtctcagggctgcaaccacgaggaggatgctggtgtgagatgcaacacccctgccatgggcttgcagaagaagctgcgcctgaacggcggccgcaatccctacgagggccgagtggaggtgctggtggagagaaacgggtcccttgtgtgggggatggtgtgtggccaaaactggggcatcgtggaggccatggtggtctgccgccagctgggcctgggattcgccagcaacgccttccaggagacctggtattggcacggagatgtcaacagcaacaaagtggtcatgagtggagtgaagtgctcgggaacggagctgtccctggcgcactgccgccacgacggggaggacgtggcctgcccccagggcggagtgcagtacggggccggagttgcctgctcagaaaccgcccctgacctggtcctcaatgcggagatggtgcagcagaccacctacctggaggaccggcccatgttcctgctgcagtgtgccatggaggagaactgcctctcggcctcagccgcgcagaccgaccccaccacgggctaccgccggctcctgcgcttctcctcccagatccacaacaatggccagtccgacttccggcccaagaacggccgccacgcgtggatctggcacgactgtcacaggcactaccacagcatggaggtgttcacccactatgacctgctgaacctcaatggcaccaaggtggcagagggccacaaggccagcttctgcttggaggacacagaatgtgaaggagacatccagaagaattacgagtgtgccaacttcggcgatcagggcatcaccatgggctgctgggacatgtaccgccatgacatcgactgccagtgggttgacatcactgacgtgccccctggagactacctgttccaggttgttattaaccccaacttcgaggttgcagaatccgattactccaacaacatcatgaaatgcaggagccgctatgacggccaccgcatctggatgtacaactgccacataggtggttccttcagcgaagagacggaaaaaaagtttgagcacttcagcgggctcttaaacaaccagctgtccccgcagtaaagaagcctgcgtggtcaactcctgtcttcaggccacaccacatcaagccaccgagctcaccacagacacagtggagccgcgctcttctccagtgacacgtggacaaatgcgggctcatcagcccccccagagagggtcaggccgaaccccatttctcctcctcttaggtcattttcagcaaacttgaatatctagacctctcttccaatgaaaccctccagtctattatagtcacatagataatggtgccacgtgttttctgatttggtgagctcagacttggtgcttccctatccacaacccccaccccttgtttttcaagatactattattatattttcacagacttttgaagcacaaatttattggcatttaatattggacatctgggcccttggaagtacaaatctaaggaaaaaccaacccactgtgtaagtgactcatcttcctgttgttccaattctgtgggtttttgattcaacggtgctataaccagggtcctgggtgacagggcgctcactgagcaccatgtgtcatcacagacacttacacatacttgaaacttggaataaaagaaagatttatga

SEQ ID NO: 378692 - DNA, 3359 bp, Homo sapiens
ttaaaagtaagggggaaaagagtaaacgcgcgactccagcgcgcggctacctacgcttggtgcttgctttctccagccatcggagaccagagccgccccctctgctcgagaaaggggctcagcggcggcggaagcggagggggaccaccgtggagagcgcggtcccagcccggccactgcggatccctgaaaccaaaaagctcctgctgcttctgtaccccgcctgtccctcccagctgcgcagggccccttcgtgggatcatcagcccgaagacagggatggagaggcctctgtgctcccacctctgcagctgcctggctatgctggccctcctgtcccccctgagcctggcacagtatgacagctggccccattaccccgagtacttccagcaaccggctcctgagtatcaccagccccaggcccccgccaacgtggccaagattcagctgcgcctggctgggcagaagaggaagcacagcgagggccgggtggaggtgtactatgatggccagtggggcaccgtgtgcgatgacgacttctccatccacgctgcccacgtcgtctgccgggagctgggctacgtggaggccaagtcctggactgccagctcctcctacggcaagggagaagggcccatctggttagacaatctccactgtactggcaacgaggcgacccttgcagcatgcacctccaatggctggggcgtcactgactgcaagcacacggaggatgtcggtgtggtgtgcagcgacaaaaggattcctgggttcaaatttgacaattcgttgatcaaccagatagagaacctgaatatccaggtggaggacattcggattcgagccatcctctcaacctaccgcaagcgcaccccagtgatggagggctacgtggaggtgaaggagggcaagacctggaagcagatctgtgacaagcactggacggccaagaattcccgcgtggtctgcggcatgtttggcttccctggggagaggacatacaataccaaagtgtacaaaatgtttgcctcacggaggaagcagcgctactggccattctccatggactgcaccggcacagaggcccacatctccagctgcaagctgggcccccaggtgtcactggaccccatgaagaatgtcacctgcgagaatgggctaccggccgtggtgagttgtgtgcctgggcaggtcttcagccctgacggaccctcgagattccggaaagcgtacaagccagagcaacccctggtgcgactgagaggcggtgcctacatcggggagggccgcgtggaggtgctcaaaaatggagagtgggggaccgtctgcgacgacaagtgggacctggtgtcggccagtgtggtctgcagagagctgggctttgggagtgccaaagaggcagtcactggctcccgactggggcaagggatcggacccatccacctcaacgagatccagtgcacaggcaatgagaagtccattatagactgcaagttcaatgccgagtctcagggctgcaaccacgaggaggatgctggtgtgagatgcaacacccctgccatgggcttgcagaagaagctgcgcctgaacggcggccgcaatccctacgagggccgagtggaggtgctggtggagagaaacgggtcccttgtgtgggggatggtgtgtggccaaaactggggcatcgtggaggccatggtggtctgccgccagctgggcctgggattcgccagcaacgccttccaggagacctggtattggcacggagatgtcaacagcaacaaagtggtcatgagtggagtgaagtgctcgggaacggagctgtccctggcgcactgccgccacgacggggaggacgtggcctgcccccagggcggagtgcagtacggggccggagttgcctgctcagaaaccgcccctgacctggtcctcaatgcggagatggtgcagcagaccacctacctggaggaccggcccatgttcctgctgcagtgtgccatggaggagaactgcctctcggcctcagccgcgcagaccgaccccaccacgggctaccgccggctcctgcgcttctcctcccagatccacaacaatggccagtccgacttccggcccaagaacggccgccacgcgtggatctggcacgactgtcacaggcactaccacagcatggaggtgttcacccactatgacctgctgaacctcaatggcaccaaggtggcagagggccacaaggccagcttctgcttggaggacacagaatgtgaaggagacatccagaagaattacgagtgtgccaacttcggcgatcagggcatcaccatgggctgctgggacatgtaccgccatgacatcgactgccagtgggttgacatcactgacgtgccccctggagactacctgttccaggttgttattaaccccaacttcgaggttgcagaatccgattactccaacaacatcatgaaatgcaggagccgctatgacggccaccgcatctggatgtacaactgccacataggtggttccttcagcgaagagacggaaaaaaagtttgagcacttcagcgggctcttaaacaaccagctgtccccgcagtaaagaagcctgcgtggtcaactcctgtcttcaggccacaccacatcttccatgggacttccccccaacaactgagtctgaacgaatgccacgtgccctcacccagcccggcccccaccctgtccagacccctacagctgtgtctaagctcaggaggaaagggaccctcccatcattcatggggggctgctacctgacccttggggcctgagaaggccttgggggggtggggtttgtccacagagctgctggagcagcaccaagagccagtcttgaccgggatgaggcccacagacaggttgtcatcagcttgtcccattcaagccaccgagctcaccacagacacagtggagccgcgctcttctccagtgacacgtggacaaatgcgggctcatcagcccccccagagagggtcaggccgaaccccatttctcctcctcttaggtcattttcagcaaacttgaatatctagacctctcttccaatgaaaccctccagtctattatattttcacagacttttgaagcacaaatttattggcatttaatattggacatctgggcccttggaagtacaaatctaaggaaaaaccaacccactgtgtaagtgactcatcttcctgttgttccaattctgtgggtttttgattcaacggtgctataaccagggtcctgggtgacagggcgctcactgagcaccatgtgtcatcacagacacttacacatacttgaaacttggaataaaagaaagatttatga

SEQ ID NO: 378693 - DNA, 2425 bp, Homo sapiens
ctcccacaccccaacacacccacgacacacacacacacacacacacacacacacacacacatccatacatcaagcatagttgcagctcccagactgagtgcctggcctgggaacagggtggcagggaagggagggggcggggacagtggtcacccgctgaacgtgcatcagcgtctgtactcagcaggaccgtgtgtctcttcagcaacccctggtgcgactgagaggcggtgcctacatcggggagggccgcgtggaggtgctcaaaaatggagagtgggggaccgtctgcgacgacaagtgggacctggtgtcggccagtgtggtctgcagagagctgggctttgggagtgccaaagaggcagtcactggctcccgactggggcaagggatcggacccatccacctcaacgagatccagtgcacaggcaatgagaagtccattatagactgcaagttcaatgccgagtctcagggctgcaaccacgaggaggatgctggtgtgagatgcaacacccctgccatgggcttgcagaagaagctgcgcctgaacggcggccgcaatccctacgagggccgagtggaggtgctggtggagagaaacgggtcccttgtgtgggggatggtgtgtggccaaaactggggcatcgtggaggccatggtggtctgccgccagctgggcctgggattcgccagcaacgccttccaggagacctggtattggcacggagatgtcaacagcaacaaagtggtcatgagtggagtgaagtgctcgggaacggagctgtccctggcgcactgccgccacgacggggaggacgtggcctgcccccagggcggagtgcagtacggggccggagttgcctgctcagaaaccgcccctgacctggtcctcaatgcggagatggtgcagcagaccacctacctggaggaccggcccatgttcctgctgcagtgtgccatggaggagaactgcctctcggcctcagccgcgcagaccgaccccaccacgggctaccgccggctcctgcgcttctcctcccagatccacaacaatggccagtccgacttccggcccaagaacggccgccacgcgtggatctggcacgactgtcacaggcactaccacagcatggaggtgttcacccactatgacctgctgaacctcaatggcaccaaggtggcagagggccacaaggccagcttctgcttggaggacacagaatgtgaaggagacatccagaagaattacgagtgtgccaacttcggcgatcagggcatcaccatgggctgctgggacatgtaccgccatgacatcgactgccagtgggttgacatcactgacgtgccccctggagactacctgttccaggttgttattaaccccaacttcgaggttgcagaatccgattactccaacaacatcatgaaatgcaggagccgctatgacggccaccgcatctggatgtacaactgccacataggtggttccttcagcgaagagacggaaaaaaagtttgagcacttcagcgggctcttaaacaaccagctgtccccgcagtaaagaagcctgcgtggtcaactcctgtcttcaggccacaccacatcttccatgggacttccccccaacaactgagtctgaacgaatgccacgtgccctcacccagcccggcccccaccctgtccagacccctacagctgtgtctaagctcaggaggaaagggaccctcccatcattcatggggggctgctacctgacccttggggcctgagaaggccttgggggggtggggtttgtccacagagctgctggagcagcaccaagagccagtcttgaccgggatgaggcccacagacaggttgtcatcagcttgtcccattcaagccaccgagctcaccacagacacagtggagccgcgctcttctccagtgacacgtggacaaatgcgggctcatcagcccccccagagagggtcaggccgaaccccatttctcctcctcttaggtcattttcagcaaacttgaatatctagacctctcttccaatgaaaccctccagtctattatagtcacatagataatggtgccacgtgttttctgatttggtgagctcagacttggtgcttccctatccacaacccccaccccttgtttttcaagatactattattatattttcacagacttttgaagcacaaatttattggcatttaatattggacatctgggcccttggaagtacaaatctaaggaaaaaccaacccactgtgtaagtgactcatcttcctgttgttccaattctgtgggtttttgattcaacggtgctataaccagggtcctgggtgacagggcgctcactgagcaccatgtgtcatcacagacacttacacatacttgaaacttggaataaaagaaagatttatga

SEQ ID NO: 378694 - DNA, 2130 bp, Homo sapiens
ttaaaagtaagggggaaaagagtaaacgcgcgactccagcgcgcggctacctacgcttggtgcttgctttctccagccatcggagaccagagccgccccctctgctcgagaaaggggctcagcggcggcggaagcggagggggaccaccgtggagagcgcggtcccagcccggccactgcggatccctgaaaccaaaaagctcctgctgcttctgtaccccgcctgtccctcccagctgcgcagggccccttcgtgggatcatcagcccgaagacagggatggagaggcctctgtgctcccacctctgcagctgcctggctatgctggccctcctgtcccccctgagcctggcacagtatgacagctggccccattaccccgagtacttccagcaaccggctcctgagtatcaccagccccaggcccccgccaacgtggccaagattcagctgcgcctggctgggcagaagaggaagcacagcgagggccgggtggaggtgtactatgatggccagtggggcaccgtgtgcgatgacgacttctccatccacgctgcccacgtcgtctgccgggagctgggctacgtggaggccaagtcctggactgccagctcctcctacggcaagggagaagggcccatctggttagacaatctccactgtactggcaacgaggcgacccttgcagcatgcacctccaatggctggggcgtcactgactgcaagcacacggaggatgtcggtgtggtgtgcagcgacaaaaggattcctgggttcaaatttgacaattcgttgatcaaccagatagagaacctgaatatccaggtggaggacattcggattcgagccatcctctcaacctaccgcaagcgcaccccagtgatggagggctacgtggaggtgaaggagggcaagacctggaagcagatctgtgacaagcactggacggccaagaattcccgcgtggtctgcggcatgtttggcttccctggggagaggacatacaataccaaagtgtacaaaatgtttgcctcacggaggaagcagcgctactggccattctccatggactgcaccggcacagaggcccacatctccagctgcaagctgggcccccaggtgtcactggaccccatgaagaatgtcacctgcgagaatgggctaccggccgtggtgagttgtgtgcctgggcaggtcttcagccctgacggaccctcgagattccggaaagcgtacaagccagagcaacccctggtgcgactgagaggcggtgcctacatcggggagggccgcgtggaggtgctcaaaaatggagagtgggggaccgtctgcgacgacaagtgggacctggtgtcggccagtgtggtctgcagagagctgggctttgggagtgccaaagaggcagtcactggctcccgactggggcaagggatcggacccatccacctcaacgagatccagtgcacaggcaatgagaagtccattatagactgcaagttcaatgccgagtctcagggctgcaaccacgaggaggatgctggtgtgagatgcaacacccctgccatgggcttgcagaagaagctgcgcctgaacggcggccgcaatccctacgagggccgagtggaggtgctggtggagagaaacgggtcccttgtgtgggggatggtgtgtggccaaaactggggcatcgtggaggccatggtggtctgccgccagctgggcctgggattcgccagcaacgccttccaggagacctggtattggcacggagatgtcaacagcaacaaagtggtcatgagtggagtgaagtgctcgggaacggagctgtccctggcgcactgccgccacgacggggaggacgtggcctgcccccagggcggagtgcagtacggggccggagttgcctgctcagaaagtgagagctcctcccctccctccccaccgggctcccgaggggaccagagtcccaccagttattcctcaagagactctgaagccttgccatgagccaagcaatagaggaaggtagaatgaaatcctaagggagaaaaactgggggcaagagagatgaccgccaccccaaccacagatcgctgtctatgatgtagtggggagaaaagcgggagggag

SEQ ID NO: 378695 - DNA, 442 bp, Homo sapiens
gtctccaactcctgggctcaagtgatccttccacttcaacctcccaaagtgctaggattacaggcatcatgagccgctgtgcctggcctgttcttcttagatgatacaggctgaagtatttagagaagtgtcatgatgcctgtaacttacttgtagatatacttacatacatatgcatgtatttacatataaatacagcaaaatattaacaatttttgaacctagatagttcatcattgtgtcatcaatagtactattctggctgggcacagtggctcatacctgtaatcccagcactttgggaggccaaggcaggaggattgcttgagcccaggagttcaagatcagcctggacaacatagtgagaccctcatctctacaaaaaatattttaaaacttagccaggtgtgatggcacacacctgtagtcccagctactcagg

SEQ ID NO: 378696 - DNA, 687 bp, Homo sapiens
ttcctttgagtctaccttctattttccttcataatctagaggtaatatttgccatagcttcacatgtagactgattaggagggaactacagggagagttttattttaaacttatgacttttttttccatcacatcttgagatagtcacataaaaactttatgggacactattgataaattgtaagaacataatagccaaaagctttttctttttctttacttcttttttttctttctttgtgttcatggctgttcttaatatttatgctagtggcttgtaaaaattaagtttattttgattttttctgtatcttttttaatagaaaaaaaatgacagagtagttaaaatttacccctaaagctatggaaataaaaatgatctatcttccaagtcacctctataaatgttctttgaaattaaacggactgtcttgaaaacaagattgccagtttcctattcactcatagatgtaatatcaattgtgtctcctattattgcctttctaagtctttcgtttgtacaaaaaccatgtttaaaacatatcatcatccaatacagtgtctgtaagaaaaacaaacaatgattgatttggatagatatgaatgttaatatctttttctttgaatttctggcttgcatttttattaaaagtatgatattaaatatatatatgtgcacctgatgat

SEQ ID NO: 378697 - DNA, 1548 bp, Homo sapiens
agattcccgagcgctcggctcgcatggcagccgcttcggcgcccggccccgcggccagctaggggcggccccgcgctccctcacggcccctcggcggcgcccgtcggatccggcctctctctgcgccccggggcgcgccacctccccgccggaggtgtccacgcgtccggccgtccatccgtccgtccctcctggggccggcgctgaccatgcccagcggctgccgctgcctgcatctcgtgtgcctgttgtgcattctgggggctcccggtcagcctgtccgagccgatgactgcagctcccactgtgacctggcccacggctgctgtgcacctgacggctcctgcaggtgtgacccgggctgggaggggctgcactgtgagcgctgtgtgaggatgcctggctgccagcacggtacctgccaccagccatggcagtgcatctgccacagtggctgggcaggcaagttctgtgacaaagatgaacatatctgtaccacgcagtccccctgccagaatggaggccagtgcatgtatgacgggggcggtgagtaccattgtgtgtgcttaccaggcttccatgggcgtgactgcgagcgcaaggctggaccctgtgaacaggcaggctccccatgccgcaatggcgggcagtgccaggacgaccagggctttgctctcaacttcacgtgccgctgcttggtgggctttgtgggtgcccgctgtgaggtaaatgtggatgactgcctgatgcggccttgtgctaacggtgccacctgccttgacggcataaaccgcttctcctgcctctgtcctgagggctttgctggacgcttctgcaccatcaacctggatgactgtgccagccgcccatgccagagaggggcccgctgtcgggaccgtgtccacgacttcgactgcctctgccccagtggctatggtggcaagacctgtgagcttgtcttacctgtcccagaccccccaaccacagtggacacccctctagggcccacctcagctgtagtggtacctgccacggggccagccccccacagcgcaggggctggtctgctgcggatctcagtgaaggaggtggtgcggaggcaagaggctgggctaggtgagcctagcttggtggccctggtggtgtttggggccctcactgctgccctggttctggctactgtgttgctgaccctgagggcctggcgccggggtgtctgcccccctggaccctgttgctaccctgccccacactatgctccagcgtgccaggaccaggagtgtcaggttagcatgctgccagcagggctccccctgccacgtgacttgccccctgagcctggaaagaccacagcactgtgatggaggtgggggctttctggcccccttcctcacctcttccacccctcagactggagtggtccgttctcaccacccttcagcttgggtacacacacagaggagacctcagcctcacaccagaaatattatttttttaatacacagaatgtaagatggaattttatcaaataaaactatgaaaatgcaa

SEQ ID NO: 378698 - DNA, 1931 bp, Homo sapiens
agattcccgagcgctcggctcgcatggcagccgcttcggcgcccggccccgcggccagctaggggcggccccgcgctccctcacggcccctcggcggcgcccgtcggatccggcctctctctgcgccccggggcgcgccacctccccgccggaggtgtccacgcgtccggccgtccatccgtccgtccctcctggggccggcgctgaccatgcccagcggctgccgctgcctgcatctcgtgtgcctgttgtgcattctgggggctcccggtcagcctgtccgagccgatgactgcagctcccactgtgacctggcccacggctgctgtgcacctgacggctcctgcaggtgtgacccgggctgggaggggctgcactgtgagcgctgtgtgaggatgcctggctgccagcacggtacctgccaccagccatggcagtgcatctgccacagtggctgggcaggcaagttctgtgacaaagatgaacatatctgtaccacgcagtccccctgccagaatggaggccagtgcatgtatgacgggggcggtgagtaccattgtgtgtgcttaccaggcttccatgggcgtgactgcgagcgcaaggctggaccctgtgaacaggcaggctccccatgccgcaatggcgggcagtgccaggacgaccagggctttgctctcaacttcacgtgccgctgcttggtgggctttgtgggtgcccgctgtgaggtaaatgtggatgactgcctgatgcggccttgtgctaacggtgccacctgccttgacggcataaaccgcttctcctgcctctgtcctgagggctttgctggacgcttctgcaccatcaacctggatgactgtgccagccgcccatgccagagaggggcccgctgtcgggaccgtgtccacgacttcgactgcctctgccccagtggctatggtggcaagacctgtgagcttgtcttacctgtcccagaccccccaaccacagtggacacccctctagggcccacctcagctgtagtggtacctgccacggggccagccccccacagcgcaggggctggtctgctgcggatctcagtgaaggaggtggtgcggaggcaagaggctgggctaggtgagcctagcttggtggccctggtggtgtttggggccctcactgctgccctggttctggctactgtgttgctgaccctgagggcctggcgccggggtgtctgcccccctggaccctgttgctaccctgccccacactatgctccagcgtgccaggaccaggagtgtcaggttagcatgctgccagcagggctccccctgccacgtgacttgccccctgagcctggaaagaccacagcactgtgatggaggtgggggctttctggcccccttcctcacctcttccacccctcagactggagtggtccgttctcaccacccttcagcttgggtacacacacagaggagacctcagcctcacaccagaaatattatttttttaatacacagaatgtaagatggaattttatcaaataaaactatgaaaatgcaaaaaaaaaaaaaaaaaataaaaatgacaataacaaaaaacaccaaacaaacaaaaaaaaaaaacaaaaacagcagaaaaacacaaaacaaaaacaaaaaaacaaaaacaggggggccgcgcagcccaataaacaacatcacctagcgggaggcagaactatcttccgccgacagcagctcggtgagtagacagagcagcgcagccactacaagtcggcgtgtgtctaatcaaaccagccgcacaggcgagcggtcgaggaaaacatcagacatcgaggagaagcagagagaccgcggctgcgagcgctgacgttaggcagacagacacgaccctcggtgggcgagcgccttagatgggggcggcaccatacctcccacggcact

SEQ ID NO: 378699 - DNA, 1338 bp, Homo sapiens
ggcaacgtggacaggaagaagcggagggcgaggaggagcagaggagcacacagatgaagcaggtgtccacgcgtccggccgtccatccgtccgtccctcctggggccggcgctgaccatgcccagcggctgccgctgcctgcatctcgtgtgcctgttgtgcattctgggggctcccggtcagcctgtccgagccgatgactgcagctcccactgtgacctggcccacggctgctgtgcacctgacggctcctgcaggtgtgacccgggctgggaggggctgcactgtgagcgctgtgtgaggatgcctggctgccagcacggtacctgccaccagccatggcagtgcatctgccacagtggctgggcaggcaagttctgtgacaaagatgaacatatctgtaccacgcagtccccctgccagaatggaggccagtgcatgtatgacgggggcggtgagtaccattgtgtgtgcttaccaggcttccatgggcgtgactgcgagcgcaaggctggaccctgtgaacaggcaggctgatgcggccttgtgctaacggtgccacctgccttgacggcataaaccgcttctcctgcctctgtcctgagggctttgctggacgcttctgcaccatcaacctggatgactgtgccagccgcccatgccagagaggggcccgctgtcgggaccgtgtccacgacttcgactgcctctgccccagtggctatggtggcaagacctgtgagcttgtcttacctgtcccagaccccccaaccacagtggacacccctctagggcccacctcagctgtagtggtacctgccacggggccagccccccacagcgcaggggctggtctgctgcggatctcagtgaaggaggtggtgcggaggcaagaggctgggctaggtgagcctagcttggtggccctggtggtgtttggggccctcactgctgccctggttctggctactgtgttgctgaccctgagggcctggcgccggggtgtctgcccccctggaccctgttgctaccctgccccacactatgctccagcgtgccaggaccaggagtgtcaggttagcatgctgccagcagggctccccctgccacgtgacttgccccctgagcctggaaagaccacagcactgtgatggaggtgggggctttctggcccccttcctcacctcttccacccctcagactggagtggtccgttctcaccacccttcagcttgggtacacacacagaggagacctcagcctcacaccagaaatattatttttttaatacacagaatgtaagatggaattttatcaaataaaactatgaaaatgcaa

SEQ ID NO: 378700 - DNA, 1363 bp, Homo sapiens
ggcaacgtggacaggaagaagcggagggcgaggaggagcagaggagcacacagatgaagcaggtgtccacgcgtccggccgtccatccgtccgtccctcctggggccggcgctgaccatgcccagcggctgccgctgcctgcatctcgtgtgcctgttgtgcattctgggggctcccggtcagcctgtccgagccgatgactgcagctcccactgtgacctggcccacggctgctgtgcacctgacggctcctgcaggtgtgacccgggctgggaggggctgcactgtgagcgctgtgtgaggatgcctggctgccagcacggtacctgccaccagccatggcagtgcatctgccacagtggctgggcaggcaagttctgtgacaaaggcttccatgggcgtgactgcgagcgcaaggctggaccctgtgaacaggcaggctccccatgccgcaatggcgggcagtgccaggacgaccagggctttgctctcaacttcacgtgccgctgcttggtgggctttgtgggtgcccgctgtgaggtaaatgtggatgactgcctgatgcggccttgtgctaacggtgccacctgccttgacggcataaaccgcttctcctgcctctgtcctgagggctttgctggacgcttctgcaccatcaacctggatgactgtgccagccgcccatgccagagaggggcccgctgtcgggaccgtgtccacgacttcgactgcctctgccccagtggctatggtggcaagacctgtgagcttgtcttacctgtcccagaccccccaaccacagtggacacccctctagggcccacctcagctgtagtggtacctgccacggggccagccccccacagcgcaggggctggtctgctgcggatctcagtgaaggaggtggtgcggaggcaagaggctgggctaggtgagcctagcttggtggccctggtggtgtttggggccctcactgctgccctggttctggctactgtgttgctgaccctgagggcctggcgccggggtgtctgcccccctggaccctgttgctaccctgccccacactatgctccagcgtgccaggaccaggagtgtcaggttagcatgctgccagcagggctccccctgccacgtgacttgccccctgagcctggaaagaccacagcactgtgatggaggtgggggctttctggcccccttcctcacctcttccacccctcagactggagtggtccgttctcaccacccttcagcttgggtacacacacagaggagacctcagcctcacaccagaaatattatttttttaatacacagaatgtaagatggaattttatcaaataaaactatgaaaatgcaa

SEQ ID NO: 378701 - DNA, 219 bp, Homo sapiens
ggggaaggttactagtgaccaattgttgacatatatataagccccatttcatacatgccatgaataataggcctccctggggtaacaaaaatttaaagatcattctggaaaatgagacaggaattaaaagaactctatggcttgctttctttatctacctggttctggcaatgtgagaataggttttctgaagaggagccaatagtttgtttttccact

SEQ ID NO: 378702 - DNA, 374 bp, Homo sapiens
attctgttccaccaccccacccccacacccctgcacccacatgtatgcgtgtctgtatgcctagcccaggtgtctctattcagaggctgtctgttgggggccttggctgaggcactttcctccactttgactccacgcctttctactcctagccctttcccgtttcccagcctgtgggctataaagaggcaggagccttttgtgtggggcaggggctcatttttcttgcctgttctgcatgtcatctgatcctcacctagagctgttccagggggataaggggaatgtgggggagctggagccgtcctcttttgcctcttgcccgcactgttgtagaagagaataaagacctgattgttactctcagtttggct

SEQ ID NO: 378703 - DNA, 413 bp, Homo sapiens
cggaatgaatgaatgaatgaatgaatgggggcctctcctacataacttagatcacttattgtgtggctgagggggtgtcaaaatgggatacggggaccgggtctccatttcaacctctgtggcctcagaagccctgaggcagtaagtccagtttctatttaaagagctggaaaaaaactggcttgagatggactcaaatacaagttgaagttcagtaccttcacacacctcctgttatcagggccggtgccatcattcactccccacttggagagatgggtctcaggagtttactcccttcagtgggcctcagaaaggcccgactggggacacagacgtgagagcagaagcagaggaggcaggaaagtgccggggttacagcgatgggctttgcagtgaggctgggggttggg

SEQ ID NO: 378704 - DNA, 760 bp, Homo sapiens
caggtatgtgccaccatgcccagctaattttattgtatttttagtagagatggggtttcgccatgttggccaggctggtcgtgaattcctggcctcaagtgatcaccctccttggcctcccaaactgctgggattacagacatgagccatggcgcccatcctgacagctgccgttttcttcactagtaatagcgtcattcctagcccttgattccacactcttctcttctcccaaccccaggtaaaagataatcccagagagactgtgtttttctttacaactttagggtagaaatgtttttttaaaaatcacagtgtgaactttattttctgatcctttaggtttactgtggattccctatcacttcatactttgatcagactaataataattggtgaagattttcagtaaactatcagaattctgctatagccatcaaacttcatgctttggtttgattgcccactaggcccagattctacatttcagtaacctgccacttttgcataaatttgcgtcatgggcttagtttagatgagtaactatttcgtggaggtacttgggggcagggaacctttttttctttcaacctgagcacctctagtttttatcttttttatatttcacctaagattcctttggaaacgggtttcacagcttttaaaaaataaaaagtttgaagctaggcgcagtggctcacacctgtaatcccagcactttgggaggccaagacaggcagatcacttgaggtcaggagtt

SEQ ID NO: 378705 - DNA, 310 bp, Homo sapiens
attcaacttgggagttccttacagggattctaagagatctctcctctgaaacttctataacctattattcactacattccctcttacattttactcttctttcccaccttaggatacatgatcccttaattcaggctcaggctgaagaactgacccacttacgacagaagatacaagaagggagaggtgtctgctaccttttcacccagcatgtgaagaacacagtcaagtcttttgagggccttctcaggaacactggcattgcctactaccagagacagagattctgtgagcaaatggtacaaggaag

SEQ ID NO: 378706 - DNA, 289 bp, Homo sapiens
ggaaggcctctgccaaaaagctctcataaagagcttccgaatgaagtgcctgggctaggaatgcagacatggataaaagctttgggacagggttgcttgaatccttaagactgcagtgccctggctgtgcgcaaagtcaggttatattcctaagcatgtctcatatctagttccattaattccattttatggttgaataaaactgtctttaacaagctaagacacttagctctaacaaccaggttctgctacattgtcctcaagtcatgtgatgatgatcaggtatcac

SEQ ID NO: 378707 - DNA, 253 bp, Homo sapiens
ctatttgattatttagacaaagagaatatggggagttgagggaagagaaggaagagcatcttcatgaagtcccagcagaagggtcagacccgcaaagaggccacaggatgggcaggacaacctcaagtgactcttttttccatttatggggggacaagctcttgctctgtcaccgaggctggagtgcaggggcacaattatagctcactgcagcctcaaactcctggaatcgagcgatcctcctgcctcagcc

SEQ ID NO: 378708 - DNA, 3467 bp, Homo sapiens
tgcgtcgggttaagaggggttcctcgccagccaggtgctcgtcatgcgcaatgtggcgctgcggcgggcggcagggcctgtgtgtgctgaggcggctgagcggcggacatgcacaccacagagcgtggcgatggaacagtaaccgggcttgtgagagggctctgcagtataaactaggagacaagatccatggattcaccgtaaaccaggtgacatctgttcccgagctgttcctgactgcagtgaagctcacccatgatgacacaggagccaggtatttacacctggccagagaagacacgaataatctgttcagcgtgcagttccgtaccactcccatggacagtactggtgttcctcacattcttgagcataccgtcctttgtgggtctcagaaatatccgtgcagagaccctttcttcaaaatgttgaaccggtccctctccacgttcatgaacgccttcacagctagtgattatactctgtatccattttccacacaaaatcccaaggactttcagaatctcctctcggtgtatttggatgccacctttttcccatgtttacgcgagctggatttctggcaggaaggatggcggctggaacatgagaatccgagcgacccccagacgcccttggtctttaaaggagtcgtctttaatgagatgaagggagcgtttacagacaatgagaggatattctcccagcaccttcagaacagacttcttcccgaccacacgtactcagtggtctccgggggtgacccactgtgcatcccggagcttacatgggagcagcttaagcagtttcatgccactcactatcacccaagcaatgctaggttcttcacgtacggtaattttccattagaacagcatctgaaacaaattcacgaggaagcactgagcaaattccagaaaattgaaccaagcaccgtggtgccagctcagacaccctgggacaagcctagggaattccagataacatgtggcccggattcatttgctacagatccctctaaacaaacaaccgtcagcgttagcttcctcttaccggacatcaccgacacatttgaagccttcacattaagtcttctgtcttcactcttgacttctgggcccaattctcccttttacaaagccttgattgaatctggccttggcacagacttttctcctgatgttggatataatggctacacgagggaggcctactttagtgtcggcctccaagggattgtggagaaagacattgagaccgtcagaagcctcatagacagaacgattgatgaagtagttgagaaaggatttgaagatgatcgaattgaggctttacttcataaaattgaaatacagatgaaacatcagtctaccagctttgggctgatgctgacatcatacatagcttcttgctggaaccatgatggggaccctgtggagctcttgaagttgggaaatcagttagctaaattcagacagtgcctgcaggaaaatccaaaatttttgcaagaaaaagtaaaacagtattttaagaataaccagcataagctgactttatcgatgaggccagatgacaagtatcacgagaagcaggcacaggtggaagccacgaagctcaagcagaaggtcgaggctctgtcccccggagacaggcagcagatctacgagaaaggtctagaattacggagtcaacaaagcaaacctcaagatgcctcttgtctgccagcgttgaaagtttccgatattgaacccaccatacctgtcacagagttggacgtggtcctgacagctggagatatccctgttcagtactgcgcccagcccaccaatggcatggtgtatttccgggccttctccagcctgaacacactccccgaggagctgaggccctatgtgcccctcttctgcagcgtcctcaccaagctgggctgcggccttcttgactaccgggagcaggctcagcagatagaattgaagaccggagggatgagtgcttctccccacgtgctccccgacgactcacacatggacacctacgagcagggtgtgcttttctcctctctctgcctggatcgaaacctgccagacatgatgcagctatggagtgaaatatttaacaacccgtgctttgaagaagaggagcacttcaaggtgctggtgaagatgaccgcccaggagctcgccaatggaattcctgactctgggcacctgtacgcatccatcagggcaggccggaccctcacgcccgcaggggacctgcaggagaccttcagcgggatggatcaggtgcggctgatgaagaggattgcagaaatgacagatatcaaacccatcctgaggaagctcccacgtatcaagaaacacttgttaaatggtgataatatgaggtgttcagtgaatgcgactcctcagcagatgcctcagacagaaaaagcggtcgaagacttccttagaagcatcggtcggagtaaaaaggaacggaggcctgtgcgcccacacacggtcgagaaacctgtgcccagcagctctggtggagatgcccacgttccccatggctcccaggtcattaggaagctggtcatggaacccaccttcaagccctggcagatgaagactcacttcctgatgcccttcccggtgaattacgtgggtgaatgcatccgaactgtcccctacacggacccagatcatgccagtcttaaaatccttgcacgtttgatgactgccaaattcttgcatacagaaattcgagaaaaaggcggtgcttatggtggaggcgcaaaactcagccacaatgggattttcaccctttactcttacagggacccaaatacaatagagacgctccagtcttttgggaaggctgtcgactgggctaagtctggaaaattcacacagcaagacatcgacgaagccaaactttctgtcttctcaaccgtagatgctcctgtcgctccttcagacaaaggaatggaccacttcttgtacggcctctcggatgagatgaagcaggcccacagagagcagctctttgctgtcagccacgacaagctcctggccgtgagcgataggtacctcggcactgggaagagcacacacggcctggccatcctcggacccgagaacccgaaaattgccaaggacccatcctggatcatccgatgagcagccgtggcgctcgactgcacaggagcccgagacaatacacctccgagctgaatatgaaaagtcagaaatgctactgctttttccaagaatattatgtcattgagtgtcgccaaagcccttgactggcgagtcaaaaactcagatctatcttaagagtgaccaggaagaggttcattgaaataatcatgcatgaagcgccaaagatgcaccatgtagaattttcactttgtactggcaggctcgttttacctcattctagaatatttaagaatctaaaaataaagggcaactctgacttaa

SEQ ID NO: 378709 - DNA, 3346 bp, Homo sapiens
gtgtaagtatggtgtacaatatattggtttagaattttttatgaaagtaacattttcttactatattacattgaaatagttatgaatctacggtataatataaggagatacttatagatctccatctcagcctatgaagctttggaaaggattgatggtttaatccgaaagtgtaagtaattggatgtgcagtgtggcctggggctgccttaggaacaggtgtgcctgctgcgtgcgtggctcctcctccaagccgaccctgcagttgctgtcgtcctccctaggtggggtgtgcacagatctggaaacacacacacgagtgcacacatcaacacttgactttttgcccagctctgccgtggccgaggttgcaggacaagcagtagacagggctgtgggctcctgttcccatccagaataatagggcgacagggaaccctgcagccagcttcagggaccactgcccaacctgacatgcagctggggtcttccctttgtggagatgaagttgtctgcatgctgcagaaagctatgtggctgtgacaccttctgcaccctggctgagggtccgctcagatggaaaaatgtcttcagggttttgaaggttccctgcctttctttttaaatatagctgccactgttcatccttttgtagcggtttagaaaacacctcatggtcattcccttgactcaattattgctggcattagcagtgtcactgtgaatgtttctttcaaaagcatgagtgctgagaggaaactgcttttcttaaaaacttaaaaaacctttagtcttcggactcccccgcccaggctaccagacattcgagcaaaacaaaggaagtatgtatcacggtgatctgggtgaagagagtagggagtagtcataaaacatttattgaagagcttacaactggaaatgcctattttagaatggtgttttaagtgcagacactggctgcccaagtgtcttgtgcctctggacgctaacttcctaggcgggagaaactggggtctccctggggaagggggcacatgaactctcgagggcgaaggccagagtgcacctgcttatgaccttcgaagtgtagagaggttggcaaagccgcagttattgaattaatggaagcaacttgtaactcaagatgcacgattttaaaaatgattcagtaaagactgacttgtaatcggggcgatgcttctctgctgtgtcaggctgggctgcggccttcttgactaccgggagcaggctcagcagatagaattgaagaccggagggatgagtgcttctccccacgtgctccccgacgactcacacatggacacctacgagcaggtagcctggtaccgtcagacgactgctgcggtgggaagcttttctccagtgtctgtcactgttcgattcggccctaattcctttcttctgtgttttctttggttcagggtgtgcttttctcctctctctgcctggatcgaaacctgccagacatgatgcagctatggagtgaaatatttaacaagtaactttatttgcaagagttgtccattcttggggtgtactagagatctttgtttgaagtactttaaaggagacagttttactcgtgtgtgttgttgttttccaagtctgacttttacttgtagttcatatggacttataaaatttctttggttgttaaagtactctgaaaacttaatcaactttccatgatactgaagggacgtgaggaatgggtctccaggaattttttcttctcctttttccatagcccgtgctttgaagaagaggagcacttcaaggtgctggtgaagatgaccgcccaggagctcgccaatggaattcctgactctgggcacctgtacgcatccatcagggcaggccggaccctcacgcccgcaggggacctgcaggagaccttcagcgggatggatcaggtgcggctgatgaagaggattgcagaaatgacagatatcaaacccatcctgaggaagctcccacgtatcaagaaacacttgttaaatggtgataatatgaggtgttcagtgaatgcgactcctcagcagatgcctcagacagaaaaagcggtcgaagacttccttagaagcatcggtcggagtaaaaaggaacggaggcctgtgcgcccacacacggtcgagaaacctgtgcccagcagctctggtggagatgcccacgttccccatggctcccaggtcattaggaagctggtcatgttttacagtgagaaattgtgtggagtgacggaactgcagtgccttgctctcgcgccccagcacctggctgcagagtgtcacggagatgggacccctgagatggctccagtcccagtgccgtgggcagtgcgtgggagcacagccgcctctgacccctgagtgggtccagtcccagtgccgtgggcggtgcatggcagcacagccgcctctgaccataccgtgtccctcaggaacccaccttcaagccctggcagatgaagactcacttcctgatgcccttcccggtgaattacgtgggtgaatgcatccgaactgtcccctacacggacccagatcatgccagtcttaaaatccttgcacgtttgatgactgccaaattcttgcatacagaaattcgagaaaaaggcggtgcttatggtggaggcgcaaaactcagccacaatgggattttcaccctttactcttacagggacccaaatacaatagagacgctccagtcttttgggaaggctgtcgactgggctaagtctggaaaattcacacagcaagacatcgacgaagccaaactttctgtcttctcaaccgtagatgctcctgtcgctccttcagacaaaggaatggaccacttcttgtacggcctctcggatgagatgaagcaggcccacagagagcagctctttgctgtcagccacgacaagctcctggccgtgagcgataggtacctcggcactgggaagagcacacacggcctggccatcctcggacccgagaacccgaaaattgccaaggacccatcctggatcatccgatgagcagccgtggcgctcgactgcacaggagcccgagacaatacacctccgagctgaatatgaaaagtcagaaatgctactgctttttccaagaatattatgtcattgagtgtcgccaaagcccttgactggcgagtcaaaaactcagatctatcttaagagtgaccaggaagaggttcattgaaataatcatgcatgaagcgccaaagatgcaccatgtagaattttcactttgtactggcaggctcgttttacctcattctagaatatttaagaatctaaaaataaagggcaactctgacttaa

SEQ ID NO: 378710 - DNA, 3741 bp, Homo sapiens
tgcgtcgggttaagaggggttcctcgccagccaggtgctcgtcatgcgcaatgtggcgctgcggcgggcggcagggcctgtgtgtgctgaggcggctgagcggcggacatgcacaccacagagcgtggcgatggaacagtaaccgggcttgtgagagggctctgcagtataaactaggagacaagatccatggattcaccgtaaaccaggtgacatctgttcccgagctgttcctgactgcagtgaagctcacccatgatgacacaggagccaggtatttacacctggccagagaagacacgaataatctgttcagcgtgcagttccgtaccactcccatggacagtactggtgttcctcacattcttgagcataccgtcctttgtgggtctcagaaatatccgtgcagagaccctttcttcaaaatgttgaaccggtccctctccacgttcatgaacgccttcacagctagtgattatactctgtatccattttccacacaaaatcccaaggactttcagaatctcctctcggtgtatttggatgccacctttttcccatgtttacgcgagctggatttctggcaggaaggatggcggctggaacatgagaatccgagcgacccccagacgcccttggtctttaaaggagtcgtctttaatgagatgaagggagcgtttacagacaatgagaggatattctcccagcaccttcagaacagacttcttcccgaccacacgtactcagtggtctccgggggtgacccactgtgcatcccggagcttacatgggagcagcttaagcagtttcatgccactcactatcacccaagcaatgctaggttcttcacgtacggtaattttccattagaacagcatctgaaacaaattcacgaggaagcactgagcaaattccagaaaattgaaccaagcaccgtggtgccagctcagacaccctgggacaagcctagggaattccagataacatgtggcccggattcatttgctacagatccctctaaacaaacaaccgtcagcgttagcttcctcttaccggacatcaccgacacatttgaagccttcacattaagtcttctgtcttcactcttgacttctgggcccaattctcccttttacaaagccttgattgaatctggccttggcacagacttttctcctgatgttggatataatggctacacgagggaggcctactttagtgtcggcctccaagggattgtggagaaagacattgagaccgtcagaagcctcatagacagaacgattgatgaagtagttgagaaaggatttgaagatgatcgaattgaggctttacttcataaaattgaaatacagatgaaacatcagtctaccagctttgggctgatgctgacatcatacatagcttcttgctggaaccatgatggggaccctgtggagctcttgaagttgggaaatcagttagctaaattcagacagtgcctgcaggaaaatccaaaatttttgcaagaaaaagtaaaacagtattttaagaataaccagcataagctgactttatcgatgaggccagatgacaagtatcacgagaagcaggcacaggtggaagccacgaagctcaagcagaaggtcgaggctctgtcccccggagacaggcagcagatctacgagaaaggtctagaattacggagtcaacaaagcaaacctcaagatgcctcttgtctgccagcgttgaaagtttccgatattgaacccaccatacctgtcacagagttggacgtggtcctgacagctggagatatccctgttcagtactgcgcccagcccaccaatggcatggtgtatttccgggccttctccagcctgaacacactccccgaggagctgaggccctatgtgcccctcttctgcagcgtcctcaccaagctgggctgcggccttcttgactaccgggagcaggctcagcagatagaattgaagaccggagggatgagtgcttctccccacgtgctccccgacgactcacacatggacacctacgagcagggtgtgcttttctcctctctctgcctggatcgaaacctgccagacatgatgcagctatggagtgaaatatttaacaacccgtgctttgaagaagaggagcacttcaaggtgctggtgaagatgaccgcccaggagctcgccaatggaattcctgactctgggcacctgtacgcatccatcagggcaggccggaccctcacgcccgcaggggacctgcaggagaccttcagcgggatggatcaggtgcggctgatgaagaggattgcagaaatgacagatatcaaacccatcctgaggaagctcccacgtatcaagaaacacttgttaaatggtgataatatgaggtgttcagtgaatgcgactcctcagcagatgcctcagacagaaaaagcggtcgaagacttccttagaagcatcggtcggagtaaaaaggaacggaggcctgtgcgcccacacacggtcgagaaacctgtgcccagcagctctggtggagatgcccacgttccccatggctcccaggtcattaggaagctggtcatgtatacgttaaggcatcacgtcaagattggaggacttcatgtcagttttacagtgagaaattgtgtggagtgacggaactgcagtgccttgctctcgcgccccagcacctggctgcagagtgtcacggagatgggacccctgagatggctccagtcccagtgccgtgggcagtgcgtgggagcacagccgcctctgacccctgagtgggtccagtcccagtgccgtgggcggtgcatggcagcacagccgcctctgaccataccgtgtccctcaggaacccaccttcaagccctggcagatgaagactcacttcctgatgcccttcccggtgaattacgtgggtgaatgcatccgaactgtcccctacacggacccagatcatgccagtcttaaaatccttgcacgtttgatgactgccaaattcttgcatacagaaattcgagaaaaaggcggtgcttatggtggaggcgcaaaactcagccacaatgggattttcaccctttactcttacagggacccaaatacaatagagacgctccagtcttttgggaaggctgtcgactgggctaagtctggaaaattcacacagcaagacatcgacgaagccaaactttctgtcttctcaaccgtagatgctcctgtcgctccttcagacaaaggaatggaccacttcttgtacggcctctcggatgagatgaagcaggcccacagagagcagctctttgctgtcagccacgacaagctcctggccgtgagcgataggtacctcggcactgggaagagcacacacggcctggccatcctcggacccgagaacccgaaaattgccaaggacccatcctggatcatccgatgagcagccgtggcgctcgactgcacaggagcccgagacaatacacctccgagctgaatatgaaaagtcagaaatgctactgctttttccaagaatattatgtcattgagtgtcgccaaagcccttgactggcgagtcaaaaactcagatctatcttaagagtgaccaggaagaggttcattgaaataatcatgcatgaagcgccaaagatgcaccatgtagaattttcactttgtactggcaggctcgttttacctcattctagaatatttaagaatctaaaaataaagggcaactctgacttaa

SEQ ID NO: 378711 - DNA, 2391 bp, Homo sapiens
aggtgatccttccacctcagcctcccaagtagctggaactagggtgcacaccaccatgcccagctaatttttgtgtagtagagatgggctttctctgtgttgcccaagctggtcttaaatgcctggcctcaagcagtcctcctgccttggcctcccaaagtgctgggattacaagcatgagccattgtgtctggcccatctttgttcttcattgtattctttaggaaaggatttgaagatgatcgaattgaggctttacttcataaaattgaaatacagatgaaacatcagtctaccagctttgggctgatgctgacatcatacatagcttcttgctggaaccatgatggggaccctgtggagctcttgaagttgggaaatcagttagctaaattcagacagtgcctgcaggaaaatccaaaatttttgcaagaaaaagtaaaacagtattttaagaataaccagcataagctgactttatcgatgaggccagatgacaagtatcacgagaagcaggcacaggtggaagccacgaagctcaagcagaaggtcgaggctctgtcccccggagacaggcagcagatctacgagaaaggtctagaattacggagtcaacaaagcaaacctcaagatgcctcttgtctgccagcgttgaaagtttccgatattgaacccaccatacctgtcacagagttggacgtggtcctgacagctggagatatccctgttcagtactgcgcccagcccaccaatggcatggtgtatttccgggccttctccagcctgaacacactccccgaggagctgaggccctatgtgcccctcttctgcagcgtcctcaccaagctgggctgcggccttcttgactaccgggagcaggctcagcagatagaattgaagaccggagggatgagtgcttctccccacgtgctccccgacgactcacacatggacacctacgagcagggtgtgcttttctcctctctctgcctggatcgaaacctgccagacatgatgcagctatggagtgaaatatttaacaacccgtgctttgaagaagaggagcacttcaaggtgctggtgaagatgaccgcccaggagctcgccaatggaattcctgactctgggcacctgtacgcatccatcagggcaggccggaccctcacgcccgcaggggacctgcaggagaccttcagcgggatggatcaggtgcggctgatgaagaggattgcagaaatgacagatatcaaacccatcctgaggaagctcccacgtatcaagaaacacttgttaaatggtgataatatgaggtgttcagtgaatgcgactcctcagcagatgcctcagacagaaaaagcggtcgaagacttccttagaagcatcggtcggagtaaaaaggaacggaggcctgtgcgcccacacacggtcgagaaacctgtgcccagcagctctggtggagatgcccacgttccccatggctcccaggtcattaggaagctggtcatggaacccaccttcaagccctggcagatgaagactcacttcctgatgcccttcccggtgaattacgtgggtgaatgcatccgaactgtcccctacacggacccagatcatgccagtcttaaaatccttgcacgtttgatgactgccaaattcttgcatacagaaattcgagaaaaaggcggtgcttatggtggaggcgcaaaactcagccacaatgggattttcaccctttactcttacagggacccaaatacaatagagacgctccagtcttttgggaaggctgtcgactgggctaagtctggaaaattcacacagcaagacatcgacgaagccaaactttctgtcttctcaaccgtagatgctcctgtcgctccttcagacaaaggaatggaccacttcttgtacggcctctcggatgagatgaagcaggcccacagagagcagctctttgctgtcagccacgacaagctcctggccgtgagcgataggtacctcggcactgggaagagcacacacggcctggccatcctcggacccgagaacccgaaaattgccaaggacccatcctggatcatccgatgagcagccgtggcgctcgactgcacaggagcccgagacaatacacctccgagctgaatatgaaaagtcagaaatgctactgctttttccaagaatattatgtcattgagtgtcgccaaagcccttgactggcgagtcaaaaactcagatctatcttaagagtgaccaggaagaggttcattgaaataatcatgcatgaagcgccaaagatgcaccatgtagaattttcactttgtactggcaggctcgttttacctcattctagaatatttaagaatctaaaaataaagggcaactctgacttaa

SEQ ID NO: 378712 - DNA, 3426 bp, Homo sapiens
tgcgtcgggttaagaggggttcctcgccagccaggtgctcgtcatgcgcaatgtggcgctgcggcgggcggcagggcctgtgtgtgctgaggcggctgagcggcggacatgcacaccacagagcgtggcgatggaacagtaaccgggcttgtgagagggctctgcagtataaactaggagacaagatccatggattcaccgtaaaccaggtgacatctgttcccgagctgttcctgactgcagtgaagctcacccatgatgacacaggagccaggtatttacacctggccagagaagacacgaataatctgttcagcgtgcagttccgtaccactcccatggacagtactggtgttcctcacattcttgagcataccgtcctttgtgggtctcagaaatatccgtgcagagaccctttcttcaaaatgttgaaccggtccctctccacgttcatgaacgccttcacagctagtgattatactctgtatccattttccacacaaaatcccaaggactttcagaatctcctctcggtgtatttggatgccacctttttcccatgtttacgcgagctggatttctggcaggaaggatggcggctggaacatgagaatccgagcgacccccagacgcccttggtctttaaaggagtcgtctttaatgagatgaagggagcgtttacagacaatgagaggatattctcccagcaccttcagaacagacttcttcccgaccacacgtactcagtggtctccgggggtgacccactgtgcatcccggagcttacatgggagcagcttaagcagtttcatgccactcactatcacccaagcaatgctaggttcttcacgtacggtaattttccattagaacagcatctgaaacaaattcacgaggaagcactgagcaaattccagaaaattgaaccaagcaccgtggtgccagctcagacaccctgggacaagcctagggaattccagataacatgtggcccggattcatttgctacagatccctctaaacaaacaaccgtcagcgttagcttcctcttaccggacatcaccgacacatttgaagccttcacattaagtcttctgtcttcactcttgacttctgggcccaattctcccttttacaaagccttgattgaatctggccttggcacagacttttctcctgatgttggatataatggctacacgagggaggcctactttagtgtcggcctccaagggattgtggagaaagacattgagaccgtcagaagcctcatagacagaacgattgatgaagtagttgagaaaggatttgaagatgatcgaattgaggctttacttcataaaattgaaatacagatgaaacatcagtctaccagctttgggctgatgctgacatcatacatagcttcttgctggaaccatgatggggaccctgtggagctcttgaagttgggaaatcagttagctaaattcagacagtgcctgcaggaaaatccaaaatttttgcaagaaaaagtaaaacagtattttaagaataaccagcataagctgactttatcgatgaggccagatgacaagtatcacgagaagcaggcacaggtggaagccacgaagctcaagcagaaggtcgaggctctgtcccccggagacaggcagcagatctacgagaaaggtctagaattacggagtcaacaaagcaaacctcaagatgcctcttgtctgccagcgttgaaagtttccgatattgaacccaccatacctgtcacagagttggacgtggtcctgacagctggagatatccctgttcagtactgcgcccagcccaccaatggcatggtgtatttccgggccttctccagcctgaacacactccccgaggagctgaggccctatgtgcccctcttctgcagcgtcctcaccaagctgggctgcggccttcttgactaccgggagcaggctcagcagatagaattgaagaccggagggatgagtgcttctccccacgtgctccccgacgactcacacatggacacctacgagcagggtgtgcttttctcctctctctgcctggatcgaaacctgccagacatgatgcagctatggagtgaaatatttaacaacccgtgctttgaagaagaggagcacttcaaggtgctggtgaagatgaccgcccaggagctcgccaatggaattcctgactctgggcacctgtacgcatccatcagggcaggccggaccctcacgcccgcaggggacctgcaggagaccttcagcgggatggatcaggtgcggctgatgaagaggattgcagaaatgacagatatcaaacccatcctgaggaagctcccacgtatcaagaaacacttgttaaatggtgataatatgaggtgttcagtgaatgcgactcctcagcagatgcctcagacagaaaaagcggtcgaagacttccttagaagcatcggtcggagtaaaaaggaacggaggcctgtgcgcccacacacggtcgagaaacctgtgcccagcagctctggtggagatgcccacgttccccatggctcccaggtcattaggaagctggtcatggaacccaccttcaagccctggcagatgaagactcacttcctgatgcccttcccggtgaattacgtgggtgaatgcatccgaactgtcccctacacggacccagatcatgccagtcttaaaatccttgcacgtttgatgactgccaaattcttgcatacagaaattcgagaaaaaggcggtgcttatggtggaggcgcaaaactcagccacaatgggattttcaccctttactcttacagggacccaaatacaatagagacgctccagtcttttgggaaggctgtcgactgggctaagtctggaaaattcacacagcaagacatcgacgaagccaaactttctgtcttctcaaccgtagatgctcctgtcgctccttcagacaaagcaggcccacagagagcagctctttgctgtcagccacgacaagctcctggccgtgagcgataggtacctcggcactgggaagagcacacacggcctggccatcctcggacccgagaacccgaaaattgccaaggacccatcctggatcatccgatgagcagccgtggcgctcgactgcacaggagcccgagacaatacacctccgagctgaatatgaaaagtcagaaatgctactgctttttccaagaatattatgtcattgagtgtcgccaaagcccttgactggcgagtcaaaaactcagatctatcttaagagtgaccaggaagaggttcattgaaataatcatgcatgaagcgccaaagatgcaccatgtagaattttcactttgtactggcaggctcgttttacctcattctagaatatttaagaatctaaaaataaagggcaactctgacttaa

SEQ ID NO: 378713 - DNA, 1796 bp, Homo sapiens
  misc_feature (33)..(33): n is a, c, g, or t
  misc_feature (39)..(39): n is a, c, g, or t
aaactattcatcagtcgaccggtgttaatcagnagaggngctcttgtctgccagcgttgaaagtttccgatattgaacccaccatacctgtcacagagttggacgtggtcctgacagctggagatatccctgttcagtactgcgcccagcccaccaatggcatggtgtatttccgggccttctccagcctgaacacactccccgaggagctgaggccctatgtgcccctcttctgcagcgtcctcaccaagctgggctgcggccttcttgactaccgggagcaggctcagcagatagaattgaagaccggagggatgagtgcttctccccacgtgctccccgacgactcacacatggacacctacgagcagggtgtgcttttctcctctctctgcctggatcgaaacctgccagacatgatgcagctatggagtgaaatatttaacaacccgtgctttgaagaagaggagcacttcaaggtgctggtgaagatgaccgcccaggagctcgccaatggaattcctgactctgggcacctgtacgcatccatcagggcaggccggaccctcacgcccgcaggggacctgcaggagaccttcagcgggatggatcaggtgcggctgatgaagaggattgcagaaatgacagatatcaaacccatcctgaggaagctcccacgtatcaagaaacacttgttaaatggtgataatatgaggtgttcagtgaatgcgactcctcagcagatgcctcagacagaaaaagcggtcgaagacttccttagaagcatcggtcggagtaaaaaggaacggaggcctgtgcgcccacacacggtcgagaaacctgtgcccagcagctctggtggagatgcccacgttccccatggctcccaggtcattaggaagctggtcatggaacccaccttcaagccctggcagatgaagactcacttcctgatgcccttcccggtgaattacgtgggtgaatgcatccgaactgtcccctacacggacccagatcatgccagtcttaaaatccttgcacgtttgatgactgccaaattcttgcatacagaaattcgagaaaaaggcggtgcttatggtggaggcgcaaaactcagccacaatgggattttcaccctttactcttacagggacccaaatacaatagagacgctccagtcttttgggaaggctgtcgactgggctaagtctggaaaattcacacagcaagacatcgacgaagccaaactttctgtcttctcaaccgtagatgctcctgtcgctccttcagacaaaggaatggaccacttcttgtacggcctctcggatgagatgaagcaggcccacagagagcagctctttgctgtcagccacgacaagctcctggccgtgagcgataggtacctcggcactgggaagagcacacacggcctggccatcctcggacccgagaacccgaaaattgccaaggacccatcctggatcatccgatgagcagccgtggcgctcgactgcacaggagcccgagacaatacacctccgagctgaatatgaaaagtcagaaatgctactgctttttccaagaatattatgtcattgagtgtcgccaaagcccttgactggcgagtcaaaaactcagatctatcttaagagtgaccaggaagaggttcattgaaataatcatgcatgaagcgccaaagatgcaccatgtagaattttcactttgtactggcaggctcgttttacctcattctagaatatttaagaatctaaaaataaagggcaactctgacttaa

SEQ ID NO: 378714 - DNA, 2665 bp, Homo sapiens
tgcgtcgggttaagaggggttcctcgccagccaggtgctcgtcatgcgcaatgtggcgctgcggcgggcggcagggcctgtgtgtgctgaggcggctgagcggcggacatgcacaccacagagcgtggcgatggaacagtaaccgggcttgtgagagggctctgcagtataaactaggagacaagatccatggattcaccgtaaaccaggtgacatctgttcccgagctgttcctgactgcagtgaagctcacccatgatgacacaggagccaggtatttacacctggccagagaagacacgaataatctgttcagcgtgcagttccgtaccactcccatggacagtactggtgttcctcacattcttgagcataccgtcctttgtgggtctcagaaatatccgtgcagagaccctttcttcaaaatgttgaaccggtccctctccacgttcatgaacgccttcacagctagtgattatactctgtatccattttccacacaaaatcccaaggactttcagaatctcctctcggtgtatttggatgccacctttttcccatgtttacgcgagctggatttctggcaggaaggatggcggctggaacatgagaatccgagcgacccccagacgcccttggtctttaaaggagtcgtctttaatgagatgaagggagcgtttacagacaatgagaggatattctcccagcaccttcagaacagacttcttcccgaccacacgtactcagtggtctccgggggtgacccactgtgcatcccggagcttacatgggagcagcttaagcagtttcatgccactcactatcacccaagcaatgctaggttcttcacgtacggtaattttccattagaacagcatctgaaacaaattcacgaggaagcactgagcaaattccagaaaattgaaccaagcaccgtggtgccagctcagacaccctgggacaagcctagggaattccagataacatgtggcccggattcatttgctacagatccctctaaacaaacaaccgtcagcgttagcttcctcttaccggacatcaccgacacatttgaagccttcacattaagtcttctgtcttcactcttgacttctgggcccaattctcccttttacaaagccttgattgaatctggccttggcacagacttttctcctgatgttggatataatggctacacgagggaggcctactttagtgtcggcctccaagggattgtggagaaagacattgagaccgtcagaagcctcatagacagaacgattgatgaagtagttgagaaaggatttgaagatgatcgaattgaggctttacttcataaaattgaaatacagatgaaacatcagtctaccagctttgggctgatgctgacatcatacatagcttcttgctggaaccatgatggggaccctgtggagctcttgaagttgggaaatcagttagctaaattcagacagtgcctgcaggaaaatccaaaatttttgcaagaaaaagtaaaacagtattttaagaataaccagcataagctgactttatcgatgaggccagatgacaagtatcacgagaagcaggcacaggtggaagccacgaagctcaagcagaaggtcgaggctctgtcccccggagacaggcagcagatctacgagaaaggtctagaattacggagtcaacaaagcaaacctcaagatgcctcttgtctgccagcgttgaaagtttccgatattgaacccaccatacctgtcacagagttggacgtggtcctgacagctggagatatccctgttcagtactgcgcccagcccaccaatggcatggtgtatttccgggccttctccagcctgaacacactccccgaggagctgaggccctatgtgcccctcttctgcagcgtcctcaccaagctgggctgcggccttcttgactaccgggagcaggctcagcagatagaattgaagaccggagggatgagtgcttctccccacgtgctccccgacgactcacacatggacacctacgagcagggtgtgcttttctcctctctctgcctggatcgaaacctgccagacatgatgcagctatggagtgaaatatttaacaacccgtgctttgaagaagaggagcacttcaaggtgctggtgaagatgaccgcccaggagctcgccaatggaattcctgactctgggcacctgtacgcatccatcagggcaggccggaccctcacgacaagctcctggccgtgagcgataggtacctcggcactgggaagagcacacacggcctggccatcctcggacccgagaacccgaaaattgccaaggacccatcctggatcatccgatgagcagccgtggcgctcgactgcacaggagcccgagacaatacacctccgagctgaatatgaaaagtcagaaatgctactgctttttccaagaatattatgtcattgagtgtcgccaaagcccttgactggcgagtcaaaaactcagatctatcttaagagtgaccaggaagaggttcattgaaataatcatgcatgaagcgccaaagatgcaccatgtagaattttcactttgtactggcaggctcgttttacctcattctagaatatttaagaatctaaaaataaagggcaactctgacttaa

SEQ ID NO: 378715 - DNA, 2479 bp, Homo sapiens
tgcgtcgggttaagaggggttcctcgccagccaggtgctcgtcatgcgcaatgtggcgctgcggcgggcggcagggcctgtgtgtgctgaggcggctgagcggcggacatgcacaccacagagcgtggcgatggaacagtaaccgggcttgtgagagggctctgcagtataaactaggagacaagatccatggattcaccgtaaaccaggtgacatctgttcccgagctgttcctgactgcagtgaagctcacccatgatgacacaggagccaggtatttacacctggccagagaagacacgaataatctgttcagcgtgcagttccgtaccactcccatggacagtactggtgttcctcacattcttgagcataccgtcctttgtgggtctcagaaatatccgtgcagagaccctttcttcaaaatgttgaaccggtccctctccacgttcatgaacgccttcacagctagtgattatactctgtatccattttccacacaaaatcccaaggactttcagaatctcctctcggtgtatttggatgccacctttttcccatgtttacgcgagctggatttctggcaggaaggatggcggctggaacatgagaatccgagcgacccccagacgcccttggtctttaaaggagtcgtctttaatgagatgaagggagcgtttacagacaatgagaggatattctcccagcaccttcagaacagacttcttcccgaccacacgtactcagtggtctccgggggtgacccactgtgcatcccggagcttacatgggagcagcttaagcagtttcatgccactcactatcacccaagcaatgctaggttcttcacgtacggtaattttccattagaacagcatctgaaacaaattcacgaggaagcactgagcaaattccagaaaattgaaccaagcaccgtggtgccagctcagacaccctgggacaagcctagggaattccagataacatgtggcccggattcatttgctacagatccctctaaacaaacaaccgtcagcgttagcttcctcttaccggacatcaccgacacatttgaagccttcacattaagtcttctgtcttcactcttgacttctgggcccaattctcccttttacaaagccttgattgaatctggccttggcacagacttttctcctgatgttggatataatggctacacgagggaggcctactttagtgtcggcctccaagggattgtggagaaagacattgagaccgtcagaagcctcatagacagaacgattgatgaagtagttgagaaaggatttgaagatgatcgaattgaggctttacttcataaaattgaaatacagatgaaacatcagtctaccagctttgggctgatgctgacatcatacatagcttcttgctggaaccatgatggggaccctgtggagctcttgaagttgggaaatcagttagctaaattcagacagtgcctgcaggaaaatccaaaatttttgcaagaaaaagtaaaacagtattttaagaataaccagcataagctgactttatcgatgaggccagatgacaagtatcacgagaagcaggcacaggtggaagccacgaagctcaagcagaaggtcgaggctctgtcccccggagacaggcagcagatctacgagaaaggtctagaattacggagtcaacaaagcaaacctcaagatgcctcttgtctgccagcgttgaaagtttccgatattgaacccaccatacctgtcacagagttggacgtggtcctgacagctggagatatccctgttcagtactgcgcccagcccaccaatggcatggtgtatttccgggccttctccagcctgaacacactccccgaggagctgaggccctatgtgcccctcttctgcagcgtcctcaccaagctgggctgcggccttcttgactaccgggagcaggctcagcagatagaattgaagaccggagggatgagtgcttctccccacgtgctccccgacgactcacacatggacacctacgagcaggtgtgcttttctcctctctctgcctggccgtgagcgataggtacctcggcactgggaagagcacacacggcctggccatcctcggacccgagaacccgaaaattgccaaggacccatcctggatcatccgatgagcagccgtggcgctcgactgcacaggagcccgagacaatacacctccgagctgaatatgaaaagtcagaaatgctactgctttttccaagaatattatgtcattgagtgtcgccaaagcccttgactggcgagtcaaaaactcagatctatcttaagagtgaccaggaagaggttcattgaaataatcatgcatgaagcgccaaagatgcaccatgtagaattttcactttgtactggcaggctcgttttacctcattctagaatatttaagaatctaaaaataaagggcaactctgacttaa

SEQ ID NO: 378716 - DNA, 2012 bp, Homo sapiens
tgcgtcgggttaagaggggttcctcgccagccaggtgctcgtcatgcgcaatgtggcgctgcggcgggcggcagggcctgtgtgtgctgaggcggctgagcggcggacatgcacaccacagagcgtggcgatggaacagtaaccgggcttgtgagagggctctgcagtataaactaggagacaagatccatggattcaccgtaaaccaggtgacatctgttcccgagctgttcctgactgcagtgaagctcacccatgatgacacaggagccaggtatttacacctggccagagaagacacgaataatctgttcagcgtgcagttccgtaccactcccatggacagtactggtgttcctcacattcttgagcataccgtcctttgtgggtctcagaaatatccgtgcagagaccctttcttcaaaatgttgaaccggtccctctccacgttcatgaacgccttcacagctagtgattatactctgtatccattttccacacaaaatcccaaggactttcagaatctcctctcggtgtatttggatgccacctttttcccatgtttacgcgagctggatttctggcaggaaggatggcggctggaacatgagaatccgagcgacccccagacgcccttggtctttaaaggagtcgtctttaatgagatgaagggagcgtttacagacaatgagaggatattctcccagcaccttcagaacagacttcttcccgaccacacgtactcagtggtctccgggggtgacccactgtgcatcccggagcttacatgggagcagcttaagcagtttcatgccactcactatcacccaagcaatgctaggttcttcacgtacggtaattttccattagaacagcatctgaaacaaattcacgaggaagcactgagcaaattccagaaaattgaaccaagcaccgtggtgccagctcagacaccctgggacaagcctagggaattccagataacatgtggcccggattcatttgctacagatccctctaaacaaacaaccgtcagcgttagcttcctcttaccggacatcaccgacacatttgaagccttcacattaagtcttctgtcttcactcttgacttctgggcccaattctcccttttacaaagccttgattgaatctggccttggcacagacttttctcctgatgttggatataatggctacacgagggaggcctactttagtgtcggcctccaagggattgtggagaaagacattgagaccgtcagaagcctcatagacagaacgattgatgaagtagttgagaaaggatttgaagatgatcgaattgaggctttacttcataaaattgaaatacagatgaaacatcagtctaccagctttgggctgatgctgacatcatacatagcttcttgctggaaccatgatggggaccctgtggagctcttgaagttgggaaatcagttagctaaattcagacagtgcctgcaggaaaatccaaaatttttgcaagaaaaagtaaaacagtattttaagaataaccagcataagctgactttatcgatgaggccagatgacaagtatcacgagaagcaggcacaggtggaagccacgaagctcaagcagaaggtcgaggctctgtcccccggagacaggcagcagatctacgagaaaggtctagaattacggagtcaacaaagcaaacctcaagatgcctcttgtctgccagcgttgaaagtttccgatattgaacccaccatacctgtcacagagttggacgtggtcctgacaggtcactgtgaacgctacgcttttcccagctggagatatccctgttcagtactgcgcccagcccaccaatggcatggtgtatttccgggccttctccagcctgaacacactccccgaggagctgaggccctatgtgcccctcttctgcagcgtcctcaccaagtacgagtcgcaacatacccttgtgtgtcttattaatgtctgctttgtgtgcatatctgtatt

SEQ ID NO: 378717 - DNA, 1858 bp, Homo sapiens
tgcgtcgggttaagaggggttcctcgccagccaggtgctcgtcatgcgcaatgtggcgctgcggcgggcggcagggcctgtgtgtgctgaggcggctgagcggcggacatgcacaccacagagcgtggcgatggaacagtaaccgggcttgtgagagggctctgcagtataaactaggagacaagatccatggattcaccgtaaaccaggtgacatctgttcccgagctgttcctgactgcagtgaagctcacccatgatgacacaggagccaggtatttacacctggccagagaagacacgaataatctgttcagcgtgcagttccgtaccactcccatggacagtactggtgttcctcacattcttgagcataccgtcctttgtgggtctcagaaatatccgtgcagagaccctttcttcaaaatgttgaaccggtccctctccacgttcatgaacgccttcacagctagtgattatactctgtatccattttccacacaaaatcccaaggactttcagaatctcctctcggtgtatttggatgccacctttttcccatgtttacgcgagctggatttctggcaggaaggatggcggctggaacatgagaatccgagcgacccccagacgcccttggtctttaaaggagtcgtctttaatgagatgaagggagcgtttacagacaatgagaggatattctcccagcaccttcagaacagacttcttcccgaccacacgtactcagtggtctccgggggtgacccactgtgcatcccggagcttacatgggagcagcttaagcagtttcatgccactcactatcacccaagcaatgctaggttcttcacgtacggtaattttccattagaacagcatctgaaacaaattcacgaggaagcactgagcaaattccagaaaattgaaccaagcaccgtggtgccagctcagacaccctgggacaagcctagggaattccagataacatgtggcccggattcatttgctacagatccctctaaacaaacaaccgtcagcgttagcttcctcttaccggacatcaccgacacatttgaagccttcacattaagtcttctgtcttcactcttgacttctgggcccaattctcccttttacaaagccttgattgaatctggccttggcacagacttttctcctgatgttggatataatggctacacgagggaggcctactttagtgtcggcctccaagggattgtggagaaagacattgagaccgtcagaagcctcatagacagaacgattgatgaagtagttgagaaaggatttgaagatgatcgaattgaggctttacttcataaaattgaaatacagatgaaacatcagtctaccagctttgggctgatgctgacatcatacatagcttcttgctggaaccatgatggggaccctgtggagctcttgaagttgggaaatcagttagctaaattcagacagtgcctgcaggaaaatccaaaatttttgcaagaaaaagtaaaacagtattttaagaataaccagcataagctgactttatcgatgaggccagatgacaagtatcacgagaagcaggcacaggtggaagccacgaagctcaagcagaaggtcgaggctctgtcccccggagacaggcagcagatctacgagaaaggtctagaattacggagtcaacaaagcaaacctcaagatgcctcttgtctgccagcgttgaaagtttccgatattgaacccaccatacctgtcacagagttggacgtggtcctgacaggtcactgtgaacgctacgcttttcccaggtctcgggttccttgggggaattaaatgtcactcctcacaga

SEQ ID NO: 378718 - DNA, 419 bp, Homo sapiens
ccaggctggagtgcagtgacgcgatctcggctcactgcaagctccacctcccgggttcacaccattctcctgcctcagcctccagagtagctgggactacaggaatttttaaaattttgtaaatctcagcagttctctgttttgatatttatcctgccataactcaaaagtttaaattttatttttaaaaaatgatgtaaaaatgacatggatgtacacagaaccagttacttgagaacactgctttaatgagcttttcagtggaggggctggagtttaaggcgcttcgttctgatctttaaatcaagcatattacgagggcatgatgaacgtgcccggattccagtgcatcatttctggttttgtcttctagatataatggctacacgagggaggcctactttagtgtcggcctccaa

SEQ ID NO: 378719 - DNA, 368 bp, Homo sapiens
gttcttcacgtacggtaattttccattagaacagcatctgaaacaaattcacgaggaagcactgagcaaattccagaaaattgaaccaagcaccgtggtgccagctcagacaccctgggacaagcctgtgagtgccccaccgtgtttgtgtccttcctggtaaatatgttgacatgaggacttggactgggtattgatgatgggatttcagatgctgtcatgtttggtacagagtatgggagagcttttcaagctgaaagaatggtaatttgtttgaaaggaaagttaacttagtggaaagcctgtttcgctccatttcgtgtatccagataacctagagtagttgacaaccgtcagacactgtgcct

SEQ ID NO: 378720 - DNA, 418 bp, Homo sapiens
tgcatcaaaccttttaattatggccctgaatattcctttttcttgtttcttttttaggtctagaattacggagtcaacaaagcaaacctcaagatgcctcttgtctgccagcgttgaaagtttccgatattgaacccaccatacctgtcacagagttggacgtggtcctgacaggtcactgtgaacgctacgcttttcccaggtctcgggttccttgggggaattaaatgtcactcctcacagaagcagtagagtcatgtcttggaggttttccctgaaacacttgagcagccctgtgcgttcatagtctcgctctacacgattcttctgccttgttcttaactctcggtggtgatagactccttcactcagtaagagcccgtgtgtgtgtgtgttcctgagaggggtttgatagggc

SEQ ID NO: 378721 - DNA, 3837 bp, Homo sapiens
tgcgtcgggttaagaggggttcctcgccagccaggtgctcgtcatgcgcaatgtggcgctgcggcgggcggcagggcctgtgtgtgctgaggcggctgagcggcggacatgcacaccacagagcgtggcgatggaacagtaaccgggcttgtgagagggctctgcagtataaactaggagacaagatccatggattcaccgtaaaccaggtgacatctgttcccgagctgttcctgactgcagtgaagctcacccatgatgacacaggagccaggtatttacacctggccagagaagacacgaataatctgttcagcgtgcagttccgtaccactcccatggacagtactggtgttcctcacattcttgagcataccgtcctttgtgggtctcagaaatatccgtgcagagaccctttcttcaaaatgttgaaccggtccctctccacgttcatgaacgccttcacagctagtgattatactctgtatccattttccacacaaaatcccaaggactttcagaatctcctctcggtgtatttggatgccacctttttcccatgtttacgcgagctggatttctggcaggaaggatggcggctggaacatgagaatccgagcgacccccagacgcccttggtctttaaaggagtcgtctttaatgagatgaagggagcgtttacagacaatgagaggatattctcccagcaccttcagaacagacttcttcccgaccacacgtactcagtggtctccgggggtgacccactgtgcatcccggagcttacatgggagcagcttaagcagtttcatgccactcactatcacccaagcaatgctaggttcttcacgtacggtaattttccattagaacagcatctgaaacaaattcacgaggaagcactgagcaaattccagaaaattgaaccaagcaccgtggtgccagctcagacaccctgggacaagcctagggaattccagataacatgtggcccggattcatttgctacagatccctctaaacaaacaaccgtcagcgttagcttcctcttaccggacatcaccgacacatttgaagccttcacattaagtcttctgtcttcactcttgacttctgggcccaattctcccttttacaaagccttgattgaatctggccttggcacagacttttctcctgatgttggatataatggctacacgagggaggcctactttagtgtcggcctccaagggattgtggagaaagacattgagaccgtcagaagcctcatagacagaacgattgatgaagtagttgagaaaggatttgaagatgatcgaattgaggctttacttcataaaattgaaatacagatgaaacatcagtctaccagctttgggctgatgctgacatcagtaagtgatctctcaacaattttgtttttgttttataatagacattttgtcttgttactagcttaactggcattttgatatttttatgtgaaatagattactttaaatgggtaagggtttataactagtaatctgttggttatttcctaaacattatttcagcctgtgctttttattttattggaacaaaacagggctaaagtaagtttttttgtttctccatccaaagaattacatgacttttgttataaacaatcatctgtggtatatttaaatacagaaactaggattttagtatcaagtctgggctgttggtggaggttgtactgtggtaccagctgcattgtggatgtggaaatcttccttccagtacatagcttcttgctggaaccatgatggggaccctgtggagctcttgaagttgggaaatcagttagctaaattcagacagtgcctgcaggaaaatccaaaatttttgcaagaaaaagtaaaacagtattttaagaataaccagcataagctgactttatcgatgaggccagatgacaagtatcacgagaagcaggcacaggtggaagccacgaagctcaagcagaaggtcgaggctctgtcccccggagacaggcagcagatctacgagaaaggtctagaattacggagtcaacaaagcaaacctcaagatgcctcttgtctgccagcgttgaaagtttccgatattgaacccaccatacctgtcacagagttggacgtggtcctgacagctggagatatccctgttcagtactgcgcccagcccaccaatggcatggtgtatttccgggccttctccagcctgaacacactccccgaggagctgaggccctatgtgcccctcttctgcagcgtcctcaccaagctgggctgcggccttcttgactaccgggagcaggctcagcagatagaattgaagaccggagggatgagtgcttctccccacgtgctccccgacgactcacacatggacacctacgagcagggtgtgcttttctcctctctctgcctggatcgaaacctgccagacatgatgcagctatggagtgaaatatttaacaacccgtgctttgaagaagaggagcacttcaaggtgctggtgaagatgaccgcccaggagctcgccaatggaattcctgactctgggcacctgtacgcatccatcagggcaggccggaccctcacgcccgcaggggacctgcaggagaccttcagcgggatggatcaggtgcggctgatgaagaggattgcagaaatgacagatatcaaacccatcctgaggaagctcccacgtatcaagaaacacttgttaaatggtgataatatgaggtgttcagtgaatgcgactcctcagcagatgcctcagacagaaaaagcggtcgaagacttccttagaagcatcggtcggagtaaaaaggaacggaggcctgtgcgcccacacacggtcgagaaacctgtgcccagcagctctggtggagatgcccacgttccccatggctcccaggtcattaggaagctggtcatggaacccaccttcaagccctggcagatgaagactcacttcctgatgcccttcccggtgaattacgtgggtgaatgcatccgaactgtcccctacacggacccagatcatgccagtcttaaaatccttgcacgtttgatgactgccaaattcttgcatacagaaattcgagaaaaaggcggtgcttatggtggaggcgcaaaactcagccacaatgggattttcaccctttactcttacagggacccaaatacaatagagacgctccagtcttttgggaaggctgtcgactgggctaagtctggaaaattcacacagcaagacatcgacgaagccaaactttctgtcttctcaaccgtagatgctcctgtcgctccttcagacaaaggaatggaccacttcttgtacggcctctcggatgagatgaagcaggcccacagagagcagctctttgctgtcagccacgacaagctcctggccgtgagcgataggtacctcggcactgggaagagcacacacggcctggccatcctcggacccgagaacccgaaaattgccaaggacccatcctggatcatccgatgagcagccgtggcgctcgactgcacaggagcccgagacaatacacctccgagctgaatatgaaaagtcagaaatgctactgctttttccaagaatattatgtcattgagtgtcgccaaagcccttgactggcgagtcaaaaactcagatctatcttaagagtgaccaggaagaggttcattgaaataatcatgcatgaagcgccaaagatgcaccatgtagaattttcactttgtactggcaggctcgttttacctcattctagaatatttaagaatctaaaaataaagggcaactctgacttaa

SEQ ID NO: 378722 - DNA, 3697 bp, Homo sapiens
tgcgtcgggttaagaggggttcctcgccagccaggtgctcgtcatgcgcaatgtggcgctgcggcgggcggcagggcctgtgtgtgctgaggcggctgagcggcggacatgcacaccacagagcgtggcgatggaacagtaaccgggcttgtgagagggctctgcagtataaactaggagacaagatccatggattcaccgtaaaccaggtgacatctgttcccgagctgttcctgactgcagtgaagctcacccatgatgacacaggagccaggtatttacacctggccagagaagacacgaataatctgttcagcgtgcagttccgtaccactcccatggacagtactggtgttcctcacattcttgagcataccgtcctttgtgggtctcagaaatatccgtgcagagaccctttcttcaaaatgttgaaccggtccctctccacgttcatgaacgccttcacagctagtgattatactctgtatccattttccacacaaaatcccaaggactttcagaatctcctctcggtgtatttggatgccacctttttcccatgtttacgcgagctggatttctggcaggaaggatggcggctggaacatgagaatccgagcgacccccagacgcccttggtctttaaaggagtcgtctttaatgagatgaagggagcgtttacagacaatgagaggatattctcccagcaccttcagaacagacttcttcccgaccacacgtactcagtggtctccgggggtgacccactgtgcatcccggagcttacatgggagcagcttaagcagtttcatgccactcactatcacccaagcaatgctaggttcttcacgtacggtaattttccattagaacagcatctgaaacaaattcacgaggaagcactgagcaaattccagaaaattgaaccaagcaccgtggtgccagctcagacaccctgggacaagcctagggaattccagataacatgtggcccggattcatttgctacagatccctctaaacaaacaaccgtcagcgttagcttcctcttaccggacatcaccgacacatttgaagccttcacattaagtcttctgtcttcactcttgacttctgggcccaattctcccttttacaaagccttgattgaatctggccttggcacagacttttctcctgatgttggatataatggctacacgagggaggcctactttagtgtcggcctccaagggattgtggagaaagacattgagaccgtcagaagcctcatagacagaacgattgatgaagtagttgagaaaggatttgaagatgatcgaattgaggctttacttcataaaattgaaatacagatgaaacatcagtctaccagctttgggctgatgctgacatcatacatagcttcttgctggaaccatgatggggaccctgtggagctcttgaagttgggaaatcagttagctaaattcagacagtgcctgcaggaaaatccaaaatttttgcaagaaaaagtaaaacagtattttaagaataaccagcataagctgactttatcgatgaggccagatgacaagtatcacgagaagcaggcacaggtggaagccacgaagctcaagcagaaggtcgaggctctgtcccccggagacaggcagcagatctacgagaaaggtctagaattacggagtcaacaaagcaaacctcaagatgcctcttgtctgccagcgttgaaagtttccgatattgaacccaccatacctgtcacagagttggacgtggtcctgacagctggagatatccctgttcagtactgcgcccagcccaccaatggcatggtgtatttccgggccttctccagcctgaacacactccccgaggagctgaggccctatgtgcccctcttctgcagcgtcctcaccaagctgggctgcggccttcttgactaccgggagcaggctcagcagatagaattgaagaccggagggatgagtgcttctccccacgtgctccccgacgactcacacatggacacctacgagcagggtgtgcttttctcctctctctgcctggatcgaaacctgccagacatgatgcagctatggagtgaaatatttaacaacccgtgctttgaagaagaggagcacttcaaggtgctggtgaagatgaccgcccaggagctcgccaatggaattcctgactctgggcacctgtacgcatccatcagggcaggccggaccctcacgcccgcaggggacctgcaggagaccttcagcgggatggatcaggtgcggctgatgaagaggattgcagaaatgacagatatcaaacccatcctgaggaagctcccacgtatcaagaaacacttgttaaatggtgataatatgaggtgttcagtgaatgcgactcctcagcagatgcctcagacagaaaaagcggtcgaagacttccttagaagcatcggtcggagtaaaaaggaacggaggcctgtgcgcccacacacggtcgagaaacctgtgcccagcagctctggtggagatgcccacgttccccatggctcccaggtcattaggaagctggtcatgttttacagtgagaaattgtgtggagtgacggaactgcagtgccttgctctcgcgccccagcacctggctgcagagtgtcacggagatgggacccctgagatggctccagtcccagtgccgtgggcagtgcgtgggagcacagccgcctctgacccctgagtgggtccagtcccagtgccgtgggcggtgcatggcagcacagccgcctctgaccataccgtgtccctcaggaacccaccttcaagccctggcagatgaagactcacttcctgatgcccttcccggtgaattacgtgggtgaatgcatccgaactgtcccctacacggacccagatcatgccagtcttaaaatccttgcacgtttgatgactgccaaattcttgcatacagaaattcgagaaaaaggcggtgcttatggtggaggcgcaaaactcagccacaatgggattttcaccctttactcttacagggacccaaatacaatagagacgctccagtcttttgggaaggctgtcgactgggctaagtctggaaaattcacacagcaagacatcgacgaagccaaactttctgtcttctcaaccgtagatgctcctgtcgctccttcagacaaaggaatggaccacttcttgtacggcctctcggatgagatgaagcaggcccacagagagcagctctttgctgtcagccacgacaagctcctggccgtgagcgataggtacctcggcactgggaagagcacacacggcctggccatcctcggacccgagaacccgaaaattgccaaggacccatcctggatcatccgatgagcagccgtggcgctcgactgcacaggagcccgagacaatacacctccgagctgaatatgaaaagtcagaaatgctactgctttttccaagaatattatgtcattgagtgtcgccaaagcccttgactggcgagtcaaaaactcagatctatcttaagagtgaccaggaagaggttcattgaaataatcatgcatgaagcgccaaagatgcaccatgtagaattttcactttgtactggcaggctcgttttacctcattctagaatatttaagaatctaaaaataaagggcaactctgacttaa

SEQ ID NO: 378723 - DNA, 4034 bp, Homo sapiens
tgcgtcgggttaagaggggttcctcgccagccaggtgctcgtcatgcgcaatgtggcgctgcggcgggcggcagggcctgtgtgtgctgaggcggctgagcggcggacatgcacaccacagagcgtggcgatggaacagtaaccgggcttgtgagagggctctgcagtataaactaggagacaagatccatggattcaccgtaaaccaggtgacatctgttcccgagctgttcctgactgcagtgaagctcacccatgatgacacaggagccaggtatttacacctggccagagaagacacgaataatctgttcagcgtgcagttccgtaccactcccatggacagtactggtgttcctcacattcttgagcataccgtcctttgtgggtctcagaaatatccgtgcagagaccctttcttcaaaatgttgaaccggtccctctccacgttcatgaacgccttcacagctagtgattatactctgtatccattttccacacaaaatcccaaggactttcagaatctcctctcggtgtatttggatgccacctttttcccatgtttacgcgagctggatttctggcaggaaggatggcggctggaacatgagaatccgagcgacccccagacgcccttggtctttaaaggagtcgtctttaatgagatgaagggagcgtttacagacaatgagaggatattctcccagcaccttcagaacagacttcttcccgaccacacgtactcagtggtctccgggggtgacccactgtgcatcccggagcttacatgggagcagcttaagcagtttcatgccactcactatcacccaagcaatgctaggttcttcacgtacggtaattttccattagaacagcatctgaaacaaattcacgaggaagcactgagcaaattccagaaaattgaaccaagcaccgtggtgccagctcagacaccctgggacaagcctagggaattccagataacatgtggcccggattcatttgctacagatccctctaaacaaacaaccgtcagcgttagcttcctcttaccggacatcaccgacacatttgaagccttcacattaagtcttctgtcttcactcttgacttctgggcccaattctcccttttacaaagccttgattgaatctggccttggcacagacttttctcctgatgttggatataatggctacacgagggaggcctactttagtgtcggcctccaagggattgtggagaaagacattgagaccgtcagaagcctcatagacagaacgattgatgaagtagttgagaaaggatttgaagatgatcgaattgaggctttacttcataaaattgaaatacagatgaaacatcagtctaccagctttgggctgatgctgacatcatacatagcttcttgctggaaccatgatggggaccctgtggagctcttgaagttgggaaatcagttagctaaattcagacagtgcctgcaggaaaatccaaaatttttgcaagaaaaagtaaaacagtattttaagaataaccagcataagctgactttatcgatgaggccagatgacaagtatcacgagaagcaggcacaggtggaagccacgaagctcaagcagaaggtcgaggctctgtcccccggagacaggcagcagatctacgagaaaggtctagaattacggagtcaacaaagcaaacctcaagatgcctcttgtctgccagcgttgaaagtttccgatattgaacccaccatacctgtcacagagttggacgtggtcctgacagctggagatatccctgttcagtactgcgcccagcccaccaatggcatggtgtatttccgggccttctccagcctgaacacactccccgaggagctgaggccctatgtgcccctcttctgcagcgtcctcaccaagctgggctgcggccttcttgactaccgggagcaggctcagcagatagaattgaagaccggagggatgagtgcttctccccacgtgctccccgacgactcacacatggacacctacgagcagggtgtgcttttctcctctctctgcctggatcgaaacctgccagacatgatgcagctatggagtgaaatatttaacaacccgtgctttgaagaagaggagcacttcaaggtgctggtgaagatgaccgcccaggagctcgccaatggaattcctgactctgggcacctgtacgcatccatcagggcaggccggaccctcacgcccgcaggggacctgcaggagaccttcagcgggatggatcaggtgcggctgatgaagaggattgcagaaatgacagatatcaaacccatcctgaggaagctcccacgtatcaagaaacacttgttaaatggtgataatatgaggtgttcagtgaatgcgactcctcagcagatgcctcagacagaaaaagcggtcgaagacttccttagaagcatcggtcggagtaaaaaggaacggaggcctgtgcgcccacacacggtcgagaaacctgtgcccagcagctctggtggagatgcccacgttccccatggctcccaggtcattaggaagctggtcatggaacccaccttcaagccctggcagatgaagactcacttcctgatgcccttcccggtgaattacgtgggtgaatgcatccgaactgtcccctacacggacccagatcatgccagtcttaaaatccttgcacgtttgatgactgccaaattcttgcatacagaaattcgagaaaaaggcggtgcttatggtggaggcgcaaaactcagccacaatgggattttcaccctttactcttacagggacccaaatacaatagagacgctccagtcttttgggaaggctgtcgactgggctaagtctggaaaattcacacagcaagacatcgacgaagccaaactttctgtcttctcaaccgtagatgctcctgtcgctccttcagacaaaggtattttgagtataacagtgagaatctcaacccacagcctcacagatgacgttgctgttttccaagttcccggcatgcatgggcaggagcaccagcttctggtgcctccatccttgcttgtgatacgatttccacgtctgacaccctaaacacgcttcctgacatccgggcgagaagagtgcatcctgtcatttgttttactgacctgagacccagtggggccaacccatggcagtgtccgggctctttagggtggaaggaggacgtgggcacggcccgggcatggccacgttactctctggagccgcttttgctcacagcatcatcagcctcacgcggcgctgactgcatccctgctgcagaagcaggcgtgggtaggggtcagcgtggcacgtgggagctggaggtcggggtgtgatctctgggttgttagacacatccctgtggttgaaacatgcacgtgaaatgacagtgagatgcctgttgtcccctccgggacatgagtgcacagcccacaacgcgagctcccgggcagcggctccatcgtgcctgtggattgtcttctaggaatggaccacttcttgtacggcctctcggatgagatgaagcaggcccacagagagcagctctttgctgtcagccacgacaagctcctggccgtgagcgataggtacctcggcactgggaagagcacacacggcctggccatcctcggacccgagaacccgaaaattgccaaggacccatcctggatcatccgatgagcagccgtggcgctcgactgcacaggagcccgagacaatacacctccgagctgaatatgaaaagtcagaaatgctactgctttttccaagaatattatgtcattgagtgtcgccaaagcccttgactggcgagtcaaaaactcagatctatcttaagagtgaccaggaagaggttcattgaaataatcatgcatgaagcgccaaagatgcaccatgtagaattttcactttgtactggcaggctcgttttacctcattctagaatatttaagaatctaaaaataaagggcaactctgacttaa

SEQ ID NO: 378724 - DNA, 4144 bp, Homo sapiens
tgcgtcgggttaagaggggttcctcgccagccaggtgctcgtcatgcgcaatgtggcgctgcggcgggcggcagggcctgtgtgtgctgaggcggctgagcggcggacatgcacaccacagagcgtggcgatggaacagtaaccgggcttgtgagagggctctgcagtataaactaggagacaagatccatggattcaccgtaaaccaggtgacatctgttcccgagctgttcctgactgcagtgaagctcacccatgatgacacaggagccaggtatttacacctggccagagaagacacgaataatctgttcagcgtgcagttccgtaccactcccatggacagtactggtgttcctcacattcttgagcataccgtcctttgtgggtctcagaaatatccgtgcagagaccctttcttcaaaatgttgaaccggtccctctccacgttcatgaacgccttcacagctagtgattatactctgtatccattttccacacaaaatcccaaggactttcagaatctcctctcggtgtatttggatgccacctttttcccatgtttacgcgagctggatttctggcaggaaggatggcggctggaacatgagaatccgagcgacccccagacgcccttggtctttaaaggagtcgtctttaatgagatgaagggagcgtttacagacaatgagaggatattctcccagcaccttcagaacagacttcttcccgaccacacgtactcagtggtctccgggggtgacccactgtgcatcccggagcttacatgggagcagcttaagcagtttcatgccactcactatcacccaagcaatgctaggttcttcacgtacggtaattttccattagaacagcatctgaaacaaattcacgaggaagcactgagcaaattccagaaaattgaaccaagcaccgtggtgccagctcagacaccctgggacaagcctagggaattccagataacatgtggcccggattcatttgctacagatccctctaaacaaacaaccgtcagcgttagcttcctcttaccggacatcaccgacacatttgaagccttcacattaagtcttctgtcttcactcttgacttctgggcccaattctcccttttacaaagccttgattgaatctggccttggcacagacttttctcctgatgttggatataatggctacacgagggaggcctactttagtgtcggcctccaagggattgtggagaaagacattgagaccgtcagaagcctcatagacagaacgattgatgaagtagttgagaaaggatttgaagatgatcgaattgaggctttacttcataaaattgaaatacagatgaaacatcagtctaccagctttgggctgatgctgacatcatacatagcttcttgctggaaccatgatggggaccctgtggagctcttgaagttgggaaatcagttagctaaattcagacagtgcctgcaggaaaatccaaaatttttgcaagaaaaagtaaaacagtattttaagaataaccagcataagctgactttatcgatgaggccagatgacaagtatcacgagaagcaggcacaggtggaagccacgaagctcaagcagaaggtcgaggctctgtcccccggagacaggcagcagatctacgagaaaggtctagaattacggagtcaacaaagcaaacctcaagatgcctcttgtctgccagcgttgaaagtttccgatattgaacccaccatacctgtcacagagttggacgtggtcctgacagctggagatatccctgttcagtactgcgcccagcccaccaatggcatggtgtatttccgggccttctccagcctgaacacactccccgaggagctgaggccctatgtgcccctcttctgcagcgtcctcaccaagctgggctgcggccttcttgactaccgggagcaggctcagcagatagaattgaagaccggagggatgagtgcttctccccacgtgctccccgacgactcacacatggacacctacgagcagggtgtgcttttctcctctctctgcctggatcgaaacctgccagacatgatgcagctatggagtgaaatatttaacaacccgtgctttgaagaagaggagcacttcaaggtgctggtgaagatgaccgcccaggagctcgccaatggaattcctgactctgggcacctgtacgcatccatcagggcaggccggaccctcacgcccgcaggggacctgcaggagaccttcagcgggatggatcaggtgcggctgatgaagaggattgcagaaatgacagatatcaaacccatcctgaggaagctcccacgtatcaagaaacacttgttaaatggtgataatatgaggtgttcagtgaatgcgactcctcagcagatgcctcagacagaaaaagcggtcgaagacttccttagaagcatcggtcggagtaaaaaggaacggaggcctgtgcgcccacacacggtcgagaaacctgtgcccagcagctctggtggagatgcccacgttccccatggctcccaggtcattaggaagctggtcatggaacccaccttcaagccctggcagatgaagactcacttcctgatgcccttcccggtgaattacgtgggtgaatgcatccgaactgtcccctacacggacccagatcatgccagtcttaaaatccttgcacgtttgatgactgccaaattcttgcatacagaaattcgagaaaaaggcggtgcttatggtggaggcgcaaaactcagccacaatgggattttcaccctttactcttacagggacccaaatacaatagagacgctccagtcttttgggaaggctgtcgactgggctaagtctggaaaattcacacagcaagacatcgacgaagccaaactttctgtcttctcaaccgtagatgctcctgtcgctccttcagacaaaggtattttgagtataacagtgagaatctcaacccacagcctcacagatgacgttgctgttttccaagttcccggcatgcatgggcaggagcaccagcttctggtgcctccatccttgcttgtgatacgatttccacgtctgacaccctaaacacgcttcctgacatccgggcgagaagagtgcatcctgtcatttgttttactgacctgagacccagtggggccaacccatggcagtgtccgggctctttagggtggaaggaggacgtgggcacggcccgggcatggccacgttactctctggagccgcttttgctcacagcatcatcagcctcacgcggcgctgactgcatccctgctgcagaagcaggcgtgggtaggggtcagcgtggcacgtgggagctggaggtcggggtgtgatctctgggttgttagacacatccctgtggttgaaacatgcacgtgaaatgacagtgagatgcctgttgtcccctccgggacatgagtgcacagcccacaacgcgagctcccgggcagcggctccatcgtgcctgtggattgtcttctaggaatggaccacttcttgtacggcctctcggatgagatgaagcaggcccacagagagcagctctttgctgtcagccacgacaagctcctggccgtgagcgataggtgagtggggagcgggggagacagcgtctgggactggaagccctcgtgctgactctaacagcgctcacgcagaagccagtcctcgctgaccacgcctgccttcctctcaggtacctcggcactgggaagagcacacacggcctggccatcctcggacccgagaacccgaaaattgccaaggacccatcctggatcatccgatgagcagccgtggcgctcgactgcacaggagcccgagacaatacacctccgagctgaatatgaaaagtcagaaatgctactgctttttccaagaatattatgtcattgagtgtcgccaaagcccttgactggcgagtcaaaaactcagatctatcttaagagtgaccaggaagaggttcattgaaataatcatgcatgaagcgccaaagatgcaccatgtagaattttcactttgtactggcaggctcgttttacctcattctagaatatttaagaatctaaaaataaagggcaactctgacttaa

SEQ ID NO: 378725 - DNA, 849 bp, Homo sapiens
ggccgcgtgttaatcggccgaggatacgtgggtgaatgcatccgaactgtcccctacacggacccagatcatgccagtcttaaaatccttgcacgtttgatgactgccaaattcttgcatacagaaattcgagaaaaaggcggtgcttatggtggaggcgcaaaactcagccacaatgggattttcaccctttactcttacagggacccaaatacaatagagacgctccagtcttttgggaaggctgtcgactgggctaagtctggaaaattcacacagcaagacatcgacgaagccaaactttctgtcttctcaaccgtagatgctcctgtcgctccttcagacaaaggaatggaccacttcttgtacggcctctcggatgagatgaagcaggcccacagagagcagctctttgctgtcagccacgacaagctcctggccgtgagcgataggtacctcggcactgggaagagcacacacggcctggccatcctcggacccgagaacccgaaaattgccaaggacccatcctggatcatccgatgagcagccgtggcgctcgactgcacaggagcccgagacaatacacctccgagctgaatatgaaaagtcagaaatgctactgctttttccaagaatattatgtcattgagtgtcgccaaagcccttgactggcgagtcaaaaactcagatctatcttaagagtgaccaggaagaggttcattgaaataatcatgcatgaagcgccaaagatgcaccatgtagaattttcactttgtactggcaggctcgttttacctcattctagaatatttaagaatctaaaaataaagggcaactctgacttaa

SEQ ID NO: 378726 - DNA, 2426 bp, Homo sapiens
tgcgtcgggttaagaggggttcctcgccagccaggtgctcgtcatgcgcaatgtggcgctgcggcgggcggcagggcctgtgtgtgctgaggcggctgagcggcggacatgcacaccacagagcgtggcgatggaacagtaaccgggcttgtgagagggctctgcagtataaactaggagacaagatccatggattcaccgtaaaccaggtgacatctgttcccgagctgttcctgactgcagtgaagctcacccatgatgacacaggagccaggtatttacacctggccagagaagacacgaataatctgttcagcgtgcagttccgtaccactcccatggacagtactggtgttcctcacattcttgagcataccgtcctttgtgggtctcagaaatatccgtgcagagaccctttcttcaaaatgttgaaccggtccctctccacgttcatgaacgccttcacagctagtgattatactctgtatccattttccacacaaaatcccaaggactttcagaatctcctctcggtgtatttggatgccacctttttcccatgtttacgcgagctggatttctggcaggaaggatggcggctggaacatgagaatccgagcgacccccagacgcccttggtctttaaaggagtcgtctttaatgagatgaagggagcgtttacagacaatgagaggatattctcccagcaccttcagaacagacttcttcccgaccacacgtactcagtggtctccgggggtgacccactgtgcatcccggagcttacatgggagcagcttaagcagtttcatgccactcactatcacccaagcaatgctaggttcttcacgtacggtaattttccattagaacagcatctgaaacaaattcacgaggaagcactgagcaaattccagaaaattgaaccaagcaccgtggtgccagctcagacaccctgggacaagcctagggaattccagataacatgtggcccggattcatttgctacagatccctctaaacaaacaaccgtcagcgttagcttcctcttaccggacatcaccgacacatttgaagccttcacattaagtcttctgtcttcactcttgacttctgggcccaattctcccttttacaaagccttgattgaatctggccttggcacagacttttctcctgatgttggatataatggctacacgagggaggcctactttagtgtcggcctccaagggattgtggagaaagacattgagaccgtcagaagcctcatagacagaacgattgatgaagtagttgagaaaggatttgaagatgatcgaattgaggctttacttcataaaattgaaatacagatgaaacatcagtctaccagctttgggctgatgctgacatcatacatagcttcttgctggaaccatgatggggaccctgtggagctcttgaagttgggaaatcagttagctaaattcagacagtgcctgcaggaaaatccaaaatttttgcaagaaaaagtaaaacagtattttaagaataaccagcataagctgactttatcgatgaggccagatgacaagtatcacgagaagcaggcacaggtggaagccacgaagctcaagcagaaggtcgaggctctgtcccccggagacaggcagcagatctacgagaaaggtctagaattacggagtcaacaaagcaaacctcaagatgcctcttgtctgccagcgttgaaagtttccgatattgaacccaccatacctgtcacagagttggacgtggtcctgacagctggagatatccctgttcagtactgcgcccagcccaccaatggcatggtgtatttccgggccttctccagcctgaacacactccccgaggagctgaggccctatgtgcccctcttctgcagcgtcctcaccaagctgggctgcggccttcttgactaccgggagcaggctcagcagatagaattgaagaccggagggatgagtgcttctccccacgtgctccccgacgatttaagtgatcccgacgaatttaagtgatcatgatcacttaaattcgtcggtgatcacttaaattcgtcggtatattttgaaggcaccaaagactcccctttagagcatcacctgtacgtagtcagttacgtaaatcctggagaggtgacaaggctgactgaccgtggctactcacattcttgctgcatcagtcaggtattaagtttgtttaaaaagggttttgtgtcatattaaaactctctgcttatgtaatactccttttgaatgatgtgaaattggcctgcaaaagcctaattctctaaggaaaagctttaaaaagcttaatttcaacattgtatatgtacataaatagtctcttataatactcttgctatatcattagtgcagatgtaacagcagatacctttt

SEQ ID NO: 378727 - DNA, 2698 bp, Homo sapiens
ctcccaggcttggtgcaggaaggagagcccttcagcgaggaagctacacttttcaccaaggaactggtgctgcagcgagagctcctgtgtctgttgtctgattcctgcttcatctgctgtttgatttttgtgggccttacttttcccatttgctcatgtatgtctatattcctatatctaatgtttcttaaaagacaaatctgactgtgtaggtgcatttgtttaaaaaatataactccccattgcctctgggataaagtcttatctcagtttacatatattcttgataacctctccaactttatgtctcaccacccccactcacttcgtaattcgtgccttatcagaatggacctgttatactggcagttcaccatatataccattacattttgtttctcccatctctcaggtagacttacactttcggcccagcacatcagtcatcgcccttgcttgctttcctattcactcctgttctggaaggtgcaccaccttttcttggaaggcttcccttgctctcccaggctagatgagatgtccttccatcagttcccacagcaccctgtgcatgtatctgttgtgcacttaccaatagtatacaagggatctatgacccaagtctctccccactagcttgtaagctcctcacagacaggaaccatgttttgtctttgtactccagtgcctagtatataagagatactcaataaataaatatttgtcaaatcaactaattgattccttgtgacctaattctagagaatgggaagaaggcctgttattttgttgtcctttatggttctttaggaaagctctccaagcttggcatttgtcagggtgggaggaaaactgttgaagtattaagactggacacatggctgctaattcatcagcttatcattgaaaaagtccatagccaaaacctgactgtgcacttactataggaccctgacctgcctgggtctccctgtctctccagccagtatatttaaaggtaatgagataatgatgagtgttttgaaaaatgtttagtgttcaaatagaaaccattcgtgtcccttcactctctgaacatagtctgcaaatctctccctctctggtatgtttctgttttgtggattagactgctaaataagcgaagagttaattttgaagttcaggtcaacaaattcctgtttggagacgggctgttcctgaataccaggttgttatctgtctattacagccccttcacttctgggctcctggccctttgcgaagtacttcagaaagcctagagagaagagagggccctcaaatcccattccagcccctaaatgaaagtggcatcacaaggagaaaagtggaggtagaaatgtaccatgggggacgttgccccattgcctttcttcccctgactactgggcttcctctatcagcttttaacgcctggaagtagctgagtctccagtcactggtggccttccccaagtgagctcagcagcatgtgctaataggtgccaatactgtgctggctccagtgggattcctctctgcaaagctgctggcttagcttgactgtttccctattcctctccttagaactttcatagccagtcaagcatagaattgcatccattcttctgaaataggtactgtgcctaatttttcattggcttggccaagattctgttacctgtaattatgtcatatgggctgactggtgtaggtttggtaggcctcactgctctccagaggctagtgttcctatcccaggatggctgttgggattaggagtggaatgaggaatagtttaggaccacaagagatttggcctccttggaacatgtaggaaggcctcaaggatgtaattctagcccagggaagaaaatccttttcagcagacgcttcccttcccttcccctagggaatgtgtccctactatagtaaactcttccttaagagagttttatgttttctctgtcagatcaatttgtttttcttaatgttgttcctatcaaaaaaaaaaaaaggaagaaatacagtcctcagacctgacagtttcatttttccccccaagtagaagcaatagaaaccttagcagttccaagactcctggcactcacttttcctctccatctttaggtctaacccagctcagcccagagtaaagacataaaagcctcacatgtgatttcctcttgcattttttctgctagaagggtccacagtacttactttatgcctcatctcaattgaagctggatgatgaggatagtgggcagtgattgcaattggggaatgcatgtactggatcacataaggtcatgaaagtccttgaaacagagccttgccaagcagaacccttgccactcatggtattcgatacagtctacccatctgacatgaaatgatattcttaatgagccattcctatggaagatagctattgccaggcacattcagtctcctggtctccctctcatagctatgtagggcctatgacctagaataaatggaaaaatgttatcaggaggaagagactgctggactcccctgagaggtagggtttgtgctaggagagctgggtgccatttatttcattttgatatatcaggtgctcctagtaacaattcctagtttctcttacctctgtaatcatcctgaatagtcactgcttcttgagctttggtgagtgttctctaaaaaaaaaaaa

SEQ ID NO: 378728 - DNA, 765 bp, Homo sapiens
aataagtttcagcgcataggccgtcatgtgcaattttggtgaagaattctctccaaggtcgtcttacatgaatgctaaatggtagagcaaggacaacggaggtgacatgaatagttctggcatctgagggcctagcctgttgccccagcagagaggggagcaaggacacctgtcctctgtggaggttctatgagagcccatgttccaggacagtcacaaacttgtttccaaccagaattcgcaagcagtgtcagtcctgagagagcaggaagcttgatcccctctttggtaggtgctggacttagtaagtcagcttcagcaggcccttgggattcccccggccagtaatcttttatcctgtacaagagccatctggatgtagcaaactgcagttcactcttttgcagggtaagggctcagctggctcagtgggacacaggctttagatgttcatgatcccctaatcgtgtcctcacgtacatgagctttctctctttccactcagatccagggtacatgactatgtgaatgtaagatatgcctctggtatgaaggagaccttggcacaaacgtgtggtccatcttgtggttctagacagtgtttcccaaacttcagtcattatcatgccaccattatatgattgtttccatgtccacaaattgtgcctgtcagcatttatttacttacttattttatttttttgaaatgtagtctcactccagcctgggcgacagagtggggtccgtctcaaaaaaaaaaaaaaa

SEQ ID NO: 378729 - DNA, 1071 bp, Homo sapiens
aataagtttcagcgcataggccgtcatgtgcaattttggtgaagaattctctccaaggtcgtcttacatgaatgctaaatggtagagcaaggacaacggaggtgacatgaatagttctggcatctgagggcctagcctgttgccccagcagagaggggagcaaggacacctgtcctctgtggaggttctatgagagcccatgttccaggacagtcacaaacttgtttccaaccagaattcgcaagcagtgtcagtcctgagagagcaggaagcttgatcccctctttggtaggtgctggacttagtaagtcagcttcagcaggcccttgggattcccccggccagtaatcttttatcctgtacaagagccatctggatgtagcaaactgcagttcactcttttgcagggtaagggctcagctggctcagtgggacacaggctttagatgttcatgatcccctaatcgtgtcctcacgtacatgagctttctctctttccactcagatccagggtacatgactatgtgaatgtaagatatgcctctggtatgaaggagaccttggcacaaacgtgtggtccatcttgtggttctagacagtgtttcccaaacttcagtcattatcatgccaccattatatgattgtttccatgtccacaaattgtgcctgtcagcatttatttacttacttattttatttttttgaaatgtagtctcaccctgggtgataagagacagactctgtctcaatttaaaaaaaaaaaaaaaaagcagcttaaaaaattactaaagaaggtcgggcacagtggctcatgcctgtaatcccagtactttgggagactgaggcgggtggatcacgaggtaggtcaggagttcaagaccagcctggccaagatggtgaaaccccatctctactaaaaatacaaaaattaaaaaaaaaaaaaaattagccaggcgtgatggcacatgcctgtaatcccagctactcaggaggttgaggcaggagaatcacttgagcccaggaggcagaggttgcagtgagccgagatcgtgccattgcactccaacctgg

SEQ ID NO: 378730 - DNA, 327 bp, Homo sapiens
gcaaacacaacctggaggccccgccctgagaggagggactgcatttcaacctcaggcatgctcacccagtgattcaaagtggaagaatgttctgtatttcaaactggtgggaggggtggtggcagcagtcacatggctgtatacatttattaaaactcatcaaattgtacacctgaaatctctgcatttcactatatgtaaagtctagctcaatttttaaggaatagcaaaatgtgatagcacatattcagtaagtgaagttaatggacaggaactactttatgatgaaacttcgacaaacatgttgatcaataaagatgcccctgc

SEQ ID NO: 378731 - DNA, 458 bp, Homo sapiens
cgaaaccctgtctctactaaaaatacaaaaaaaaattagccgggcatggtggcacatgcctgtaatcccagctactcaggaggttgagtcaaaagaatcgcttcaacccaggaggcagaggttgcagtgagctgagatcgtgccactgcactccaatctgggcgacagagtgtgactccatctcaaaaaaaaaaaaaaaaaaaaactttactaccaataacatagccaattaacaataacatagccaattaatacatgttttgtaaatgtattatatactgcataatatataccttaccaataacatagccaattaacacgttttgtaaatgtattatatacatttacaaataaccttaccaataacatagccaattaacacgttaccttaccaataacatagccttaccaataacatagccagttaacacatgttttttaatgtattataaactgca

SEQ ID NO: 378732 - DNA, 292 bp, Homo sapiens
aggtatcagttggtcagaattaggtgcacaggggccatttccttttttgcttcctcttgcttgtgggggatgaaatttctctcaacagtatttgattgctcaatatcacaatagtggaagtctttcgtgacccttgtggtgagtgatggggcagtggcgggagttttcccacctccagagtgacattcgagacccctccccggctgactcctgcaaccacggtcaccactgtttacaaagaccctgcccagccttcctgggtgcagggtcccattgttcctcctgcctgcag

SEQ ID NO: 378733 - DNA, 446 bp, Homo sapiens
gattctagaactcaagtctcctaaatccttgataacactgtgaggcaaaatttgcctagaattatttttaaaaatttatgcttgcacatttaaagacataggttaccctacagagtcttttttttttttcaccaaaggggcatgttcagtgtatttctccactttaaaattcctttatatatgcaaaataaatttagagagagatttaaaagcaattctaaggataaaacatttagaattctttgaaaaataaaataatcattccgtgagttttttttggtagttcaggcatgtaagtttaaagacttaggacaccatttaaaagacaaaaatttttctttaaccatcttcaagtttaagtctgtggaacggacaatattgcagtgagctgagatcatgccactgcactccagcctgggtgacagagcgacactccatcttaaact

SEQ ID NO: 378734 - DNA, 667 bp, Homo sapiens
taaaataaaatgctagctcttgccctaggcttgaaccataaataagtggtgggaagtttatagtcacaaataggtggtgggtattagaaagcaggataaactatcctctcacccttccaagaaactgacagtttcagtttattcctcttgatgaagtaatgctaaatttttgtagtgatgttttggtatattttattacttgtaattaatattactgttcaaaatttagggggaatctgtcatcttcctgaaacttcagaatcacctggagtaagggtcatttgtattcatggtcactgaccacgtggggtagaaactgcaagtcatggttccttcaggcaaagttaatagtggtgacatggaggcatcatgatagagcagcagactccagaagccaatttgactttgtgatttctgaaaaaattacctgtcaactgtgagcctgtttcatcatctgtaaagtttgaataatgatacctaccctgcctgatagaagattcttatgagggaacatgatacgtgaccagtaaatgttaatgctttccttatacgtgaaatgacataaaatcttggaatattaatagatgggaagaagatgtgtaataaaactgtctataaacacaattctgacaaatttcagaactgggattccatagggctttattca

SEQ ID NO: 378735 - DNA, 1229 bp, Homo sapiens
gacatataggaactggccgatgccgatgcctcttttgcagtgtgtgagaggctgaaacagaagttctacagaagtaggttagctgtaaggagctgaggattgaggagtcatatctgggggatattcctgccaccctcaagtccagggactttctgcactcaaaaaacttacgctcatgacaatgactgcctcattcaagaaaacccaagctgactggcaagaagccagcagcctgggtacttgttgctgcagcttagtaagtagcagaagagctcatcctcctcctctggaagaagccacttaacaggttctcatcctgactcctaaattccttaacagtcctttactcaggaataaaacaagtccaagaaaacttatctgtcccacaaatagtcctggaggcagtggagtaagatagggagagcaaattggtgtctgctcttgagtatcttgagggaatgggtatctagaggcagcaggatgaactggctttgatagcagagactttaaaatgtgtggaccattagttgtctttggatgtgctccctagaggctgcgcctgacacagggagctgtgtatacatgatttattaaaaggaaatcctcttaggagaaacatattagcaggataaacacaagaaagaatgcagttacaagtggagtctcaatcaatcccagaggaaattctgggacttcagcctcagcttgacctatgggggggctctggaatgtcagatttctcctgatcccaactgtgctctggggcttccattgcagccaagagagagcattccccagaaaactccaggtgaggagtctccagtggcccaagggtgatcctccagaggaggttacactgccgaactgggacattggcaccctggatttgaatatctagagagggcacccaatggtcatactaatgtttgccataacagtctcttctaggtctagacttgaagcatatggaagggtccttgggctagagccaacccaagcccaggctgactcccttttaatacttctaattttccctgaagatctggtcttctccctaccaccactaccctattacataagaggaaaggattggagaatgttcttgaaaagaatgtgatgctttcccatacaaggaatatactcaaggaaaaatttcatggcacaaaatgctgattctgtccaatttatcccatgaataaattgtgtacacatatatatatgaaaaattt

SEQ ID NO: 378736 - DNA, 3377 bp, Homo sapiens
gcgtctcttttctgttgtggcttttaagtgcccctgcagcactgagaatatgacctatgggctggttttcctctttgctcctgcctgggtgttactgatcctgggattctttctgaacaataggtcgtggagactcttcacaggctgctgtgtgaatcccaggaaaatctttcccagaggccacagctgccgtttcttctacgtcctcggccagatcactctgagctcattggtggctccagtgatgtggctttctgtggctctgctcaatggaactttctatgaatgtgccatgagcgggacgagaagttcaggactcctggaactgatttgcaagggtaagcccaaagagtgctgggaagaacttcacaaagtatcttgtggcaaaactagcatgctacctaccgtcaatgaagaactgaaactctcccttcaggcccagtctcagattctaggatggtgcctgatttgttcagcgtctttcttctctctgctcaccacatgttatgctcgctgccgatctaaagttagctaccttcagctgagtttttggaagacatatgcacaaaaggagaaggagcagttggaaaatacatttctggactatgccaacaagctgagcgagaggaacctgaaatgtttttttgaaaacaagaggccagatccttttcccatgcctacgtttgctgcctgggaggctgcttcagagctgcattctttccaccaaagccagcaacactatagcaccctccacagagtggtggacaatggtctgcaacttagccctgaggatgatgagacgacaatggtccttgtgggtactgcccacaatatgtagctcatccaccatcaatgactcatggtgttgagtggcatgctcattctgtgatcctcctaacgtatcaccagcaacctgtgtgtctctgtattttcttacatttggagtatgtttacaagacaataacacaaaggaaactgctttgaagctctcaagtggaacatcaggatgtgctcaaattgatgctgaggggtgacaaaggtgctcttgcattggtggagaggggctcagtaggcctaaatgttgctccaagatctaagattttatcattcaacagacagactcatgtgagagggctcatcagtctctgtaaatattggttgcagaatttaggggcagaagcaatggcttgtgagtgagcaagttactcttaacataggttgccctacacagtggctcctgcagtgtgatcagcaggagtctctgtcctacaaatctacacttttaaggatgtatgaaattgtggaattcattccctcaggatctgaagatctcagttctcaaaaatcacaagttgcaagaatatgatacctaaaattgaaagtttttcacatgttttcactgtatactgaaaatactcccctggaagcagggctgcatcataatttttgtgggctttatgtacttttgcctttgcgaaccatttcctacattcaaaatagtagtaacaaatatatatatatatatacacacacacacacagaaatatatatttataactgcattgataaaaggtgaatatattagcattttcttcaacctaaaagtttatgtattttcttctgattttaaaagaaattaaaaacattttagtgggcccttacaagtattatggtccttaggcacagtgcttactaggccgtgggtatgtcttagtgcgtttgggctactataacaaaatatcatagataggtggcttatacaaaatagaaatttatttctcacagttctggaggctgggaagtccgaggtcaggctgccagcatgctcaggttctggtgagagcaattttccaggttgcaaactgcttgctgacttctcagtgtccttccatggtggaaagtgcaaataagctcccttgagcatttttataaggcactaatcccattcctggaggctccaccttcatgacccaattacttctcaaggctctgcttcttagtactatcagcttgggggttaagatttcaacatatgaaattgggggagacacaaacattcagactatagtagggtaaattgaccttggctaaaggtctggggacactgtccaaagcagtactggcataaaactgcattgcagtcttacatttatcagaaataatgcaaatcttgcattctacaatgtactatatccatgttagtatgtacatatatatgtgtatgtatatatgtacataaattctccttaaatctctgagaagaattgtgctttaaaaaagaactatgttttgtgctgtggctcataccttacagtggtagtctatgtctcttagtttgagaaagctgaatattaacttcttattaacatgaaacatgatggcaaactgaatcctacaagtataggacccagaacatatctatgttattgtcatttacaagaagaaatatgtatttggtctttcttcctattcctggtgcagagctcctaaaacctttgggacctcccaagtgatgtgtctggtagtacgcgaatgagatgactgatagttaggggcttctgaatggcctcagaatagggtctggttgccacgggaaccaaccatgtgtttagagggttggaactttcagccccactcccagaccttggggaaggaagaggggctgaaggttgagtcgatcacaaatggataatgatttaatcaatcatgcctaagaataaagcttcccataaaaatctaaaggacaaggttcagagagcttctgcattgctcaatacatgaggagtggtgagcccaaaggggccgtggaagctccgtgccccttcccccaaacctgttcctgtgcctccatctggctgtttctgagttatattattttataatagactgatgatagtaaataaagccctttcctgagttctgtgagctactctagcaaatggtgaaatctgagaaggaaatcatgggaacctctgctttgtagccacgtcagatagaagatgtgagtaactttggaacctactgcttgtgactggtgtctgaagttgggggagatcttatgggactgagctcttaacctgctggggatctgcacttaatgccgattaatgccagaattgaattgtatgatatccagttggtattggagaattggccagtgtgggagaaaacccacacagttggtggcaaggagtgttcagtgttgagtgtgaatgtcaataaaaaaaggtttgttttttctacgtacaatatctttgggaacttggaggtgcagggtcagacgtctgtgtgtgtatgtggcagggacagaacagggattagggatgtgagggggtagagttttcagaataaagggagagaaaattcaaaaaagagtt

SEQ ID NO: 378737 - DNA, 3292 bp, Homo sapiens
gcgtctcttttctgttgtggcttttaagtgcccctgcagcactgagaatatgacctatgggctggttttcctctttgctcctgcctgggtgttactgatcctgggattctttctgaacaataggtcgtggagactcttcacaggctgctgtgtgaatcccaggaaaatctttcccagaggccacagctgccgtttcttctacgtcctcggccagatcactctgagctcattggtggctccagtgatgtggctttctgtggctctgctcaatggaactttctatgaatgtgccatgagcgggacgagaagttcaggactcctggaactgatttgcaagggtaagcccaaagagtgctgggaagaacttcacaaagtatcttgtggcaaaactagcatgctacctaccgtcaatgaagaactgaaactctcccttcaggcccagtctcagattctaggatggtgcctgatttgttcagcgtctttcttctctctgctcaccacatgttatgctcgctgccgatctaaagttagctaccttcagctgagtttttggaagacatatgcacaaaaggagaaggagcagttggaaaatacatttctggactatgccaacaagctgagcgagaggaacctgaaatgtttttttgaaaacaagaggccagatccttttcccatgcctacgtttgctgcctgggaggctgcttcagagctgcattctttccaccaaagccagcaacactatagcaccctccacagagtggtggacaatggtctgcaacttagccctgaggatgatgagacgacaatggtccttgtgggtactgcccacaatatgtagctcatccaccatcaatgactcatggtgttgagtggcatgctcattctgtgatcctcctaacgtatcaccagcaacctgtgtgtctctgtattttcttacatttggagtatgtttacaagacaataacacaaaggaaactgctttgaagctctcaagtggaacatcaggatgtgctcaaattgatgctgaggggtgacaaaggtgctcttgcattggtggagaggggctcagtaggcctaaatgttgctccaagatctaagattttatcattcaacagacagactcatgtgagagggctcatcagtctctgtaaatattggttgcagaatttaggggcagaagcaatggcttgtgagtgagcaagttactcttaacataggttgccctacacagtggctcctgcagtgtgatcagcaggagtctctgtcctacaaatctacacttttaaggatgtatgaaattgtggaattcattccctcaggatctgaagatctcagttctcaaaaatcacaagttgcaagaatatgatacctaaaattgaaagtttttcacatgttttcactgtatactgaaaatactcccctggaagcagggctgcatcataatttttgtgggctttatgtacttttgcctttgcgaaccatttcctacattcaaaatagtagtaacaaatatatatatatatatacacacacacacacagaaatatatatttataactgcattgataaaaggtgaatatattagcattttcttcaacctaaaagtttatgtattttcttctgattttaaaagaaattaaaaacattttagtgggcccttacaagtattatggtccttaggcacagtgcttactaggccgtgggtatgtcttagtgcgtttgggctactataacaaaatatcatagataggtggcttatacaaaatagaaatttatttctcacagttctggaggctgggaagtccgaggtcaggctgccagcatgctcaggttctggtgagagcaattttccaggttgcaaactgcttgctgacttctcagtgtccttccatggtggaaagtgcaaataagctcccttgagcatttttataaggcactaatcccattcctggaggctccaccttcatgacccaattacttctcaaggctctgcttcttagtactatcagcttgggggttaagatttcaacatatgaaattgggggagacacaaacattcagactatagtagggtaaattgaccttggctaaaggtctggggacactgtccaaagcagtactggcataaaactgcattgcagtcttacatttatcagaaataatgcaaatcttgcattctacaatgtactatatccatgttagtatgtacatatatatgtgtatgtatatatgtacataaattctccttaaatctctgagaagaattgtgctttaaaaaagaactatgttttgtgctgtggctcataccttacagtggtagtctatgtctcttagtttgagaaagctgaatattaacttcttattaacatgaaacatgatggcaaactgaatcctacaagtataggacccagaacatatctatgttattgtcatttacaagaagaaatatgtatttggtctttcttcctattcctggtgcagagctcctaaaacctttgggacctcccaagtgatgtgtctggtagtacgcgaatgagatgactgatagttaggggcttctgaatggcctcagaatagggtctggttgccacgggaaccaaccatgtgtttagagggttggaactttcagccccactcccagaccttggggaaggaagaggggctgaaggttgagtcgatcacaaatggataatgatttaatcaatcatgcctaagaataaagcttcccataaaaatctaaaggacaaggttcagagagcttctgcattgctcaatacatgaggagtggtgagcccaaaggggccgtggaagctccgtgccccttcccccaaacctgttcctgtgcctccatctggctgtttctgagttatattattttataatagactgatgatagtaaataaagccctttcctgagttctgtgagctactctagcaaatggtgaaatctgagaaggaaatcatgggaacctctgctttgtagccacgtcagatagaagattctcttctaggtctagacttgaagcatatggaagggtccttgggctagagccaacccaagcccaggctgactcccttttaatacttctaattttccctgaagatctggtcttctccctaccaccactaccctattacataagaggaaaggattggagaatgttcttgaaaagaatgtgatgctttcccatacaaggaatatactcaaggaaaaatttcatggcacaaaatgctgattctgtccaatttatcccatgaataaattgtgtacacatatatatatgaaaaattt

SEQ ID NO: 378738 - DNA, 227 bp, Homo sapiens
taggggcttatgcacagaagctatgtctgttctcaagcttctgttcattagtctgtgaactggggctgcagcgagaagagacagtggatccctgcaccattatcccctggtcccagggcttgtataccgtagggaaggggtgattcagagggatgtgtaggtcagtgtgagtacaataacatcaaagttgtttgacctaaggtcaggctttatggtaagttcttggt

SEQ ID NO: 378739 - DNA, 280 bp, Homo sapiens
ggagaatggcgtgaacccgggaggcagagcttgcagtgagcggagattgcaccaccgcactccagcttgggggacagagtgagactccatctcaaaaaaaaagaaattgtaataacacccacattatacatcagtgaaaactaaacacgttactaccctaggccttattgcacaggggtgctacctccaaggagaaatttgtctaggcagcagatggactagaggtgattagcctatgagcgaatgaggctacagatcattcctttttatctgattcctt

SEQ ID NO: 378740 - DNA, 475 bp, Homo sapiens
acatcactgaggactcagtttcttcccatctctctgctccaccatccgtggggttggcttctttctcaggcagtttcccctaagtggtcacaagatgtctactagccacaaatggaataagaggttcccttgtccatgtgcaccaggagacagaaacctcttcacagcctttcaatacatattgtcccttcttttgatctgatgtggccacttacatcatgaagggcagtaaccatactcaatgcccgcactgatgggcttacatccggcaggatccacctctagggctggggatggcttagctccagctatgccatatgactatgtgtagaagaaacaaggaagtggttaccttggggagaagtagagaacaaatgctgggtaagaaaccaatagcaccattaaaatggggccattgtacttcattgtgttattctttttattctctaaataaaacaaattctgaatataatct

SEQ ID NO: 378741 - DNA, 724 bp, Homo sapiens
atcaataggcacattccaatgagcaaaccccaggaatccacctgttctcatcttgccaacaatgctccttccacggaaactgaccctgtcctatttcctcgctttgatcattgcccagaaggaacagggactgttgagaaacagaggcagcgtgcagcctgaaggcatgcaccgtgcagaagaggatccctgcggctgcgggctcttttccaggcccaaggacaaggcggtgtgtgccgggttgatctgcactgctttagccaggatggctctttcttagagagacaaaccgctccaacgccaaactgccctcgcaattccaatcgcaaaggcaggctagggccacagttcaaacccaactgccaatgtccacaaagaaaagaagaaagctggaaatgcagttggtcttgccatgctggccgctcagcttctcacccccaggcctaagaaggacaaggtgaggatgagttccatttacagagtcctcaccaggtgccagtcacgatctcaatgtctcacagctgccatcccgccaggctcccaggaggaaggtgctgctatttattatccacaggacagaccccacagctggcaagtggctgggccaggaaccagctagggcaggtttgtcccatactctctacccatgagcacgaggctgtgctgttcatgtctccattcaaacacaggctgatatttccactccaggggaaaaaaggtagaa

SEQ ID NO: 378742 - DNA, 795 bp, Homo sapiens
gtttcaggtgcttcctgcgtctgtggagaaaacttttcccttgggcttctttggcttcttaggattgtcctcaaaaagaagttgaccttgggcaatctacttaactttccctggcttccatttcttatctagtgaaataattattataataaaacctcagtgggtaattgtgaggatgaaatatagtcttgtatctgaaagcatattgtagacttgtgcagtgttgactgttattcttcagtagcagcagggcggtgtggaaagctccaggacttggaatccacctaagcctttctttctgtaaatttagtgaaaataatactaaccttaaatggttgttttgaagattaagaaaactgaagtaaatagtaaagtaaatgttggttcgttcatttagtcgacagtaacaatatttccatttattctttctctaagttgatgtttatacagtgagttcaaactttttattcagactttctgagtgatcggtgcagtccctaattcatgggctgttttcctccatgaactctgtgaagcattattgctatttcttcttcacataaagaaatcaagattgaaagaagatttaaaaacttggcacaaggtcacacaactagtaaatattaggatcagaataaaacctaggtctgggtcagctgtggtggctgacgtaatcccagcactttgggaagccaaggtgggaggatcacttaaacccaggagtttgaggttgcagtgagctgtgattatgccactgcactccagcctgggaaacagagtgaaattccccattta

SEQ ID NO: 378743 - DNA, 189 bp, Homo sapiens
atggaccccagggaatgtgtctgcatgtctggaggaatctgcatgtgtggagacaactgcaaatgcacaacctgcaactgtaaaacatgtcggaagagctgctgtccctgctgccccccgggctgtgccaaatgtgcccggggctgcatctgcaaaggaggctcagacaagtgcagctgctgcccatga

SEQ ID NO: 378744 - DNA, 588 bp, Homo sapiens
taggcacatatgataattaaaagcagaacaactttcaattttattattttttttgaaaaattatctaactcacttcattgccctagaatggaccacctcttctatcccctccagccattggcacaaccttgctggaaatctcaaaaacatagaaatagctaagagtttgtcacaatctctggaatactctgcatttaccttttttttttttttttttttgagacaaggtctggctctactgctcaggctggagtgcagtggcgtgctctcagctcactgcaacctctgtctcctgggcttgagccatcctcccacctccgcctcccaagtagctgagactacaggcatgccaccatgcccagctaattttttttgtattttttgtagagacaaggtttcatcattttgcccaagctggtgtcaaattcttgagctcaactgattcacccacctcggactcccaaagtgttgtaattacaggtgtgagccacctcacctggccacatttgcttatcattcctaaatgacttcattgctgttttcttctcttcctttttctcctcctgtttgttcaattttaagcacttt

SEQ ID NO: 378745 - DNA, 397 bp, Homo sapiens
tttttttgagacagttttgttcttgttgcctaggctggagtgcagtgacacaatcttggttcactacaacctctgtctcccaggctcaaacaatgctcccacctcagccttcagagtagctgggactacaggcgtgcgccaccacgcccggccaatttttgtgatttttgtgttttttgccatgttgcccaggctggtctcaaactcctgggctcaatggatccacccacctcagtctcccaaagtgctgggattgctggagtgagccaccacgactggggcaaaagacatttcaaatgcctgaagaaacaaaagctggtttgagttagtactaacctcaccacttctgttttgtaaatataattattgatatcgcaagtcccaaatggtaacccat

SEQ ID NO: 378746 - DNA, 2048 bp, Homo sapiens
attctcagccccgcgccggtttccagggagctgggcgcatgcgccgcgtaaggggcccggccggcggaaggaggtgctactgccggaagcgccggcgcgcttgcgcagtagctgaacgcgggcgtttctttcctccctttttttcgaattggttttgggggtagattcgagttacaaaatggccgcccggagtgtgttcggcgcggttcccccagctgtctctggctgaaccggcgctctcgcctccctgccgaacacagcgtgaggagcccccccagggatatggtgtttgagtctctgggcttgccgagcactaagtcctctgagttccgcagcgcagcaccggaagcggccgagcgcgctcagcccggcgacccctgcgggctccagacccctgcgccgctgcgccccgggtttcgccgcaaccaagacccagcgagtgcagcggcggccgccgaggaggttcgaaaacatggccaaaagaaatgccgagaaggaactgacagataggaattgggatcaagaagatgaagctgaagaggtgggaacattctccatggccagtgaggaagtcttgaagaatagagccataaagaaagcaaagcgcagaaatgttggatttgaatctgacactggaggagcctttaaaggttttaaaggtttggtggtaccttctggaggaggacgcttttctggatttggtagtggcgctggagggaagcctttggaaggactgtcgaatggaaacaacataaccagtgcccctcccttcgccagtgcaaaggcagcggcagatcccaaggtagcctttggttctcttgctgcaaatggccctaccaccttggttgataaagtttcaaatcccaaaactaatggggacagtcagcagccctcctcctctggccttgcttccagtaaagcttgtgtcggaaatgcctatcacaagcagttggccgccttgaactgctccgtgcgggattggatagtgaagcacgtgaatacaaaccccctctgtgatctgacacctatctttaaagactatgagaaatatttagcaaacattgaacagcaacacgggaacagtggcaggaattctgaaagtgaatctaacaaagtggcagctgaaacacagtctccttccctttttggctcaacaaaattacagcaagagtcaacgtttttgtttcatggcaacaaaactgaagatacacctgacaagaagatggaggtggcatctgaaaagaaaacggacccatcatcactaggagcgacaagtgcctcatttaatttcggcaagaaagttgatagctctgttttgggctcattaagctctgtccccctgactggattttctttctcccctggaaactccagtttatttggcaaagatactacccagagtaaaccagtctcttcaccatttcccactaaaccattggagggccaagcagaaggtgacagtggtgaatgcaaaggtggagatgaagaagagaatgatgagccacccaaagtagtagttaccgaagtaaaagaagaagatgctttttactccaaaaagtgtaaactgttttacaagaaagacaatgagtttaaagagaaaggcataggtactctgcatttaaaacctacagcaaatcagaagacacagcttttggtgcgggcagacaccaatttaggcaacatattgctgaacgttctgattccacccaatatgccatgtacgcgaacagggaagaataacgttcttatcgtctgtgttccaaatccaccaattgacgagaagaatgccaccatgccagtcaccatgttgattcgggtaaaaaccagcgaggatgcagacgagttgcacaaaattttactggagaaaaaggatgcctgaacacgcaaagtcggctgcagaattattgccaagttgctgctgcttccaccgccccttaaagttagtcagtttttcttctcttctttgacattctaagaacttatagataacttaaaacttttgtgaggaagattaatgtggccaataaaacctttaaatgttaagtgtc

SEQ ID NO: 378747 - DNA, 1341 bp, Homo sapiens
attctcagccccgcgccggtttccagggagctgggcgcatgcgccgcgtaaggggcccggccggcggaaggaggtgctactgccggaagcgccggcgcgcttgcgcagtagctgaacgcgggcgtttctttcctccctttttttcgaattggttttgggggtagattcgagttacaaaatggccgcccggagtgtgttcggcgcggttcccccagctgtctctggctgaaccggcgctctcgcctccctgccgaacacagcgtgaggagcccccccagggatatggtgtttgagtctctgggcttgccgagcactaagtcctctgagttccgcagcgcagcaccggaagcggccgagcgcgctcagcccggcgacccctgcgggctccagacccctgcgccgctgcgccccgggtttcgccgcaaccaagacccagcgagtgcagcggcggccgccgaggaggttcgaaaacatggccaaaagaaatgccgagaaggaactgacagataggaattgggatcaagaagatgaagctgaagagggtaaaagaagggctataaactaaagccgaagatattcagcagctttctgacgtggacatcagaagtgtggacatgagtgtgctttgagcgcactgtggaagagcagtggttgtccagcaaggtcctaggtgcctccgtggcctttcgtacagtgggcaagttgggcaggactcatcttaaaaatcatgtgtgggaacattctccatggccagtgaggaagtcttgaagaatagagccataaagaaagcaaagcgcagaaatgttggatttgaagtgagtgcccccttacagctcttgctattaaatactcatttgatttctgggttgcacagcaatccctccgctgggagcaatgatatcaacaaatgctttcttaaaatacttattctttgatgtaggtcatgggagatagaaaaaaataagaaacgtcaggtctggaccttaaagagagcttatccagttgaggaaataagataaatatagacaaattcaagttgagtgacaatctggagaagaaaaatgagcaaagcaatacagaggtgggcgaagtggcatcagattggaggaagaaaggaaaacgcaaggatcttctgagagtcttgtctgctccctgcgattgaggccttggtagggggagccctttcactatactagaggcattttaggtgtggattttttgctagtatagtatattaaaatgattcattcctgtgctaagaaggatggaagatgagttgtaactcctaaattgaaataatgtgctgattattaagcagtcactccgcatctaagaactcgt

SEQ ID NO: 378748 - DNA, 2344 bp, Homo sapiens
gccccggctgtttttgaagcggggcccgggccccaccgggctgcggcgtccgactcgagtgagactctcccctgcggccccgccggaggttcgaaaacatggccaaaagaaatgccgagaaggaactgacagataggaattgggatcaagaagatgaagctgaagagggtaaaagaagggctataaactaaagccgaagatattcagcagctttctgacgtggacatcagaagtgtggacatgagtgtgctttgagcgcactgtggaagagcagtggttgtccagcaaggtcctaggtgcctccgtggcctttcgtacagtgggcaagttgggcaggactcatcttaaaaatcatgtgtgggaacattctccatggccagtgaggaagtcttgaagaatagagccataaagaaagcaaagcgcagaaatgttggatttgaatctgacactggaggagcctttaaaggttttaaaggtttggtggtaccttctggaggaggacgcttttctggatttggtagtggcgctggagggaagcctttggaaggactgtcgaatggaaacaacataaccagtgcccctcccttcgccagtgcaaaggcagcggcagatcccaaggtagcctttggttctcttgctgcaaatggccctaccaccttggttgataaagtttcaaatcccaaaactaatggggacagtcagcagccctcctcctctggccttgcttccagtaaagcttgtgtcggaaatgcctatcacaagcagttggccgccttgaactgctccgtgcgggattggatagtgaagcacgtgaatacaaaccccctctgtgatctgacacctatctttaaagactatgagaaatatttagcaaacattgaacagcaacacgggaacagtggcaggaattctgaaagtgaatctaacaaagtggcagctgaaacacagtctccttccctttttggctcaacaaaattacagcaagagtcaacgtttttgtttcatggcaacaaaactgaagatacacctgacaagaagatggaggtggcatctgaaaagaaaacggacccatcatcactaggagcgacaagtgcctcatttaatttcggcaagaaagttgatagctctgttttgggctcattaagctctgtccccctgactggattttctttctcccctggaaactccagtttatttggcaaagatactacccagagtaaaccagtctcttcaccatttcccactaaaccattggagggccaagcagaaggtgacagtggtgaatgcaaaggtggagatgaagaagagaatgatgagccacccaaagtagtagttaccgaagtaaaagaagaagatgctttttactccaaaaagtgtaaactgttttacaagaaagacaatgagtttaaagagaaaggcataggtactctgcatttaaaacctacagcaaatcagaagacacagcttttggtgcgggcagacaccaatttaggcaacatattgctgaacgttctgattccacccaatatgccatgtacgcgaacagggaagaataacgttcttatcgtctgtgttccaaatccaccaattgacgagaagaatgccaccatgccagtcaccatgttgattcgggtaaaaaccagcgaggatgcagacgagttgcacaaaattttactggagaaaaaggatgcctgaacacgcaaagtcggctgcagaattattgccaagttgctgctgcttccaccgccccttaaagttagtcagtttttcttctcttctttgacattctaagaacttatagataacttaaaacttttgtgaggaagattaatgtggccaataaaacctttaaatgttaagtgtcaagaaactgcactctcccttcttaagaactgcctaaagtgtaaaatacatttgaatgcaatttttggaagattttttaatgttcgtttattaaactaaccctaagtgatttcttcaaggactgcaatcagggtatcaatttgctttcccaaaggctcttccaacccgtgggttttggggtccaccgccaccacgagagaggcttttgaacaggtgcctggctgtgttcagaaggaagctggcctgtgtgcttctctccggtgggctcagccgacgtgtgagacttgttctgttaccaaatgaaccgggctgccacgctgtgacaggcgtttgtcctctgctttatttttactttgaagctcaaatgcgagtactaagtgttcacctcagcgttcgaatcattggcctgtaaccctgtgggctgcttcacgagaattcaggacctgcattttcattctaaaaagaaatgaacagcttgtga

SEQ ID NO: 378749 - DNA, 1932 bp, Homo sapiens
ttgaggcaggagaatcgcttgaacctgggaggcagaggttgcagtgagccaagatcgtgccacggcactccagcctgggtgacagagcaagactgtcttggtgtggggggagatacagtaaaagcagaaagtatgaaggcagagtggcaaaaaaatctagatgatttaatcaaattaggctaaataaatggttcaattattaactttctataggttgttctcttgctgcaaatggccctaccaccttggttgataaagtttcaaatcccaaaactaatggggacagtcagcagccctcctcctctggccttgcttccagtaaagcttgtgtcggaaatgcctatcacaagcagttggccgccttgaactgctccgtgcgggattggatagtgaagcacgtgaatacaaaccccctctgtgatctgacacctatctttaaagactatgagaaatatttagcaaacattgaacagcaacacgggaacagtggcaggaattctgaaagtgaatctaacaaagtggcagctgaaacacagtctccttccctttttggctcaacaaaattacagcaagagtcaacgtttttgtttcatggcaacaaaactgaagatacacctgacaagaagatggaggtggcatctgaaaagaaaacggacccatcatcactaggagcgacaagtgcctcatttaatttcggcaagaaagttgatagctctgttttgggctcattaagctctgtccccctgactggattttctttctcccctggaaactccagtttatttggcaaagatactacccagagtaaaccagtctcttcaccatttcccactaaaccattggagggccaagcagaaggtgacagtggtgaatgcaaaggtggagatgaagaagagaatgatgagccacccaaagtagtagttaccgaagtaaaagaagaagatgctttttactccaaaaagtgtaaactgttttacaagaaagacaatgagtttaaagagaaaggcataggtactctgcatttaaaacctacagcaaatcagaagacacagcttttggtgcgggcagacaccaatttaggcaacatattgctgaacgttctgattccacccaatatgccatgtacgcgaacagggaagaataacgttcttatcgtctgtgttccaaatccaccaattgacgagaagaatgccaccatgccagtcaccatgttgattcgggtaaaaaccagcgaggatgcagacgagttgcacaaaattttactggagaaaaaggatgcctgaacacgcaaagtcggctgcagaattattgccaagttgctgctgcttccaccgccccttaaagttagtcagtttttcttctcttctttgacattctaagaacttatagataacttaaaacttttgtgaggaagattaatgtggccaataaaacctttaaatgttaagtgtcaagaaactgcactctcccttcttaagaactgcctaaagtgtaaaatacatttgaatgcaatttttggaagattttttaatgttcgtttattaaactaaccctaagtgatttcttcaaggactgcaatcagggtatcaatttgctttcccaaaggctcttccaacccgtgggttttggggtccaccgccaccacgagagaggcttttgaacaggtgcctggctgtgttcagaaggaagctggcctgtgtgcttctctccggtgggctcagccgacgtgtgagacttgttctgttaccaaatgaaccgggctgccacgctgtgacaggcgtttgtcctctgctttatttttactttgaagctcaaatgcgagtactaagtgttcacctcagcgttcgaatcattggcctgtaaccctgtgggctgcttcacgagaattcaggacctgcattttcattctaaaaagaaatgaacagcttgtga

SEQ ID NO: 378750 - DNA, 1125 bp, Homo sapiens
tagctcggtacccccttccctctctcacgatcctccctctctcacgagaaggtgacagtggtgaatgcagaggtggagatgaagaagagaatgatgagccacccaaagtagtagttaccgaagtaaaagaagaagatgctttttactccaaaaagtgtaaactgttttacaagaaagacaatgagtttaaagagaaaggcataggtactctgcatttaaaacctacagcaaatcagaagacacagcttttggtgcgggcagacaccaatttaggcaacatattgctgaacgttctgattccacccaatatgccatgtacgcgaacagggaagaataacgttcttatcgtctgtgttccaaatccaccaattgacgagaagaatgccaccatgccagtcaccatgttgattcgggtaaaaaccagcgaggatgcagacgagttgcacaaaattttactggagaaaaaggatgcctgaacacgcaaagtcggctgcagaattattgccaagttgctgctgcttccaccgccccttaaagttagtcagtttttcttctcttctttgacattctaagaacttatagataacttaaaacttttgtgaggaagattaatgtggccaataaaacctttaaatgttaagtgtcaagaaactgcactctcccttcttaagaactgcctaaagtgtaaaatacatttgaatgcaatttttggaagattttttaatgttcgtttattaaactaaccctaagtgatttcttcaaggactgcaatcagggtatcaatttgctttcccaaaggctcttccaacccgtgggttttggggtccaccgccaccacgagagaggcttttgaacaggtgcctggctgtgttcagaaggaagctggcctgtgtgcttctctccggtgggctcagccgacgtgtgagacttgttctgttaccaaatgaaccgggctgccacgctgtgacaggcgtttgtcctctgctttatttttactttgaagctcaaatgcgagtactaagtgttcacctcagcgttcgaatcattggcctgtaaccctgtgggctgcttcacgagaattcaggacctgcattttcattctaaaaagaaatgaacagcttgtga

SEQ ID NO: 378751 - DNA, 1151 bp, Homo sapiens
attctcagccccgcgccggtttccagggagctgggcgcatgcgccgcgtaaggggcccggccggcggaaggaggtgctactgccggaagcgccggcgcgcttgcgcagtagctgaacgcgggcgtttctttcctccctttttttcgaattggttttgggggtagattcgagttacaaaatggccgcccggagtgtgttcggcgcggttcccccagctgtctctggctgaaccggcgctctcgcctccctgccgaacacagcgtgaggagcccccccagggatatggtgtttgagtctctgggcttgccgagcactaagtcctctgagttccgcagcgcagcaccggaagcggccgagcgcgctcagcccggcgacccctgcgggctccagacccctgcgccgctgcgccccgggtttcgccgcaaccaagacccagcgagtgcagcggcggccgccgaggaggttcgaaaacatggccaaaagaaatgccgagaaggaactgacagataggaattgggatcaagaagatgaagctgaagaggtgggaacattctccatggccagtgaggaagtcttgaagaatagagccataaagaaagcaaagcgcagaaatgttggatttgaagtgagtgcccccttacagctcttgctattaaatactcatttgatttctgggttgcacagcaatccctccgctgggagcaatgatatcaacaaatgctttcttaaaatacttattctttgatgtaggtcatgggagatagaaaaaaataagaaacgtcaggtctggaccttaaagagagcttatccagttgaggaaataagataaatatagacaaattcaagttgagtgacaatctggagaagaaaaatgagcaaagcaatacagaggtgggcgaagtggcatcagattggaggaagaaaggaaaacgcaaggatcttctgagagtcttgtctgctccctgcgattgaggccttggtagggggagccctttcactatactagaggcattttaggtgtggattttttgctagtatagtatattaaaatgattcattcctgtgctaagaaggatggaagatgagttgtaactcctaaattgaaataatgtgctgattattaagcagtcactccgcatctaagaactcgt

SEQ ID NO: 378752 - DNA, 979 bp, Homo sapiens
attctcagccccgcgccggtttccagggagctgggcgcatgcgccgcgtaaggggcccggccggcggaaggaggtgctactgccggaagcgccggcgcgcttgcgcagtagctgaacgcgggcgtttctttcctccctttttttcgaattggttttgggggtagattcgagttacaaaatggccgcccggagtgtgttcggcgcggttcccccagctgtctctggctgaaccggcgctctcgcctccctgccgaacacagcgtgaggagcccccccagggatatggtgtttgagtctctgggcttgccgagcactaagtcctctgagttccgcagcgcagcaccggaagcggccgagcgcgctcagcccggcgacccctgcgggctccagacccctgcgccgctgcgccccgggtttcgccgcaaccaagacccagcgagtgcagcggcggccgccgaggaggttcgaaaacatggccaaaagaaatgccgagaaggaactgacagataggaattgggatcaagaagatgaagctgaagaggtaaaaagcagcttccctaagaatgatttcctgtttcttttgccttttacattcattttggggttcctcatgaagacttgtgacagaactaaaagacctttctaagaacatcatgaatgggagatgacaagaaattatatgacctgtacttagtgtagatatttattaattacatttctgtgacctctagttagtgtagaaatgtattaattacatttagatgtgcttttccactagtgcctgctccttaaatattctccttagtagaagcacttttcctcctgagtttcgtatacttgaagcattctgaacccatgtttgcagtaagccattttagtcatgactgaaggctgagttaagtgatgtagtcatgaacttagcacactgcccagatgtgaaagtggtacaccatcaccatcttggtctgtggtactccgt

SEQ ID NO: 378753 - DNA, 410 bp, Homo sapiens
cctgaagcttcctgtactcatttaatagagattttccacacaagtgtgaagagtggttgttagaaaactgtgtgacttgattcgtccttgaatgcttgatggtccctattatttttctccataggtgtaaactgttttacaagaaagacaatgagtttaaagagaaaggcataggtactctgcatttaaaacctacagcaaatcagaagacacagcttttggtgcgggcagacaccaatttaggtgggtaccttttttcagttagcacaaaatcatcatcacatagtatataaaagcgtttaccctgctgactcaaggttattaatatgtttttaaacagagcgcattcaggccaaattcatcctgtatttacttatttatagttttgagtcccaggataatagtgtgta

SEQ ID NO: 378754 - DNA, 2528 bp, Homo sapiens
attctcagccccgcgccggtttccagggagctgggcgcatgcgccgcgtaaggggcccggccggcggaaggaggtgctactgccggaagcgccggcgcgcttgcgcagtagctgaacgcgggcgtttctttcctccctttttttcgaattggttttgggggtagattcgagttacaaaatggccgcccggagtgtgttcggcgcggttcccccagctgtctctggctgaaccggcgctctcgcctccctgccgaacacagcgtgaggagcccccccagggatatggtgtttgagtctctgggcttgccgagcactaagtcctctgagttccgcagcgcagcaccggaagcggccgagcgcgctcagcccggcgacccctgcgggctccagacccctgcgccgctgcgccccgggtttcgccgcaaccaagacccagcgagtgcagcggcggccgccgaggaggttcgaaaacatggccaaaagaaatgccgagaaggaactgacagataggaattgggatcaagaagatgaagctgaagaggtgggaacattctccatggccagtgaggaagtcttgaagaatagagccataaagaaagcaaagcgcagaaatgttggatttgaatctgacactggaggagcctttaaaggttttaaaggtttggtggtaccttctggaggaggacgcttttctggatttggtagtggcgctggagggaagcctttggaaggactgtcgaatggaaacaacataaccagtgcccctcccttcgccagtgcaaaggcagcggcagatcccaaggtagcctttggttctcttgctgcaaatggccctaccaccttggttgataaagtttcaaatcccaaaactaatggggacagtcagcagccctcctcctctggccttgcttccagtaaagcttgtgtcggaaatgcctatcacaagcagttggccgccttgaactgctccgtgcgggattggatagtgaagcacgtgaatacaaaccccctctgtgatctgacacctatctttaaagactatgagaaatatttagcaaacattgaacagcaacacgggaacagtggcaggaattctgaaagtgaatctaacaaagtggcagctgaaacacagtctccttccctttttggctcaacaaaattacagcaagagtcaacgtttttgtttcatggcaacaaaactgaagatacacctgacaagaagatggaggtggcatctgaaaagaaaacggacccatcatcactaggagcgacaagtgcctcatttaatttcggcaagaaagttgatagctctgttttgggctcattaagctctgtccccctgactggattttctttctcccctggaaactccagtttatttggcaaagatactacccagagtaaaccagtctcttcaccatttcccactaaaccattggagggccaagcagaaggtgacagtggtgaatgcaaaggtggagatgaagaagagaatgatgagccacccaaagtagtagttaccgaagtaaaagaagaagatgctttttactccaaaaagtgtaaactgttttacaagaaagacaatgagtttaaagagaaaggcataggtactctgcatttaaaacctacagcaaatcagaagacacagcttttggtgcgggcagacaccaatttaggcaacatattgctgaacgttctgattccacccaatatgccatgtacgcgaacagggaagaataacgttcttatcgtctgtgttccaaatccaccaattgacgagaagaatgccaccatgccagtcaccatgttgattcgggtaaaaaccagcgaggatgcagacgagttgcacaaaattttactggagaaaaaggatgcctgaacacgcaaagtcggctgcagaattattgccaagttgctgctgcttccaccgccccttaaagttagtcagtttttcttctcttctttgacattctaagaacttatagataacttaaaacttttgtgaggaagattaatgtggccaataaaacctttaaatgttaagtgtcaagaaactgcactctcccttcttaagaactgcctaaagtgtaaaatacatttgaatgcaatttttggaagattttttaatgttcgtttattaaactaaccctaagtgatttcttcaaggactgcaatcagggtatcaatttgctttcccaaaggctcttccaacccgtgggttttggggtccaccgccaccacgagagaggcttttgaacaggtgcctggctgtgttcagaaggaagctggcctgtgtgcttctctccggtgggctcagccgacgtgtgagacttgttctgttaccaaatgaaccgggctgccacgctgtgacaggcgtttgtcctctgctttatttttactttgaagctcaaatgcgagtactaagtgttcacctcagcgttcgaatcattggcctgtaaccctgtgggctgcttcacgagaattcaggacctgcattttcattctaaaaagaaatgaacagcttgtga

SEQ ID NO: 378755 - DNA, 2718 bp, Homo sapiens
attctcagccccgcgccggtttccagggagctgggcgcatgcgccgcgtaaggggcccggccggcggaaggaggtgctactgccggaagcgccggcgcgcttgcgcagtagctgaacgcgggcgtttctttcctccctttttttcgaattggttttgggggtagattcgagttacaaaatggccgcccggagtgtgttcggcgcggttcccccagctgtctctggctgaaccggcgctctcgcctccctgccgaacacagcgtgaggagcccccccagggatatggtgtttgagtctctgggcttgccgagcactaagtcctctgagttccgcagcgcagcaccggaagcggccgagcgcgctcagcccggcgacccctgcgggctccagacccctgcgccgctgcgccccgggtttcgccgcaaccaagacccagcgagtgcagcggcggccgccgaggaggttcgaaaacatggccaaaagaaatgccgagaaggaactgacagataggaattgggatcaagaagatgaagctgaagagggtaaaagaagggctataaactaaagccgaagatattcagcagctttctgacgtggacatcagaagtgtggacatgagtgtgctttgagcgcactgtggaagagcagtggttgtccagcaaggtcctaggtgcctccgtggcctttcgtacagtgggcaagttgggcaggactcatcttaaaaatcatgtgtgggaacattctccatggccagtgaggaagtcttgaagaatagagccataaagaaagcaaagcgcagaaatgttggatttgaatctgacactggaggagcctttaaaggttttaaaggtttggtggtaccttctggaggaggacgcttttctggatttggtagtggcgctggagggaagcctttggaaggactgtcgaatggaaacaacataaccagtgcccctcccttcgccagtgcaaaggcagcggcagatcccaaggtagcctttggttctcttgctgcaaatggccctaccaccttggttgataaagtttcaaatcccaaaactaatggggacagtcagcagccctcctcctctggccttgcttccagtaaagcttgtgtcggaaatgcctatcacaagcagttggccgccttgaactgctccgtgcgggattggatagtgaagcacgtgaatacaaaccccctctgtgatctgacacctatctttaaagactatgagaaatatttagcaaacattgaacagcaacacgggaacagtggcaggaattctgaaagtgaatctaacaaagtggcagctgaaacacagtctccttccctttttggctcaacaaaattacagcaagagtcaacgtttttgtttcatggcaacaaaactgaagatacacctgacaagaagatggaggtggcatctgaaaagaaaacggacccatcatcactaggagcgacaagtgcctcatttaatttcggcaagaaagttgatagctctgttttgggctcattaagctctgtccccctgactggattttctttctcccctggaaactccagtttatttggcaaagatactacccagagtaaaccagtctcttcaccatttcccactaaaccattggagggccaagcagaaggtgacagtggtgaatgcaaaggtggagatgaagaagagaatgatgagccacccaaagtagtagttaccgaagtaaaagaagaagatgctttttactccaaaaagtgtaaactgttttacaagaaagacaatgagtttaaagagaaaggcataggtactctgcatttaaaacctacagcaaatcagaagacacagcttttggtgcgggcagacaccaatttaggcaacatattgctgaacgttctgattccacccaatatgccatgtacgcgaacagggaagaataacgttcttatcgtctgtgttccaaatccaccaattgacgagaagaatgccaccatgccagtcaccatgttgattcgggtaaaaaccagcgaggatgcagacgagttgcacaaaattttactggagaaaaaggatgcctgaacacgcaaagtcggctgcagaattattgccaagttgctgctgcttccaccgccccttaaagttagtcagtttttcttctcttctttgacattctaagaacttatagataacttaaaacttttgtgaggaagattaatgtggccaataaaacctttaaatgttaagtgtcaagaaactgcactctcccttcttaagaactgcctaaagtgtaaaatacatttgaatgcaatttttggaagattttttaatgttcgtttattaaactaaccctaagtgatttcttcaaggactgcaatcagggtatcaatttgctttcccaaaggctcttccaacccgtgggttttggggtccaccgccaccacgagagaggcttttgaacaggtgcctggctgtgttcagaaggaagctggcctgtgtgcttctctccggtgggctcagccgacgtgtgagacttgttctgttaccaaatgaaccgggctgccacgctgtgacaggcgtttgtcctctgctttatttttactttgaagctcaaatgcgagtactaagtgttcacctcagcgttcgaatcattggcctgtaaccctgtgggctgcttcacgagaattcaggacctgcattttcattctaaaaagaaatgaacagcttgtga

SEQ ID NO: 378756 - DNA, 1865 bp, Homo sapiens
attctcagccccgcgccggtttccagggagctgggcgcatgcgccgcgtaaggggcccggccggcggaaggaggtgctactgccggaagcgccggcgcgcttgcgcagtagctgaacgcgggcgtttctttcctccctttttttcgaattggttttgggggtagattcgagttacaaaatggccgcccggagtgtgttcggcgcggttcccccagctgtctctggctgaaccggcgctctcgcctccctgccgaacacagcgtgaggagcccccccagggatatggtgtttgagtctctgggcttgccgagcactaagtcctctgagttccgcagcgcagcaccggaagcggccgagcgcgctcagcccggcgacccctgcgggctccagacccctgcgccgctgcgccccgggtttcgccgcaaccaagacccagcgagtgcagcggcggccgccgaggaggttcgaaaacatggccaaaagaaatgccgagaaggaactgacagataggaattgggatcaagaagatgaagctgaagaggtgggaacattctccatggccagtgaggaagtcttgaagaatagagccataaagaaagcaaagcgcagaaatgttggatttgaatctgacactggaggagcctttaaaggttttaaaggtttggtggtaccttctggaggaggacgcttttctggatttggtagtggcgctggagggaagcctttggaaggactgtcgaatggaaacaacataaccagtgcccctcccttcgccagtgcaaaggcagcggcagatcccaaggtagcctttggtggagatgaagaagagaatgatgagccacccaaagtagtagttaccgaagtaaaagaagaagatgctttttactccaaaaagtgtaaactgttttacaagaaagacaatgagtttaaagagaaaggcataggtactctgcatttaaaacctacagcaaatcagaagacacagcttttggtgcgggcagacaccaatttaggcaacatattgctgaacgttctgattccacccaatatgccatgtacgcgaacagggaagaataacgttcttatcgtctgtgttccaaatccaccaattgacgagaagaatgccaccatgccagtcaccatgttgattcgggtaaaaaccagcgaggatgcagacgagttgcacaaaattttactggagaaaaaggatgcctgaacacgcaaagtcggctgcagaattattgccaagttgctgctgcttccaccgccccttaaagttagtcagtttttcttctcttctttgacattctaagaacttatagataacttaaaacttttgtgaggaagattaatgtggccaataaaacctttaaatgttaagtgtcaagaaactgcactctcccttcttaagaactgcctaaagtgtaaaatacatttgaatgcaatttttggaagattttttaatgttcgtttattaaactaaccctaagtgatttcttcaaggactgcaatcagggtatcaatttgctttcccaaaggctcttccaacccgtgggttttggggtccaccgccaccacgagagaggcttttgaacaggtgcctggctgtgttcagaaggaagctggcctgtgtgcttctctccggtgggctcagccgacgtgtgagacttgttctgttaccaaatgaaccgggctgccacgctgtgacaggcgtttgtcctctgctttatttttactttgaagctcaaatgcgagtactaagtgttcacctcagcgttcgaatcattggcctgtaaccctgtgggctgcttcacgagaattcaggacctgcattttcattctaaaaagaaatgaacagcttgtga

SEQ ID NO: 378757 - DNA, 1297 bp, Homo sapiens
taagcgcgtatccgaatattagtatcttgacagcaatgacaagaaaaaagaggagcaccattacaagcagttgatagctctgttttgggctcattaagctctgtccccctgactggattttctttctcccctggaaactccagtttatttggcaaagatactacccagagtaaaccagtctcttcaccatttcccactaaaccattggagggccaagcagaaggtgacagtggtgaatgcaaaggtggagatgaagaagagaatgatgagccacccaaagtagtagttaccgaagtaaaagaagaagatgctttttactccaaaaagtgtaaactgttttacaagaaagacaatgagtttaaagagaaaggcataggtactctgcatttaaaacctacagcaaatcagaagacacagcttttggtgcgggcagacaccaatttaggcaacatattgctgaacgttctgattccacccaatatgccatgtacgcgaacagggaagaataacgttcttatcgtctgtgttccaaatccaccaattgacgagaagaatgccaccatgccagtcaccatgttgattcgggtaaaaaccagcgaggatgcagacgagttgcacaaaattttactggagaaaaaggatgcctgaacacgcaaagtcggctgcagaattattgccaagttgctgctgcttccaccgccccttaaagttagtcagtttttcttctcttctttgacattctaagaacttatagataacttaaaacttttgtgaggaagattaatgtggccaataaaacctttaaatgttaagtgtcaagaaactgcactctcccttcttaagaactgcctaaagtgtaaaatacatttgaatgcaatttttggaagattttttaatgttcgtttattaaactaaccctaagtgatttcttcaaggactgcaatcagggtatcaatttgctttcccaaaggctcttccaacccgtgggttttggggtccaccgccaccacgagagaggcttttgaacaggtgcctggctgtgttcagaaggaagctggcctgtgtgcttctctccggtgggctcagccgacgtgtgagacttgttctgttaccaaatgaaccgggctgccacgctgtgacaggcgtttgtcctctgctttatttttactttgaagctcaaatgcgagtactaagtgttcacctcagcgttcgaatcattggcctgtaaccctgtgggctgcttcacgagaattcaggacctgcattttcattctaaaaagaaatgaacagcttgtga

SEQ ID NO: 378758 - DNA, 198 bp, Homo sapiens
gggtatttatttttttctaaggatcatgttcttcctttttctttcttcttcactgtgtccccattcacctagctacttcagggcccagcttaaacctgacatccacctggaagctttccttgaccctcctaatttttgttgtttgccctcatctcacccccaactcaaagtggtctaataaaactttgtgcttcccct

SEQ ID NO: 378759 - DNA, 853 bp, Homo sapiens
tgaggctggaggatcgcttgagcccgtgagttcaaagctgcagtgagctgtgattacaccactgcattcagcctgggtgacagagcacaatactgtctcaaaaaaaaaaaaaaaaaaagaaggtggaggaaggccaggaagggcaggggatgctcctgagagggcagagtggtgggctgtgtcctggggaagggctaagggagtggaacagaggttatcgtggggtattttgtggttcttcagctcaattgtggaaagggaaagcaagttgggttagaaagaatagagtgaggtacagttaggagaaacttccaggtcttgagacgagtaagagttagggaaatcaaggaagaggcacctaactggcctcttgggaggggtgctcaggctgagtgaccaggaagctggcaggaagttgccttccaggggaggatgctggtaggggcgggtaatctggcagtttcagcttcctgttgttgctacgccttgggaacctggcaatgttgcccttggccaaggcccagcttgagctgtggcagcctgctccccaagccaaagaataagttaaaggtaaagggtgggctgggtgcggtggctcatgcctgtaatcccagcactttgggaagccgagccgggcagatcacgaggtcaggagatcgagatcatcctggctgacaaggtgaaacccggctctattaaaatacaaaaaaaagctgggcatggtggcaggcgcctgtagtcccagctgcttgggaggctgaggcaggagaatggcgtgaacccaggaggcggagcttgcgccagtgcactccagcctgggcgacagagcgagactctatctcaaaaaaaaaaa

SEQ ID NO: 378760 - DNA, 912 bp, Homo sapiens
tgaggctggaggatcgcttgagcccgtgagttcaaagctgcagtgagctgtgattacaccactgcattcagcctgggtgacagagcacaatactgtctcaaaaaaaaaaaaaaaaaaagaaggtggaggaaggccaggaagggcaggggatgctcctgagagggcagagtggtgggctgtgtcctggggaagggctaagggagtggaacagaggttatcgtggggtattttgtggttcttcagctcaattgtggaaagggaaagcaagttgggttagaaagaatagagtgaggtacagttaggagaaacttccaggtcttgagacgagtaagagttagggaaatcaaggaagaggcacctaactggcctcttgggaggggtgctcaggctgagtgaccaggaagctggcaggaagttgccttccaggggaggatgctggtaggggcgggtaatctggcagtttcagcttcctgttgttgctacgccttgggaacctggcaatgttgcccttggccaaggcccagcttgagctgtggcagcctgctccccaagccaaagaataagttaaaggtaaagggtgggctgggtgcggtggctcatgcctgtaatcccagcactttgggcacctaaggcaggcagatcacctgaggtcaggagttcgagaccagcccggccaacatggcgaaaccccatctctactaacaatttaaaaattagccagacgtggtggtggttgcctgtaatcccagccacttgggaggctgaggcaggagaatcacttgaatctgggaggcggaagttgcattgagctgatattgtggcactgcactccaacctgggcaacagagcaagagtctgtctcaaaaaaaaagataaagagtggccatctagggccgggcacggtggctccca

SEQ ID NO: 378761 - DNA, 450 bp, Homo sapiens
ccactttacatgcaagtgtagattaatttcttatttcccccttagtctagcttttaagcccttattccgaggaggccatggtactttttatctaaaccttaggccatccgtcgttccaagttaaatctagcctctccggagccacctcatcactaagataattctgtatctaatccctcatctaagccccttttctagacatcgttttttcttccctgcctcccatccctttccccaaatcattaccataaaagatagctgctcttcttttcttacattgacttaagataaactcatgttttcggctgttcttatcagttttttcttgatttaatactgtccttctaatctccatttataatcactttttattcatttatttttgaaactgaattacaccactgcactccagtgcagtgaatggacaggtgacaaagtgagactgtctca

SEQ ID NO: 378762 - DNA, 341 bp, Homo sapiens
aggatgtttacattttctagggaattgaccgttccatgcagagctacaatatagtacccgtatgtgctcagcagccatatgtggttactgtatatactataccgcatatggctactgagcactcgaagtgttgctagggcaatcctctctcagccttggaggaagatgtaaaatgtaggctgaacaggagcttgatttatgtattttgcaatatcaagttttcaagtactatttaacacataatagatcaataatggcaggaattttagagggccatgttcaggaactgaaaatcaatacataaatatgttctctcaagtaggtctaaagggtttaagata

SEQ ID NO: 378763 - DNA, 590 bp, Homo sapiens
ttacactgagacgacttcttttcttcattatttagggtggtttccctgcaacagttgatggccaaggatatcaaaccttaaactcagaacatggcaggtgagtaaaagttgaccctatttttcaaataaaagatcagtgttctcaaaacttacatatgtagtcttcttaaacagctccctcctccctccaaacaaactaccttgctggtccagcctgaacaacatgcacaaagactttggctcccctagaacaagccattgagccttcctcttgagataggggcatcaagaataaggattcacatgtttattcacaactcaggctcctcaaggggctgggatctccccaattagactcctttgtttcactatgcccacaatctcagaggtgtttgaaattgtctgtactagggaagaaaggattttcaaaaatagccagtcacacagaacagctctggaccaagccattacccaatcccggatgggaagttgcttcacgtttctcttaagttgttacgcagcattgccatggcagcaaaagaggttaaccattaaggaagaacctgttcaactgactgaaccaacaaaaa

SEQ ID NO: 378764 - DNA, 369 bp, Homo sapiens
accctgcctgctgttcgaataattcatattcttactgccaggactggctccaccaacagccctacccccaggccagggtctccacttctgaaaggagccagacagtcagagaggaccctaggctcctccatgtgacatggggttagccacacaggcaagacaggggcagggtccctggatgtgccctaatgacctgatggcccacaggctgctgaacccatggggtgcaagacaggcctgcatgggaactaccacccctccccaggagtgggtgctggggacagggctcgcgagaaacagggctacctgatcgtttcttctttcttgtaatcgtctggttccttaggagaaaaaaaaattgcttctttg

SEQ ID NO: 378765 - DNA, 531 bp, Homo sapiens
atgagcttttctttccccctttcttgtgtaaagtctattagaatttgctagtaaaatttaaaaaggtatgtgacatttcttaagataattgagaaagataaacttctttttcaggagggtccatcttcctgccatttcttgtgactggctataaattccatgcagtgctggaatgtgcttctcacagttagagtgctgagcacctgttttatttcacactcccttgattcctggggtaaatcccatctccgcagcatgggctccagttaaattcattagtggtccagatgtgtgtcccctgtcagctggccaagtaaccccactgtttatcgacaggttctcaggaatcagatagctcgcagtcggccaagaaggacatgctggctgccttgaagtccaggcaggaagctctggaggaaaccctgcgtcagaggctggaggaactgaagaagctgtgtctccgagaagctgtaagcctttcctagctcatcccgttgaaattggtgttgtctgtgatgtcactgatctttc

SEQ ID NO: 378766 - DNA, 490 bp, Homo sapiens
aaactaggtattttgactcaattatggggactgaaagtactgcatgacttgtatgatctgttgctaactcaggtgtctaatcagcaagcctttcggatatattaataagctactaatcgtgtctgtgtctgtgtcagtgtctctctgtaacatgacctctcttctcttcctcctcctgctttcctttgttcagagaagcaacagaaaactcacccattctggatgggtctgagtctccacctcaccaaagtactgatgaatagaggtaccgtaaggggagttttattcctactgcccatgagtctgtggtcccacatgtgttgcttttgtccatgtcatcatttccacaaggatacatctgaatgctgtatttatgccttatttctagatacatggggaactggaactatgtttttagctgaaggttcttacatcaaaattatgatattcctaacactgcttcccagaaaagacccccagagtatgtttt

SEQ ID NO: 378767 - DNA, 472 bp, Homo sapiens
ccaccgtgcccagccattctactaaaacttttaaattaaacagtttaatgtcttttaagtacagcctattcctgtagcatctggccagagtaggttactatccttactcagtttctaaattatttatctatgcacttttctgggatttgccatatagataccactcctcttgtgaaaatccatttgaaggaaactttaaacttagatatttgagcaggaatatttgatgcagtgtcaagagcacgggatttggagttagagaggcccgagaactcacgctgacactgctcctcactggctgggtgaccttgcctggcacagaggaggcaggcaggaaatatctgttcacttaacaaatgaatgaaattcaagttttataatgaaagtcaaatggcaattacagaaatttactttggaaaaaactttggaagtgcaactattctacataagagacattgttagagaaatgaaa

SEQ ID NO: 378768 - DNA, 6816 bp, Homo sapiens
tctgcagccacgagaagcaaagttgacatttctggatcactctccccagacgcgtcacttgcccacaagcgggacacggcagtctcgctgagccagctgtgcagagggacagatggaagaaagctagagatgctgcttcgtgggcgctgaagttgcagaacttgggctggttttctttcttcccatcccccctcctcctgacaaaccacatcttgactcagatggtcgaaagaaaaactctttcagttatttgatatttgggaaccctccaggagaccataacttatttttgagggaggctccttctctccctttgctgggaacacacacacacacacacacacacacacacacacacacacacacacacacacacacagctgtacaccatggtggttcaggctgcagtggctccgaatagatcccaaagacttttactgaaaattccttatggatctctgagaaggcgcagcgttgaaaggatgacggagggccgccgatgtcaagtacatcttcttgatgacaggaagctggaactcctagtacagcccaagctgttggccaaggagcttcttgaccttgtggcttctcacttcaatctgaaggaaaaggagtactttggaatagcattcacagatgaaacgggacacttaaactggcttcagctagatcgaagagtattggaacatgacttccctaaaaagtcaggacccgtggttttatacttttgtgtcaggttctatatagaaagcatttcatacctgaaggataatgctaccattgagcttttctttctgaacgcgaagtcctgcatctacaaggagcttattgacgttgacagcgaagtggtgtttgaattagcttcctatattttacaggaggcaaagggagatttttctagcaatgaagttgtgaggagtgacttgaagaagctgccagcccttcccacccaagccctgaaggagcacccttccctggcctactgtgaagacagagtcattgagcactacaagaaactgaacggtcagacaagaggtcaagcaatcgtaaactacatgagcatcgtggagtctctcccaacctacggggttcactattatgcagtgaaggacaagcagggcataccatggtggctgggcctgagctacaaagggatcttccagtatgactaccatgataaagtgaagccaagaaagatattccaatggagacagttggaaaacctgtacttcagagaaaagaagttttccgtggaagttcatgacccacgcagggcttcagtgacaaggaggacgtttgggcacagcggcattgcagtgcacacgtggtatgcatgtccggcattgatcaagtccatctgggctatggccataagccaacaccagttctatctggacagaaagcagagtaagtccaaaatccatgcagcacgcagcctgagtgagatcgccatcgacctgaccgagacggggacgctgaagacctcgaagctggccaacatgggtagcaaggggaagatcatcagcggcagcagcggcagcctgctgtcttcaggttctcaggaatcagatagctcgcagtcggccaagaaggacatgctggctgccttgaagtccaggcaggaagctctggaggaaaccctgcgtcagaggctggaggaactgaagaagctgtgtctccgagaagctgagctcacgggcaagctgccagtagaatatcccctggatccaggggaggaaccacccattgttcggagaagaataggaacagccttcaaactggatgaacagaaaatcctgcccaaaggagaggaagctgagctggaacgcctggaacgagagtttgccattcagtcccagattacggaggccgcccgccgcctagccagtgaccccaacgtcagcaaaaaactgaagaaacaaaggaaaacctcgtatctgaatgcactgaagaaactgcaggagattgaaaatgcaatcaatgagaaccgcatcaagtctgggaagaaacccacccagagggcttcgctgatcatagacgatggaaacattgccagtgaagacagctccctctcagatgcccttgttcttgaggatgaagactctcaggttaccagcacaatatcccccctacattctcctcacaagggactccctcctcggccaccgtcgcacaacaggcctcctcctccccagtccctggagggactccgacagatgcactatcaccgcaacgactatgacaagtcacccatcaagcccaaaatgtggagtgagtcctctttagatgaaccctatgagaaggtcaagaagcgctcctctcacagccattccagcagccacaagcgcttccccagcacaggaagctgtgcggaagccggcggaggaagcaactccttgcagaacagccccatccgcggcctcccgcactggaactcccagtccagcatgccgtccacgccagacctgcgggtccggagtccccactacgtccattccacgaggtcggtggacatcagccccacccgactgcacagcctcgcactgcactttaggcaccggagctccagcctggagtcccagggcaagctcctgggctcggaaaacgacaccgggagccccgacttctacaccccgcggactcgtagcagcaacggctcagaccccatggacgactgctcgtcgtgcaccagccactcgagctcggagcactactacccggcgcagatgaacgccaactactccacgctggccgaggactcgccgtccaaggcgcgccagaggcagaggcagcggcagcgggcggcgggcgcactgggctcagccagctcgggcagcatgcccaacctggcggcgcgcgggggtgcggggggcgcggggggcgcggggggcggtgtgtacctgcacagccagagccagcccagctcgcagtaccgcatcaaggagtacccgctgtacatcgagggcggcgccacgcccgtggtggtgcgcagcctggagagcgaccaggagggccactacagcgtcaaggctcagttcaagacgtccaactcctacacggcgggcggcctgttcaaggagagctggcgcggcggcggcggcgacgagggcgacacgggccgcctgacgccgtcgcgatcgcagatcctgcggactccgtcgctgggccgcgagggcgcccacgacaagggcgcgggccgtgccgccgtctcagacgagctgcgccagtggtaccagcgttccaccgcctcgcacaaggagcacagccgcctgtcgcacaccagctccacctcctcggacagcggctcgcagtacagcacctcctcccagagcaccttcgtggcgcacagcagggtcaccaggatgccccagatgtgcaaggccacgtcagctgccttacctcaaagccagagaagctcgacaccgtcaagtgaaattggagccacccccccaagcagcccccaccacatcctaacctggcagactgggagctacaatgatagctgtttcctggattcctccctctatccagaactagctgatgtccagtggtacgggcaggaaaaagccaagcccgggaccctcgtgtgagccagcccggcctaatctgaccgcctcaacgccattctgagatcacctcactgcctctcatttgccttacccagacgcaccgtcaccctgcaccagctttggccctcagcactttttttctcctgtctccgcattccctcccccttgaaaacctgactgaggagacattctggaaggttccggtcccactgtgtgtcccctggcgctcttgcccatagagagccagacaccaatcctcaatggcaccttggtggcttccctctgccatgacagcccctaggccaggaaccatcaggggggccagccggcatccaattcctgcggataagtagcgttgggagagaacgggaaaggggacttgagttacagggtgacccagaaagacgattcagctgtgtccagcctgccacccatacgtaggccaaccaagcacttcatgaagaggaggcctcgtggcatattcagtttacacctgaaatattccttgatgggacagcttgtggggatggctatgggggaaggggaggttgagaaaggaagttctcgacaccagaaatgcatcggaggaccacaatcagttctatgctgccaaagattaaaaataaataaaaacataaaaaattaagaggggccaagaggaagacattctttctgcaaggaaatttcttttaaattctgaactgctactacacacaagtgaaagtcaaccctatgtaaactggtgtcctctctctagccctctcccttactggcccacttctctctccgtagagagcctgaaaaactgccccaatgccacggtaaaggcgaggaagtcttggctggcgttgctgactcacagtcgccatccatctggacacaaagagagacctgtgggagtcgtagagggtactgttagccccggtccatgcagggggttcagccgagcccaagactcaaagctgctttcctttcaggatttgtagtaacgtaaggtgataatggccaaaagtggttctctctcattaaaccaaccagtaaaagcgtatcctatttttttgcacaaggtgtttcattttcgtttttatgggaaaccaagggaaaagcacattgcgatccattcagtgtttaactgtcgtggctcattttctgttcgttagcacttgtgtgacaaaagagctcagatccgacttctcctatgtgtcacttattccaagaacccaactatgcccttaggtagaaagatttgactcgtgtgtctactagccaacaggcagagcagggttgaaaaaaatatcagctcccaaagggcccatgtgtctacatcatcagttactgtcatgcaccacatttgtgtgcagataccaaaagaggaggaaagaagaaaaaaattaatgtgtgggagctgcacgtttacatgttttgagctatgcttcaaacacaactggaaagccatcaatcttcaaaggcctcaaaaatacttttatagtaacaagtgcacgactttagttgggttattcaagatggcacaaaaaggtttccgcagaggtggtatgctgtgcttttggcgcaagtggtggggggatggggtgggggtggaatttttttctcactctaatgacttcctattggaaaggcattgacagccagggacaggagccagggtgggggtagttttgtgggaaagcagaactgaagttagcttaagcataaaaacaaagaaaaatcttcgcttttcatgtatgtggaatccaagaataaccataggctctaccagaccagaagggtaaggatggacactaaaatgaaacaaataccaaggtattccttctgctgcagcctggagaccaccgagagtcgagctggggcacacacacacctggccgggacccggcagggacaaggcgggccgtggcctcctccaccaagtctctctagacaattcagggcctgctttccccagctccatgcatggctggactggtgattccagggtgcagaagggattcatattcccagaacgctttaagtgtacacctgcaggataaagagataccggttacattattaaatgattctagggattcactgggggatatttttgttgcttttactttcatggttagagctacaaagaacagtgattttttttttttctcccttccccattcagaaacattatacattgggccatttttctttctcccaaagaagattcatggatagtcagactgaactgtgtgcaacaggaaaagtcaaaagggaaaaggtagctgatgaggttacatggttacatgttctacatcatgcagagtagcttgaaatctagtctggagaaaactggatcaagattctagcccactggagttgcaaggaatgagaggcaaaaattctaaagatttgggttatattttcaacttgggggacagagagaaatggagagcaggaattacagttccaacaaacatcatgatagtctggtagtcaagacagagattaagtaaaacaggttttactgtttagctgagttcagttaatacaaaatgtacataaaacgttagtcctttgagactgacatgattaatgatcagtgtggtgggaaatgatgtagttattgtacacaagcacttgcaaactctttatccctatttctttaaaacaaaataaggtgaaatacgaagtccttggtctgatataaagcccctattggattcttcggatgcgtaaaagaaattgcctgtttcagccagaagactggtgaaaacacatacatcagactatgttgtgagccaggttgattttttattttattatatgcaggtgagtgttgaaactgttaaaattccaatttgttttcattcagtattagtttagttctaaatatagcaaaccccatccaggtgctatcagatgaccagttactgcttagttaactaggtgtaaagttttacatatacattaatgtcaatagtttattacaagttgtgtaaaatggactctagtttaataatgggggaaaaaagattaggttgctcctgaaactgactgtagagcatgtaaaatgattttactggattctgttcaactgtaatcaatgaaaaagatgtacgttgtagacaaagttgcagaattaaaaaaagaaatctgcttttaatttattctttttgtattaagaatttgtatagtatctttacattttgcaaaacagtgttgtcaacacttattaaagcattttcaaaatgaaaag

SEQ ID NO: 378769 - DNA, 6085 bp, Homo sapiens
ggaggaagctcagttcagcactccacgcagatggctaccgctccctcctgagcgctcgctcctctcgctcctctcccctcacccgccgccttccctgctgggtccctctccccggtctccacctctcctccctctcctggaagggaaaagtctgccaagctggggactgccacgaccaaaccaacaaaggccgaccgaaggcggagaacttgaaaagaacttgttttgttccagttaaggaacctgcaggaaaatccacacccacattgcctggttttgaactggagagctgcgtgtgtgtgtgtatgtgtgtgtgtgtgtcaagcaagaggcggaggaggcacagactacggtctctgttttgataaggaaactgccagctgtcgaaagttaaccagcagagaggggaagatggcccaggagccagcccctcctgagttttaaactacactgttttctgtccagatattccaatggagacagttggaaaacctgtacttcagagaaaagaagttttccgtggaagttcatgacccacgcagggcttcagtgacaaggaggacgtttgggcacagcggcattgcagtgcacacgtggtatgcatgtccggcattgatcaagtccatctgggctatggccataagccaacaccagttctatctggacagaaagcagagtaagtccaaaatccatgcagcacgcagcctgagtgagatcgccatcgacctgaccgagacggggacgctgaagacctcgaagctggccaacatgggtagcaaggggaagatcatcagcggcagcagcggcagcctgctgtcttcaggttctcaggaatcagatagctcgcagtcggccaagaaggacatgctggctgccttgaagtccaggcaggaagctctggaggaaaccctgcgtcagaggctggaggaactgaagaagctgtgtctccgagaagctgagctcacgggcaagctgccagtagaatatcccctggatccaggggaggaaccacccattgttcggagaagaataggaacagccttcaaactggatgaacagaaaatcctgcccaaaggagaggaagctgagctggaacgcctggaacgagagtttgccattcagtcccagattacggaggccgcccgccgcctagccagtgaccccaacgtcagcaaaaaactgaagaaacaaaggaaaacctcgtatctgaatgcactgaagaaactgcaggagattgaaaatgcaatcaatgagaaccgcatcaagtctgggaagaaacccacccagagggcttcgctgatcatagacgatggaaacattgccagtgaagacagctccctctcagatgcccttgttcttgaggatgaagactctcaggttaccagcacaatatcccccctacattctcctcacaagggactccctcctcggccaccgtcgcacaacaggcctcctcctccccagtccctggagggactccgacagatgcactatcaccgcaacgactatgacaagtcacccatcaagcccaaaatgtggagtgagtcctctttagatgaaccctatgagaaggtcaagaagcgctcctctcacagccattccagcagccacaagcgcttccccagcacaggaagctgtgcggaagccggcggaggaagcaactccttgcagaacagccccatccgcggcctcccgcactggaactcccagtccagcatgccgtccacgccagacctgcgggtccggagtccccactacgtccattccacgaggtcggtggacatcagccccacccgactgcacagcctcgcactgcactttaggcaccggagctccagcctggagtcccagggcaagctcctgggctcggaaaacgacaccgggagccccgacttctacaccccgcggactcgtagcagcaacggctcagaccccatggacgactgctcgtcgtgcaccagccactcgagctcggagcactactacccggcgcagatgaacgccaactactccacgctggccgaggactcgccgtccaaggcgcgccagaggcagaggcagcggcagcgggcggcgggcgcactgggctcagccagctcgggcagcatgcccaacctggcggcgcgcgggggtgcggggggcgcggggggcgcggggggcggtgtgtacctgcacagccagagccagcccagctcgcagtaccgcatcaaggagtacccgctgtacatcgagggcggcgccacgcccgtggtggtgcgcagcctggagagcgaccaggagggccactacagcgtcaaggctcagttcaagacgtccaactcctacacggcgggcggcctgttcaaggagagctggcgcggcggcggcggcgacgagggcgacacgggccgcctgacgccgtcgcgatcgcagatcctgcggactccgtcgctgggccgcgagggcgcccacgacaagggcgcgggccgtgccgccgtctcagacgagctgcgccagtggtaccagcgttccaccgcctcgcacaaggagcacagccgcctgtcgcacaccagctccacctcctcggacagcggctcgcagtacagcacctcctcccagagcaccttcgtggcgcacagcagggtcaccaggatgccccagatgtgcaaggccacgtcagctgccttacctcaaagccagagaagctcgacaccgtcaagtgaaattggagccacccccccaagcagcccccaccacatcctaacctggcagactgggagctacaatgatagctgtttcctggattcctccctctatccagaactagctgatgtccagtggtacgggcaggaaaaagccaagcccgggaccctcgtgtgagccagcccggcctaatctgaccgcctcaacgccattctgagatcacctcactgcctctcatttgccttacccagacgcaccgtcaccctgcaccagctttggccctcagcactttttttctcctgtctccgcattccctcccccttgaaaacctgactgaggagacattctggaaggttccggtcccactgtgtgtcccctggcgctcttgcccatagagagccagacaccaatcctcaatggcaccttggtggcttccctctgccatgacagcccctaggccaggaaccatcaggggggccagccggcatccaattcctgcggataagtagcgttgggagagaacgggaaaggggacttgagttacagggtgacccagaaagacgattcagctgtgtccagcctgccacccatacgtaggccaaccaagcacttcatgaagaggaggcctcgtggcatattcagtttacacctgaaatattccttgatgggacagcttgtggggatggctatgggggaaggggaggttgagaaaggaagttctcgacaccagaaatgcatcggaggaccacaatcagttctatgctgccaaagattaaaaataaataaaaacataaaaaattaagaggggccaagaggaagacattctttctgcaaggaaatttcttttaaattctgaactgctactacacacaagtgaaagtcaaccctatgtaaactggtgtcctctctctagccctctcccttactggcccacttctctctccgtagagagcctgaaaaactgccccaatgccacggtaaaggcgaggaagtcttggctggcgttgctgactcacagtcgccatccatctggacacaaagagagacctgtgggagtcgtagagggtactgttagccccggtccatgcagggggttcagccgagcccaagactcaaagctgctttcctttcaggatttgtagtaacgtaaggtgataatggccaaaagtggttctctctcattaaaccaaccagtaaaagcgtatcctatttttttgcacaaggtgtttcattttcgtttttatgggaaaccaagggaaaagcacattgcgatccattcagtgtttaactgtcgtggctcattttctgttcgttagcacttgtgtgacaaaagagctcagatccgacttctcctatgtgtcacttattccaagaacccaactatgcccttaggtagaaagatttgactcgtgtgtctactagccaacaggcagagcagggttgaaaaaaatatcagctcccaaagggcccatgtgtctacatcatcagttactgtcatgcaccacatttgtgtgcagataccaaaagaggaggaaagaagaaaaaaattaatgtgtgggagctgcacgtttacatgttttgagctatgcttcaaacacaactggaaagccatcaatcttcaaaggcctcaaaaatacttttatagtaacaagtgcacgactttagttgggttattcaagatggcacaaaaaggtttccgcagaggtggtatgctgtgcttttggcgcaagtggtggggggatggggtgggggtggaatttttttctcactctaatgacttcctattggaaaggcattgacagccagggacaggagccagggtgggggtagttttgtgggaaagcagaactgaagttagcttaagcataaaaacaaagaaaaatcttcgcttttcatgtatgtggaatccaagaataaccataggctctaccagaccagaagggtaaggatggacactaaaatgaaacaaataccaaggtattccttctgctgcagcctggagaccaccgagagtcgagctggggcacacacacacctggccgggacccggcagggacaaggcgggccgtggcctcctccaccaagtctctctagacaattcagggcctgctttccccagctccatgcatggctggactggtgattccagggtgcagaagggattcatattcccagaacgctttaagtgtacacctgcaggataaagagataccggttacattattaaatgattctagggattcactgggggatatttttgttgcttttactttcatggttagagctacaaagaacagtgattttttttttttctcccttccccattcagaaacattatacattgggccatttttctttctcccaaagaagattcatggatagtcagactgaactgtgtgcaacaggaaaagtcaaaagggaaaaggtagctgatgaggttacatggttacatgttctacatcatgcagagtagcttgaaatctagtctggagaaaactggatcaagattctagcccactggagttgcaaggaatgagaggcaaaaattctaaagatttgggttatattttcaacttgggggacagagagaaatggagagcaggaattacagttccaacaaacatcatgatagtctggtagtcaagacagagattaagtaaaacaggttttactgtttagctgagttcagttaatacaaaatgtacataaaacgttagtcctttgagactgacatgattaatgatcagtgtggtgggaaatgatgtagttattgtacacaagcacttgcaaactctttatccctatttctttaaaacaaaataaggtgaaatacgaagtccttggtctgatataaagcccctattggattcttcggatgcgtaaaagaaattgcctgtttcagccagaagactggtgaaaacacatacatcagactatgttgtgagccaggttgattttttattttattatatgcaggtgagtgttgaaactgttaaaattccaatttgttttcattcagtattagtttagttctaaatatagcaaaccccatccaggtgctatcagatgaccagttactgcttagttaactaggtgtaaagttttacatatacattaatgtcaatagtttattacaagttgtgtaaaatggactctagtttaataatgggggaaaaaagattaggttgctcctgaaactgactgtagagcatgtaaaatgattttactggattctgttcaactgtaatcaatgaaaaagatgtacgttgtagacaaagttgcagaattaaaaaaagaaatctgcttttaatttattctttttgtattaagaatttgtatagtatctttacattttgcaaaacagtgttgtcaacacttattaaagcattttcaaaatgaaaag

SEQ ID NO: 378770 - DNA, 5853 bp, Homo sapiens
ggaggaagctcagttcagcactccacgcagatggctaccgctccctcctgagcgctcgctcctctcgctcctctcccctcacccgccgccttccctgctgggtccctctccccggtctccacctctcctccctctcctggaagggaaaagtctgccaagctggggactgccacgaccaaaccaacaaaggccgaccgaaggcggagaacttgaaaagaacttgttttgttccaatattccaatggagacagttggaaaacctgtacttcagagaaaagaagttttccgtggaagttcatgacccacgcagggcttcagtgacaaggaggacgtttgggcacagcggcattgcagtgcacacgtggtatgcatgtccggcattgatcaagtccatctgggctatggccataagccaacaccagttctatctggacagaaagcagagtaagtccaaaatccatgcagcacgcagcctgagtgagatcgccatcgacctgaccgagacggggacgctgaagacctcgaagctggccaacatgggtagcaaggggaagatcatcagcggcagcagcggcagcctgctgtcttcaggttctcaggaatcagatagctcgcagtcggccaagaaggacatgctggctgccttgaagtccaggcaggaagctctggaggaaaccctgcgtcagaggctggaggaactgaagaagctgtgtctccgagaagctgagctcacgggcaagctgccagtagaatatcccctggatccaggggaggaaccacccattgttcggagaagaataggaacagccttcaaactggatgaacagaaaatcctgcccaaaggagaggaagctgagctggaacgcctggaacgagagtttgccattcagtcccagattacggaggccgcccgccgcctagccagtgaccccaacgtcagcaaaaaactgaagaaacaaaggaaaacctcgtatctgaatgcactgaagaaactgcaggagattgaaaatgcaatcaatgagaaccgcatcaagtctgggaagaaacccacccagagggcttcgctgatcatagacgatggaaacattgccagtgaagacagctccctctcagatgcccttgttcttgaggatgaagactctcaggttaccagcacaatatcccccctacattctcctcacaagggactccctcctcggccaccgtcgcacaacaggcctcctcctccccagtccctggagggactccgacagatgcactatcaccgcaacgactatgacaagtcacccatcaagcccaaaatgtggagtgagtcctctttagatgaaccctatgagaaggtcaagaagcgctcctctcacagccattccagcagccacaagcgcttccccagcacaggaagctgtgcggaagccggcggaggaagcaactccttgcagaacagccccatccgcggcctcccgcactggaactcccagtccagcatgccgtccacgccagacctgcgggtccggagtccccactacgtccattccacgaggtcggtggacatcagccccacccgactgcacagcctcgcactgcactttaggcaccggagctccagcctggagtcccagggcaagctcctgggctcggaaaacgacaccgggagccccgacttctacaccccgcggactcgtagcagcaacggctcagaccccatggacgactgctcgtcgtgcaccagccactcgagctcggagcactactacccggcgcagatgaacgccaactactccacgctggccgaggactcgccgtccaaggcgcgccagaggcagaggcagcggcagcgggcggcgggcgcactgggctcagccagctcgggcagcatgcccaacctggcggcgcgcgggggtgcggggggcgcggggggcgcggggggcggtgtgtacctgcacagccagagccagcccagctcgcagtaccgcatcaaggagtacccgctgtacatcgagggcggcgccacgcccgtggtggtgcgcagcctggagagcgaccaggagggccactacagcgtcaaggctcagttcaagacgtccaactcctacacggcgggcggcctgttcaaggagagctggcgcggcggcggcggcgacgagggcgacacgggccgcctgacgccgtcgcgatcgcagatcctgcggactccgtcgctgggccgcgagggcgcccacgacaagggcgcgggccgtgccgccgtctcagacgagctgcgccagtggtaccagcgttccaccgcctcgcacaaggagcacagccgcctgtcgcacaccagctccacctcctcggacagcggctcgcagtacagcacctcctcccagagcaccttcgtggcgcacagcagggtcaccaggatgccccagatgtgcaaggccacgtcagctgccttacctcaaagccagagaagctcgacaccgtcaagtgaaattggagccacccccccaagcagcccccaccacatcctaacctggcagactgggagctacaatgatagctgtttcctggattcctccctctatccagaactagctgatgtccagtggtacgggcaggaaaaagccaagcccgggaccctcgtgtgagccagcccggcctaatctgaccgcctcaacgccattctgagatcacctcactgcctctcatttgccttacccagacgcaccgtcaccctgcaccagctttggccctcagcactttttttctcctgtctccgcattccctcccccttgaaaacctgactgaggagacattctggaaggttccggtcccactgtgtgtcccctggcgctcttgcccatagagagccagacaccaatcctcaatggcaccttggtggcttccctctgccatgacagcccctaggccaggaaccatcaggggggccagccggcatccaattcctgcggataagtagcgttgggagagaacgggaaaggggacttgagttacagggtgacccagaaagacgattcagctgtgtccagcctgccacccatacgtaggccaaccaagcacttcatgaagaggaggcctcgtggcatattcagtttacacctgaaatattccttgatgggacagcttgtggggatggctatgggggaaggggaggttgagaaaggaagttctcgacaccagaaatgcatcggaggaccacaatcagttctatgctgccaaagattaaaaataaataaaaacataaaaaattaagaggggccaagaggaagacattctttctgcaaggaaatttcttttaaattctgaactgctactacacacaagtgaaagtcaaccctatgtaaactggtgtcctctctctagccctctcccttactggcccacttctctctccgtagagagcctgaaaaactgccccaatgccacggtaaaggcgaggaagtcttggctggcgttgctgactcacagtcgccatccatctggacacaaagagagacctgtgggagtcgtagagggtactgttagccccggtccatgcagggggttcagccgagcccaagactcaaagctgctttcctttcaggatttgtagtaacgtaaggtgataatggccaaaagtggttctctctcattaaaccaaccagtaaaagcgtatcctatttttttgcacaaggtgtttcattttcgtttttatgggaaaccaagggaaaagcacattgcgatccattcagtgtttaactgtcgtggctcattttctgttcgttagcacttgtgtgacaaaagagctcagatccgacttctcctatgtgtcacttattccaagaacccaactatgcccttaggtagaaagatttgactcgtgtgtctactagccaacaggcagagcagggttgaaaaaaatatcagctcccaaagggcccatgtgtctacatcatcagttactgtcatgcaccacatttgtgtgcagataccaaaagaggaggaaagaagaaaaaaattaatgtgtgggagctgcacgtttacatgttttgagctatgcttcaaacacaactggaaagccatcaatcttcaaaggcctcaaaaatacttttatagtaacaagtgcacgactttagttgggttattcaagatggcacaaaaaggtttccgcagaggtggtatgctgtgcttttggcgcaagtggtggggggatggggtgggggtggaatttttttctcactctaatgacttcctattggaaaggcattgacagccagggacaggagccagggtgggggtagttttgtgggaaagcagaactgaagttagcttaagcataaaaacaaagaaaaatcttcgcttttcatgtatgtggaatccaagaataaccataggctctaccagaccagaagggtaaggatggacactaaaatgaaacaaataccaaggtattccttctgctgcagcctggagaccaccgagagtcgagctggggcacacacacacctggccgggacccggcagggacaaggcgggccgtggcctcctccaccaagtctctctagacaattcagggcctgctttccccagctccatgcatggctggactggtgattccagggtgcagaagggattcatattcccagaacgctttaagtgtacacctgcaggataaagagataccggttacattattaaatgattctagggattcactgggggatatttttgttgcttttactttcatggttagagctacaaagaacagtgattttttttttttctcccttccccattcagaaacattatacattgggccatttttctttctcccaaagaagattcatggatagtcagactgaactgtgtgcaacaggaaaagtcaaaagggaaaaggtagctgatgaggttacatggttacatgttctacatcatgcagagtagcttgaaatctagtctggagaaaactggatcaagattctagcccactggagttgcaaggaatgagaggcaaaaattctaaagatttgggttatattttcaacttgggggacagagagaaatggagagcaggaattacagttccaacaaacatcatgatagtctggtagtcaagacagagattaagtaaaacaggttttactgtttagctgagttcagttaatacaaaatgtacataaaacgttagtcctttgagactgacatgattaatgatcagtgtggtgggaaatgatgtagttattgtacacaagcacttgcaaactctttatccctatttctttaaaacaaaataaggtgaaatacgaagtccttggtctgatataaagcccctattggattcttcggatgcgtaaaagaaattgcctgtttcagccagaagactggtgaaaacacatacatcagactatgttgtgagccaggttgattttttattttattatatgcaggtgagtgttgaaactgttaaaattccaatttgttttcattcagtattagtttagttctaaatatagcaaaccccatccaggtgctatcagatgaccagttactgcttagttaactaggtgtaaagttttacatatacattaatgtcaatagtttattacaagttgtgtaaaatggactctagtttaataatgggggaaaaaagattaggttgctcctgaaactgactgtagagcatgtaaaatgattttactggattctgttcaactgtaatcaatgaaaaagatgtacgttgtagacaaagttgcagaattaaaaaaagaaatctgcttttaatttattctttttgtattaagaatttgtatagtatctttacattttgcaaaacagtgttgtcaacacttattaaagcattttcaaaatgaaaag

SEQ ID NO: 378771 - DNA, 4632 bp, Homo sapiens
tctgcagccacgagaagcaaagttgacatttctggatcactctccccagacgcgtcacttgcccacaagcgggacacggcagtctcgctgagccagctgtgcagagggacagatggaagaaagctagagatgctgcttcgtgggcgctgaagttgcagaacttgggctggttttctttcttcccatcccccctcctcctgacaaaccacatcttgactcagatggtcgaaagaaaaactctttcagttatttgatatttgggaaccctccaggagaccataacttatttttgagggaggctccttctctccctttgctgggaacacacacacacacacacacacacacacacacacacacacacacacacacacacacagctgtacaccatggtggttcaggctgcagtggctccgaatagatcccaaagacttttactgaaaattccttatggatctctgagaaggcgcagcgttgaaaggatgacggagggccgccgatgtcaagtacatcttcttgatgacaggaagctggaactcctagtacagcccaagctgttggccaaggagcttcttgaccttgtggcttctcacttcaatctgaaggaaaaggagtactttggaatagcattcacagatgaaacgggacacttaaactggcttcagctagatcgaagagtattggaacatgacttccctaaaaagtcaggacccgtggttttatacttttgtgtcaggttctatatagaaagcatttcatacctgaaggataatgctaccattgagcttttctttctgaacgcgaagtcctgcatctacaaggagcttattgacgttgacagcgaagtggtgtttgaattagcttcctatattttacaggaggcaaagggagatttttctagcaatgaagttgtgaggagtgacttgaagaagctgccagcccttcccacccaagccctgaaggagcacccttccctggcctactgtgaagacagagtcattgagcactacaagaaactgaacggtcagacaagaggtcaagcaatcgtaaactacatgagcatcgtggagtctctcccaacctacggggttcactattatgcagtgaaggacaagcagggcataccatggtggctgggcctgagctacaaagggatcttccagtatgactaccatgataaagtgaagccaagaaagatattccaatggagacagttggaaaacctgtacttcagagaaaagaagttttccgtggaagttcatgacccacgcagggcttcagtgacaaggaggacgtttgggcacagcggcattgcagtgcacacgtggtatgcatgtccggcattgatcaagtccatctgggctatggccataagccaacaccagttctatctggacagaaagcagagtaagtccaaaatccatgcagcacgcagcctgagtgagatcgccatcgacctgaccgagacggggacgctgaagacctcgaagctggccaacatgggtagcaaggggaagatcatcagcggcagcagcggcagcctgctgtcttcaggttctcaggaatcagatagctcgcagtcggccaagaaggacatgctggctgccttgaagtccaggcaggaagctctggaggaaaccctgcgtcagaggctggaggaactgaagaagctgtgtctccgagaagctgagctcacgggcaagctgccagtagaatatcccctggatccaggggaggaaccacccattgttcggagaagaataggaacagccttcaaactggatgaacagaaaatcctgcccaaaggagaggaagctgagctggaacgcctggaacgagagtttgccattcagtcccagattacggaggccgcccgccgcctagccagtgaccccaacgtcagcaaaaaactgaagaaacaaaggaaaacctcgtatctgaatgcactgaagaaactgcaggagattgaaaatgcaatcaatgagaaccgcatcaagtctgggaagaaacccacccagagggcttcgctgatcatagacgatggaaacattgccagtgaagacagctccctctcagatgcccttgttcttgaggatgaagactctcaggttaccagcacaatatcccccctacattctcctcacaagggactccctcctcggccaccgtcgcacaacaggcctcctcctccccagtccctggagggactccgacagatgcactatcaccgcaacgactatgacaagtcacccatcaagcccaaaatgtggagtgagtcctctttagatgaaccctatgagaaggtcaagaagcgctcctctcacagccattccagcagccacaagcgcttccccagcacaggaagctgtgcggaagccggcggaggaagcaactccttgcagaacagccccatccgcggcctcccgcactggaactcccagtccagcatgccgtccacgccagacctgcgggtccggagtccccactacgtccattccacgaggtcggtggacatcagccccacccgactgcacagcctcgcactgcactttaggcaccggagctccagcctggagtcccagggcaagctcctgggctcggaaaacgacaccgggagccccgacttctacaccccgcggactcgtagcagcaacggctcagaccccatggacgactgctcgtcgtgcaccagccactcgagctcggagcactactacccggcgcagatgaacgccaactactccacgctggccgaggactcgccgtccaaggcgcgccagaggcagaggcagcggcagcgggcggcgggcgcactgggctcagccagctcgggcagcatgcccaacctggcggcgcgcgggggtgcggggggcgcggggggcgcggggggcggtgtgtacctgcacagccagagccagcccagctcgcagtaccgcatcaaggagtacccgctgtacatcgagggcggcgccacgcccgtggtggtgcgcagcctggagagcgaccaggagggccactacagcgtcaaggctcagttcaagacgtccaactcctacacggcgggcggcctgttcaaggagagctggcgcggcggcggcggcgacgagggcgacacgggccgcctgacgccgtcgcgatcgcagatcctgcggactccgtcgctgggccgcgagggcgcccacgacaagggcgcgggccgtgccgccgtctcagacgagctgcgccagtggtaccagcgttccaccgcctcgcacaaggagcacagccgcctgtcgcacaccagctccacctcctcggacagcggctcgcagtacagcacctcctcccagagcaccttcgtggcgcacagcagggtcaccaggatgccccagatgtgcaaggccacgtcagctgccttacctcaaagccagagaagctcgacaccgtcaagtgaaattggagccacccccccaagcagcccccaccacatcctaacctggcagactgggagctacaatgatagctgtttcctggattcctccctctatccagaactagctgatgtccagtggtacgggcaggaaaaagccaagcccgggaccctcgtgtgagccagcccggcctaatctgaccgcctcaacgccattctgagatcacctcactgcctctcatttgccttacccagacgcaccgtcaccctgcaccagctttggccctcagcactttttttctcctgtctccgcattccctcccccttgaaaacctgactgaggagacattctggaaggttccggtcccactgtgtgtcccctggcgctcttgcccatagagagccagacaccaatcctcaatggcaccttggtggcttccctctgccatgacagcccctaggccaggaaccatcaggggggccagccggcatccaattcctgcggataagtagcgttgggagagaacgggaaaggggacttgagttacagggtgacccagaaagacgattcagctgtgtccagcctgccacccatacgtaggccaaccaagcacttcatgaagaggaggcctcgtggcatattcagtttacacctgaaatattccttgatgggacagcttgtggggatggctatgggggaaggggaggttgagaaaggaagttctcgacaccagaaatgcatcggaggaccacaatcagttctatgctgccaaagattaaaaataaataaaaacataaaaaattaagaggggccaagaggaagacattctttctgcaaggaaatttcttttaaattctgaactgctactacacacaagtgaaagtcaaccctatgtaaactggtgtcctctctctagccctctcccttactggcccacttctctctccgtagagagcctgaaaaactgccccaatgccacggtaaaggcgaggaagtcttggctggcgttgctgactcacagtcgccatccatctggacacaaagagagacctgtgggagtcgtagagggtactgttagccccggtccatgcagggggttcagccgagcccaagactcaaagctgctttcctttcaggatttgtagtaacgtaaggtgataatggccaaaagtggttctctctcattaaaccaaccagtaaaagcgtatcctatttttttgca

SEQ ID NO: 378772 - DNA, 1424 bp, Homo sapiens
gaacgctcacagaacaggcagtgcaattccatgttcctcttaagtatgttagccctaccgggagctgagctggccagtctacttggagaggaaaagtagatctggggaaggtggaagggtcagttcctaagtgacttcctcctcggggatggtaagggcatttgctgatctccagtgactgcctggtgcctcatggtcagactcggctgtctcactcccagatatctgattttgcaaaaagggacacacctatctgcagcaaagaagacactgaccagattgcgagcggtgcttttggatgctctgtagccacccggggcccaggaggactgactcggcagcaggattcgtgcatgggaatcggagaccatggcagtgcagctggtgcccgactcagctctcggcctgctgatgatggagtctcactgtgtcgtgcaggctgcagggcagtggtgccatcttggatcactgcaatctccaatctctgcttcccgggttcaagcgattctcctgcttcatcctcctgagtagctggggttgcaggatgatgctcattccaagattttctgttttatttctgtcttttgcaatcgttggcctgctttgctgccataaatgagggaattgtggctaagagagcaatctgccggaagcatctcctcatccatcggtggacactaaccacagctataaccgggacaactagagacactgtccaagtcctctgtcaaattcacaacttagcttgcccttaggtgtgaatacagactgaccccagggccggaggggctgctgttgtgagcctttcctgctggaggggcctaaggactcagttccctttatctaagacaaaaccgaatggagacagtaagagcccatcacactccaccctccctccctcaccttcttgcagagctggtagagtgtagtggccaagagcaggtcctctgcggtgtcacaattggagacctcttctgaatccatccctcaccaactcagtgaccagagctggttacccaacctctcagtgcttcaggtttggtttgatgttttcaatctctagaatgcaacagtcgtagagttggtgagaagattatgcagctgtgctgaggaaagagtaagagctcaaacatgtcagctgtcattcaaatgtcactacaatggccttttttcaagtgtgatccacttgcaccaaaattacctgaggtgcttgtgacaaggatcttacagattcagtctccacggaaggttccagaagtgttttagtgatcgaggcaggggctctacagtcagacagacccaacttcaaatcttaccttgcaccttagttagatctgcgtgatgtgcaacaagttaatgcatttagcttcttggagtctttgtttcaataaattaagacattaatatctatcttgtttggcaaa

SEQ ID NO: 378773 - DNA, 1749 bp, Homo sapiens
tctgcagccacgagaagcaaagttgacatttctggatcactctccccagacgcgtcacttgcccacaagcgggacacggcagtctcgctgagccagctgtgcagagggacagatggaagaaagctagagatgctgcttcgtgggcgctgaagttgcagaacttgggctggttttctttcttcccatcccccctcctcctgacaaaccacatcttgactcagatggtcgaaagaaaaactctttcagttatttgatatttgggaaccctccaggagaccataacttatttttgagggaggctccttctctccctttgctgggaacacacacacacacacacacacacacacacacacacacacacacacacacacacacagctgtacaccatggtggttcaggctgcagtggctccgaatagatcccaaagacttttactgaaaattccttatggatctctgagaaggcgcagcgttgaaaggatgacggagggccgccgatgtcaagtacatcttcttgatgacaggaagctggaactcctagtacagcccaagctgttggccaaggagcttcttgaccttgtggcttctcacttcaatctgaaggaaaaggagtactttggaatagcattcacagatgaaacgggacacttaaactggcttcagctagatcgaagagtattggaacatgacttccctaaaaagtcaggacccgtggttttatacttttgtgtcaggttctatatagaaagcatttcatacctgaaggataatgctaccattgagcttttctttctgaacgcgaagtcctgcatctacaaggagcttattgacgttgacagcgaagtggtgtttgaattagcttcctatattttacaggaggcaaagggagatttttctagcaatgaagttgtgaggagtgacttgaagaagctgccagcccttcccacccaagccctgaaggagcacccttccctggcctactgtgaagacagagtcattgagcactacaagaaactgaacggtcagacaagaggtcaagcaatcgtaaactacatgagcatcgtggagtctctcccaacctacggggttcactattatgcagtgaaggacaagcagggcataccatggtggctgggcctgagctacaaagggatcttccagtatgactaccatgataaagtgaagccaagaaagatattccaatggagacagttggaaaacctgtacttcagagaaaagaagttttccgtggaagttcatgacccacgcagggcttcagtgacaaggaggacgtttgggcacagcggcattgcagtgcacacgtggtatgcatgtccggcattgatcaagtccatctgggctatggccataagccaacaccagttctatctggacagaaagcagagtaagtccaaaatccatgcagcacgcagcctgagtgagatcgccatcgacctgaccgagacggggacgctgaagacctcgaagctggccaacatgggtagcaaggggaagatcatcagcggcagcagcggcagcctgctgtcttcaggttctcaggaatcagatagctcgcagtcggccaagaaggacatgctggctgccttgaagtccaggcaggaagctctggaggaaaccctgcgtcagaggctggaggaactgaagaagctgtgtctccgagaagctgtaagcctttcctagctcatcccgttgaaattggtgttgtctgtgatgtcactgatctttc

SEQ ID NO: 378774 - DNA, 253 bp, Homo sapiens
agagcgccccttccccccactgctttttattaacagggaagcagatgtggggtctctcagacaagacagcggcccaagtggtatcagagagtgcgattattttctcagagggtgagtgcgtttctgggcattctctctttcagcgcaatgaagttgtgaggagtgacttgaagaagctgccagcccttcccacccaagccctgaaggagcacccttccctggcctactggtaagacccctggagtcttcccca

SEQ ID NO: 378775 - DNA, 673 bp, Homo sapiens
aagtcaaatggcaattacagaaatttactttggaaaaaactttggaagtgcaactattctacataagagacattgttagagaaatgaaatttcatttcttgacctcttacttaggcatagtgcttaatgtgaacatttctagcataagcgttgacctgtatcgaagtgcatgcgtgcatttttgtgtgcgtgtatgtgcgtgtgtgtgtgttctaggaagcagacacgccccactctgatttgtgctcactccgaatgccatttcacatatgcaggagctcacgggcaagctgccagtagaatatcccctggatccaggggaggaaccacccattgttcggagaagaataggaacagccttcaaactggatgaacagaaaatcctgcccaaaggagaggtgcgtccttcctttctgttgttggattctctcatgttatccttgtttttcccattggtcaggccttccaggttttctgtaccaatttcttcatttctgcctaatgccagtattttcgctcataccttttcttgagtgagctggccggtcagtatgtggttcccctcggtaggagtagtttgcttgcatttgcaggcatttgggtgtctgtcgaagttgcttgtctgacgctgtgggtctagcgcaagcagccacgttgagcttggggaaaacat

SEQ ID NO: 378776 - DNA, 496 bp, Homo sapiens
agtcatttgttggtggtatttaatgacgttcagacttcactccattcgtgtctaatcaaaagtgacgcatctcttcccatgcaatcccgcctgcagtggaggtttggcttgccctggtttggtttgactcgtcttgacttgtcttggcaactggggaagagtttcagggtttctcatcacaggggtgaaggtgtgggtttggctgtgtggctccaaggtgcgggtggaggggtgtaggggttctgtctcagcctgtgggaaggatgaccggggctcagttcctctcttcctgtctttgtgcagaagactctcaggttaccagcacaatatcccccctacattctcctcacaagggactccctcctcggccaccgtcgcacaacaggcctcctcctccccagtccctggagggactccgacagatgcactatcaccgcaacgactatgacaagtcacccatcaagcccaaaatgtggagtgagtcctctttagatga

SEQ ID NO: 378777 - DNA, 6820 bp, Homo sapiens
gaacgctcacagaacaggcagtgcaattccatgttcctcttaagtatgttagccctaccgggagctgagctggccagtctacttggagaggaaaagtagatctggggaaggtggaagggtcagttcctaagtgacttcctcctcggggatggtaagggcatttgctgatctccagtgactgcctggtgcctcatggtcagactcggctgtctcactcccagatatctgattttgcaaaaagggacacacctatctgcagcaaagaagacactgaccagattgcgagcggtgcttttggatgctctgtagccacccggggcccaggaggactgactcggcagcaggattcgtgcatgggaatcggagaccatggcagtgcagctggtgcccgactcagctctcggcctgctgatgatgacggagggccgccgatgtcaagtacatcttcttgatgacaggaagctggaactcctagtacagcccaagctgttggccaaggagcttcttgaccttgtggcttctcacttcaatctgaaggaaaaggagtactttggaatagcattcacagatgaaacgggacacttaaactggcttcagctagatcgaagagtattggaacatgacttccctaaaaagtcaggacccgtggttttatacttttgtgtcaggttctatatagaaagcatttcatacctgaaggataatgctaccattgagcttttctttctgaacgcgaagtcctgcatctacaaggagcttattgacgttgacagcgaagtggtgtttgaattagcttcctatattttacaggaggcaaagggagatttttctagcaatgaagttgtgaggagtgacttgaagaagctgccagcccttcccacccaagccctgaaggagcacccttccctggcctactgtgaagacagagtcattgagcactacaagaaactgaacggtcagacaagaggtcaagcaatcgtaaactacatgagcatcgtggagtctctcccaacctacggggttcactattatgcagtgaaggacaagcagggcataccatggtggctgggcctgagctacaaagggatcttccagtatgactaccatgataaagtgaagccaagaaagatattccaatggagacagttggaaaacctgtacttcagagaaaagaagttttccgtggaagttcatgacccacgcagggcttcagtgacaaggaggacgtttgggcacagcggcattgcagtgcacacgtggtatgcatgtccggcattgatcaagtccatctgggctatggccataagccaacaccagttctatctggacagaaagcagagtaagtccaaaatccatgcagcacgcagcctgagtgagatcgccatcgacctgaccgagacggggacgctgaagacctcgaagctggccaacatgggtagcaaggggaagatcatcagcggcagcagcggcagcctgctgtcttcaggttctcaggaatcagatagctcgcagtcggccaagaaggacatgctggctgccttgaagtccaggcaggaagctctggaggaaaccctgcgtcagaggctggaggaactgaagaagctgtgtctccgagaagctgagctcacgggcaagctgccagtagaatatcccctggatccaggggaggaaccacccattgttcggagaagaataggaacagccttcaaactggatgaacagaaaatcctgcccaaaggagaggaagctgagctggaacgcctggaacgagagtttgccattcagtcccagattacggaggccgcccgccgcctagccagtgaccccaacgtcagcaaaaaactgaagaaacaaaggaaaacctcgtatctgaatgcactgaagaaactgcaggagattgaaaatgcaatcaatgagaaccgcatcaagtctgggaagaaacccacccagagggcttcgctgatcatagacgatggaaacattgccagtgaagacagctccctctcagatgcccttgttcttgaggatgaagactctcaggttaccagcacaatatcccccctacattctcctcacaagggactccctcctcggccaccgtcgcacaacaggcctcctcctccccagtccctggagggactccgacagatgcactatcaccgcaacgactatgacaagtcacccatcaagcccaaaatgtggagtgagtcctctttagatgaaccctatgagaaggtcaagaagcgctcctctcacagccattccagcagccacaagcgcttccccagcacaggaagctgtgcggaagccggcggaggaagcaactccttgcagaacagccccatccgcggcctcccgcactggaactcccagtccagcatgccgtccacgccagacctgcgggtccggagtccccactacgtccattccacgaggtcggtggacatcagccccacccgactgcacagcctcgcactgcactttaggcaccggagctccagcctggagtcccagggcaagctcctgggctcggaaaacgacaccgggagccccgacttctacaccccgcggactcgtagcagcaacggctcagaccccatggacgactgctcgtcgtgcaccagccactcgagctcggagcactactacccggcgcagatgaacgccaactactccacgctggccgaggactcgccgtccaaggcgcgccagaggcagaggcagcggcagcgggcggcgggcgcactgggctcagccagctcgggcagcatgcccaacctggcggcgcgcgggggtgcggggggcgcggggggcgcggggggcggtgtgtacctgcacagccagagccagcccagctcgcagtaccgcatcaaggagtacccgctgtacatcgagggcggcgccacgcccgtggtggtgcgcagcctggagagcgaccaggagggccactacagcgtcaaggctcagttcaagacgtccaactcctacacggcgggcggcctgttcaaggagagctggcgcggcggcggcggcgacgagggcgacacgggccgcctgacgccgtcgcgatcgcagatcctgcggactccgtcgctgggccgcgagggcgcccacgacaagggcgcgggccgtgccgccgtctcagacgagctgcgccagtggtaccagcgttccaccgcctcgcacaaggagcacagccgcctgtcgcacaccagctccacctcctcggacagcggctcgcagtacagcacctcctcccagagcaccttcgtggcgcacagcagggtcaccaggatgccccagatgtgcaaggccacgtcagctgccttacctcaaagccagagaagctcgacaccgtcaagtgaaattggagccacccccccaagcagcccccaccacatcctaacctggcagactggagaagcaacagaaaactcacccattctggatgggtctgagtctccacctcaccaaagtactgatgaatagaggagctacaatgatagctgtttcctggattcctccctctatccagaactagctgatgtccagtggtacgggcaggaaaaagccaagcccgggaccctcgtgtgagccagcccggcctaatctgaccgcctcaacgccattctgagatcacctcactgcctctcatttgccttacccagacgcaccgtcaccctgcaccagctttggccctcagcactttttttctcctgtctccgcattccctcccccttgaaaacctgactgaggagacattctggaaggttccggtcccactgtgtgtcccctggcgctcttgcccatagagagccagacaccaatcctcaatggcaccttggtggcttccctctgccatgacagcccctaggccaggaaccatcaggggggccagccggcatccaattcctgcggataagtagcgttgggagagaacgggaaaggggacttgagttacagggtgacccagaaagacgattcagctgtgtccagcctgccacccatacgtaggccaaccaagcacttcatgaagaggaggcctcgtggcatattcagtttacacctgaaatattccttgatgggacagcttgtggggatggctatgggggaaggggaggttgagaaaggaagttctcgacaccagaaatgcatcggaggaccacaatcagttctatgctgccaaagattaaaaataaataaaaacataaaaaattaagaggggccaagaggaagacattctttctgcaaggaaatttcttttaaattctgaactgctactacacacaagtgaaagtcaaccctatgtaaactggtgtcctctctctagccctctcccttactggcccacttctctctccgtagagagcctgaaaaactgccccaatgccacggtaaaggcgaggaagtcttggctggcgttgctgactcacagtcgccatccatctggacacaaagagagacctgtgggagtcgtagagggtactgttagccccggtccatgcagggggttcagccgagcccaagactcaaagctgctttcctttcaggatttgtagtaacgtaaggtgataatggccaaaagtggttctctctcattaaaccaaccagtaaaagcgtatcctatttttttgcacaaggtgtttcattttcgtttttatgggaaaccaagggaaaagcacattgcgatccattcagtgtttaactgtcgtggctcattttctgttcgttagcacttgtgtgacaaaagagctcagatccgacttctcctatgtgtcacttattccaagaacccaactatgcccttaggtagaaagatttgactcgtgtgtctactagccaacaggcagagcagggttgaaaaaaatatcagctcccaaagggcccatgtgtctacatcatcagttactgtcatgcaccacatttgtgtgcagataccaaaagaggaggaaagaagaaaaaaattaatgtgtgggagctgcacgtttacatgttttgagctatgcttcaaacacaactggaaagccatcaatcttcaaaggcctcaaaaatacttttatagtaacaagtgcacgactttagttgggttattcaagatggcacaaaaaggtttccgcagaggtggtatgctgtgcttttggcgcaagtggtggggggatggggtgggggtggaatttttttctcactctaatgacttcctattggaaaggcattgacagccagggacaggagccagggtgggggtagttttgtgggaaagcagaactgaagttagcttaagcataaaaacaaagaaaaatcttcgcttttcatgtatgtggaatccaagaataaccataggctctaccagaccagaagggtaaggatggacactaaaatgaaacaaataccaaggtattccttctgctgcagcctggagaccaccgagagtcgagctggggcacacacacacctggccgggacccggcagggacaaggcgggccgtggcctcctccaccaagtctctctagacaattcagggcctgctttccccagctccatgcatggctggactggtgattccagggtgcagaagggattcatattcccagaacgctttaagtgtacacctgcaggataaagagataccggttacattattaaatgattctagggattcactgggggatatttttgttgcttttactttcatggttagagctacaaagaacagtgattttttttttttctcccttccccattcagaaacattatacattgggccatttttctttctcccaaagaagattcatggatagtcagactgaactgtgtgcaacaggaaaagtcaaaagggaaaaggtagctgatgaggttacatggttacatgttctacatcatgcagagtagcttgaaatctagtctggagaaaactggatcaagattctagcccactggagttgcaaggaatgagaggcaaaaattctaaagatttgggttatattttcaacttgggggacagagagaaatggagagcaggaattacagttccaacaaacatcatgatagtctggtagtcaagacagagattaagtaaaacaggttttactgtttagctgagttcagttaatacaaaatgtacataaaacgttagtcctttgagactgacatgattaatgatcagtgtggtgggaaatgatgtagttattgtacacaagcacttgcaaactctttatccctatttctttaaaacaaaataaggtgaaatacgaagtccttggtctgatataaagcccctattggattcttcggatgcgtaaaagaaattgcctgtttcagccagaagactggtgaaaacacatacatcagactatgttgtgagccaggttgattttttattttattatatgcaggtgagtgttgaaactgttaaaattccaatttgttttcattcagtattagtttagttctaaatatagcaaaccccatccaggtgctatcagatgaccagttactgcttagttaactaggtgtaaagttttacatatacattaatgtcaatagtttattacaagttgtgtaaaatggactctagtttaataatgggggaaaaaagattaggttgctcctgaaactgactgtagagcatgtaaaatgattttactggattctgttcaactgtaatcaatgaaaaagatgtacgttgtagacaaagttgcagaattaaaaaaagaaatctgcttttaatttattctttttgtattaagaatttgtatagtatctttacattttgcaaaacagtgttgtcaacacttattaaagcattttcaaaatgaaaag

SEQ ID NO: 378778 - DNA, 1763 bp, Homo sapiens
tctgcagccacgagaagcaaagttgacatttctggatcactctccccagacgcgtcacttgcccacaagcgggacacggcagtctcgctgagccagctgtgcagagggacagatggaagaaagctagagatgctgcttcgtgggcgctgaagttgcagaacttgggctggttttctttcttcccatcccccctcctcctgacaaaccacatcttgactcagatggtcgaaagaaaaactctttcagttatttgatatttgggaaccctccaggagaccataacttatttttgagggaggctccttctctccctttgctgggaacacacacacacacacacacacacacacacacacacacacacacacacacacacacagctgtacaccatggtggttcaggctgcagtggctccgaatagatcccaaagacttttactgaaaattccttatggatctctgagaaggcgcagcgttgaaaggatgacggagggccgccgatgtcaagtacatcttcttgatgacaggaagctggaactcctagtacagcccaagctgttggccaaggagcttcttgaccttgtggcttctcacttcaatctgaaggaaaaggagtactttggaatagcattcacagatgaaacgggacacttaaactggcttcagctagatcgaagagtattggaacatgacttccctaaaaagtcaggacccgtggttttatacttttgtgtcaggttctatatagaaagcatttcatacctgaaggataatgctaccattgagcttttctttctgaacgcgaagtcctgcatctacaaggagcttattgacgttgacagcgaagtggtgtttgaattagcttcctatattttacaggaggcaaagggagatttttctagcaatgaagttgtgaggagtgacttgaagaagctgccagcccttcccacccaagccctgaaggagcacccttccctggcctactgtgaagacagagtcattgagcactacaagaaactgaacggtcagacaagaggtcaagcaatcgtaaactacatgagcatcgtggagtctctcccaacctacggggttcactattatgcagtgaaggacaagcagggcataccatggtggctgggcctgagctacaaagggatcttccagtatgactaccatgataaagtgaagccaagaaagatattccaatggagacagttggaaaacctgtacttcagagaaaagaagttttccgtggaagttcatgacccacgcagggcttcagtgacaaggaggacgtttgggcacagcggcattgcagtgcacacgtggtatgcatgtccggcattgatcaagtccatctgggctatggccataagccaacaccagttctatctggacagaaagcagagtaagtccaaaatccatgcagcacgcagcctgagtgagatcgccatcgacctgaccgagacggggacgctgaagacctcgaagctggccaacatgggtagcaaggggaagatcatcagcggcagcagcggcagcctgctgtcttcaggtaggcagaggccagctggagggacgccccctgagcatggctgggaccccagaggggacccaggaaggtggggagagctgcagctggggagactgcagggcaagctgctccaaagctggctttgctttccagaccaaggttgggatccaaatgcgaatctgagaaaactgctcccaggaatcaaatagtggaagggaaaaaaaaaaaaa

SEQ ID NO: 378779 - DNA, 6029 bp, Homo sapiens
tccggtaccataaggcgcgtactgcgtctacaaggagcttattgacgttgacagcgaagtggtgtttgaattagcttcctatattttacaggaggcaaagggagatttttctagcaatgaagttgtgaggagtgacttgaagaagctgccagcccttcccacccaagccctgaaggagcacccttccctggcctactgtgaagacagagtcattgagcactacaagaaactgaacggtcagacaagaggtcaagcaatcgtaaactacatgagcatcgtggagtctctcccaacctacggggttcactattatgcagtgaaggacaagcagggcataccatggtggctgggcctgagctacaaagggatcttccagtatgactaccatgataaagtgaagccaagaaagatattccaatggagacagttggaaaacctgtacttcagagaaaagaagttttccgtggaagttcatgacccacgcagggcttcagtgacaaggaggacgtttgggcacagcggcattgcagtgcacacgtggtatgcatgtccggcattgatcaagtccatctgggctatggccataagccaacaccagttctatctggacagaaagcagagtaagtccaaaatccatgcagcacgcagcctgagtgagatcgccatcgacctgaccgagacggggacgctgaagacctcgaagctggccaacatgggtagcaaggggaagatcatcagcggcagcagcggcagcctgctgtcttcaggttctcaggaatcagatagctcgcagtcggccaagaaggacatgctggctgccttgaagtccaggcaggaagctctggaggaaaccctgcgtcagaggctggaggaactgaagaagctgtgtctccgagaagctgagctcacgggcaagctgccagtagaatatcccctggatccaggggaggaaccacccattgttcggagaagaataggaacagccttcaaactggatgaacagaaaatcctgcccaaaggagaggaagctgagctggaacgcctggaacgagagtttgccattcagtcccagattacggaggccgcccgccgcctagccagtgaccccaacgtcagcaaaaaactgaagaaacaaaggaaaacctcgtatctgaatgcactgaagaaactgcaggagattgaaaatgcaatcaatgagaaccgcatcaagtctgggaagaaacccacccagagggcttcgctgatcatagacgatggaaacattgccagtgaagacagctccctctcagatgcccttgttcttgaggatgaagactctcaggttaccagcacaatatcccccctacattctcctcacaagggactccctcctcggccaccgtcgcacaacaggcctcctcctccccagtccctggagggactccgacagatgcactatcaccgcaacgactatgacaagtcacccatcaagcccaaaatgtggagtgagtcctctttagatgaaccctatgagaaggtcaagaagcgctcctctcacagccattccagcagccacaagcgcttccccagcacaggaagctgtgcggaagccggcggaggaagcaactccttgcagaacagccccatccgcggcctcccgcactggaactcccagtccagcatgccgtccacgccagacctgcgggtccggagtccccactacgtccattccacgaggtcggtggacatcagccccacccgactgcacagcctcgcactgcactttaggcaccggagctccagcctggagtcccagggcaagctcctgggctcggaaaacgacaccgggagccccgacttctacaccccgcggactcgtagcagcaacggctcagaccccatggacgactgctcgtcgtgcaccagccactcgagctcggagcactactacccggcgcagatgaacgccaactactccacgctggccgaggactcgccgtccaaggcgcgccagaggcagaggcagcggcagcgggcggcgggcgcactgggctcagccagctcgggcagcatgcccaacctggcggcgcgcgggggtgcggggggcgcggggggcgcggggggcggtgtgtacctgcacagccagagccagcccagctcgcagtaccgcatcaaggagtacccgctgtacatcgagggcggcgccacgcccgtggtggtgcgcagcctggagagcgaccaggagggccactacagcgtcaaggctcagttcaagacgtccaactcctacacggcgggcggcctgttcaaggagagctggcgcggcggcggcggcgacgagggcgacacgggccgcctgacgccgtcgcgatcgcagatcctgcggactccgtcgctgggccgcgagggcgcccacgacaagggcgcgggccgtgccgccgtctcagacgagctgcgccagtggtaccagcgttccaccgcctcgcacaaggagcacagccgcctgtcgcacaccagctccacctcctcggacagcggctcgcagtacagcacctcctcccagagcaccttcgtggcgcacagcagggtcaccaggatgccccagatgtgcaaggccacgtcagctgccttacctcaaagccagagaagctcgacaccgtcaagtgaaattggagccacccccccaagcagcccccaccacatcctaacctggcagactgggagctacaatgatagctgtttcctggattcctccctctatccagaactagctgatgtccagtggtacgggcaggaaaaagccaagcccgggaccctcgtgtgagccagcccggcctaatctgaccgcctcaacgccattctgagatcacctcactgcctctcatttgccttacccagacgcaccgtcaccctgcaccagctttggccctcagcactttttttctcctgtctccgcattccctcccccttgaaaacctgactgaggagacattctggaaggttccggtcccactgtgtgtcccctggcgctcttgcccatagagagccagacaccaatcctcaatggcaccttggtggcttccctctgccatgacagcccctaggccaggaaccatcaggggggccagccggcatccaattcctgcggataagtagcgttgggagagaacgggaaaggggacttgagttacagggtgacccagaaagacgattcagctgtgtccagcctgccacccatacgtaggccaaccaagcacttcatgaagaggaggcctcgtggcatattcagtttacacctgaaatattccttgatgggacagcttgtggggatggctatgggggaaggggaggttgagaaaggaagttctcgacaccagaaatgcatcggaggaccacaatcagttctatgctgccaaagattaaaaataaataaaaacataaaaaattaagaggggccaagaggaagacattctttctgcaaggaaatttcttttaaattctgaactgctactacacacaagtgaaagtcaaccctatgtaaactggtgtcctctctctagccctctcccttactggcccacttctctctccgtagagagcctgaaaaactgccccaatgccacggtaaaggcgaggaagtcttggctggcgttgctgactcacagtcgccatccatctggacacaaagagagacctgtgggagtcgtagagggtactgttagccccggtccatgcagggggttcagccgagcccaagactcaaagctgctttcctttcaggatttgtagtaacgtaaggtgataatggccaaaagtggttctctctcattaaaccaaccagtaaaagcgtatcctatttttttgcacaaggtgtttcattttcgtttttatgggaaaccaagggaaaagcacattgcgatccattcagtgtttaactgtcgtggctcattttctgttcgttagcacttgtgtgacaaaagagctcagatccgacttctcctatgtgtcacttattccaagaacccaactatgcccttaggtagaaagatttgactcgtgtgtctactagccaacaggcagagcagggttgaaaaaaatatcagctcccaaagggcccatgtgtctacatcatcagttactgtcatgcaccacatttgtgtgcagataccaaaagaggaggaaagaagaaaaaaattaatgtgtgggagctgcacgtttacatgttttgagctatgcttcaaacacaactggaaagccatcaatcttcaaaggcctcaaaaatacttttatagtaacaagtgcacgactttagttgggttattcaagatggcacaaaaaggtttccgcagaggtggtatgctgtgcttttggcgcaagtggtggggggatggggtgggggtggaatttttttctcactctaatgacttcctattggaaaggcattgacagccagggacaggagccagggtgggggtagttttgtgggaaagcagaactgaagttagcttaagcataaaaacaaagaaaaatcttcgcttttcatgtatgtggaatccaagaataaccataggctctaccagaccagaagggtaaggatggacactaaaatgaaacaaataccaaggtattccttctgctgcagcctggagaccaccgagagtcgagctggggcacacacacacctggccgggacccggcagggacaaggcgggccgtggcctcctccaccaagtctctctagacaattcagggcctgctttccccagctccatgcatggctggactggtgattccagggtgcagaagggattcatattcccagaacgctttaagtgtacacctgcaggataaagagataccggttacattattaaatgattctagggattcactgggggatatttttgttgcttttactttcatggttagagctacaaagaacagtgattttttttttttctcccttccccattcagaaacattatacattgggccatttttctttctcccaaagaagattcatggatagtcagactgaactgtgtgcaacaggaaaagtcaaaagggaaaaggtagctgatgaggttacatggttacatgttctacatcatgcagagtagcttgaaatctagtctggagaaaactggatcaagattctagcccactggagttgcaaggaatgagaggcaaaaattctaaagatttgggttatattttcaacttgggggacagagagaaatggagagcaggaattacagttccaacaaacatcatgatagtctggtagtcaagacagagattaagtaaaacaggttttactgtttagctgagttcagttaatacaaaatgtacataaaacgttagtcctttgagactgacatgattaatgatcagtgtggtgggaaatgatgtagttattgtacacaagcacttgcaaactctttatccctatttctttaaaacaaaataaggtgaaatacgaagtccttggtctgatataaagcccctattggattcttcggatgcgtaaaagaaattgcctgtttcagccagaagactggtgaaaacacatacatcagactatgttgtgagccaggttgattttttattttattatatgcaggtgagtgttgaaactgttaaaattccaatttgttttcattcagtattagtttagttctaaatatagcaaaccccatccaggtgctatcagatgaccagttactgcttagttaactaggtgtaaagttttacatatacattaatgtcaatagtttattacaagttgtgtaaaatggactctagtttaataatgggggaaaaaagattaggttgctcctgaaactgactgtagagcatgtaaaatgattttactggattctgttcaactgtaatcaatgaaaaagatgtacgttgtagacaaagttgcagaattaaaaaaagaaatctgcttttaatttattctttttgtattaagaatttgtatagtatctttacattttgcaaaacagtgttgtcaacacttattaaagcattttcaaaatgaaaag

SEQ ID NO: 378780 - DNA, 5598 bp, Homo sapiens
atgagcttttctttccccctttcttgtgtaaagtctattagaatttgctagtaaaatttaaaaaggtatgtgacatttcttaagataattgagaaagataaacttctttttcaggagggtccatcttcctgccatttcttgtgactggctataaattccatgcagtgctggaatgtgcttctcacagttagagtgctgagcacctgttttatttcacactcccttgattcctggggtaaatcccatctccgcagcatgggctccagttaaattcattagtggtccagatgtgtgtcccctgtcagctggccaagtaaccccactgtttatcgacaggttctcaggaatcagatagctcgcagtcggccaagaaggacatgctggctgccttgaagtccaggcaggaagctctggaggaaaccctgcgtcagaggctggaggaactgaagaagctgtgtctccgagaagctgagctcacgggcaagctgccagtagaatatcccctggatccaggggaggaaccacccattgttcggagaagaataggaacagccttcaaactggatgaacagaaaatcctgcccaaaggagaggaagctgagctggaacgcctggaacgagagtttgccattcagtcccagattacggaggccgcccgccgcctagccagtgaccccaacgtcagcaaaaaactgaagaaacaaaggaaaacctcgtatctgaatgcactgaagaaactgcaggagattgaaaatgcaatcaatgagaaccgcatcaagtctgggaagaaacccacccagagggcttcgctgatcatagacgatggaaacattgccagtgaagacagctccctctcagatgcccttgttcttgaggatgaagactctcaggttaccagcacaatatcccccctacattctcctcacaagggactccctcctcggccaccgtcgcacaacaggcctcctcctccccagtccctggagggactccgacagatgcactatcaccgcaacgactatgacaagtcacccatcaagcccaaaatgtggagtgagtcctctttagatgaaccctatgagaaggtcaagaagcgctcctctcacagccattccagcagccacaagcgcttccccagcacaggaagctgtgcggaagccggcggaggaagcaactccttgcagaacagccccatccgcggcctcccgcactggaactcccagtccagcatgccgtccacgccagacctgcgggtccggagtccccactacgtccattccacgaggtcggtggacatcagccccacccgactgcacagcctcgcactgcactttaggcaccggagctccagcctggagtcccagggcaagctcctgggctcggaaaacgacaccgggagccccgacttctacaccccgcggactcgtagcagcaacggctcagaccccatggacgactgctcgtcgtgcaccagccactcgagctcggagcactactacccggcgcagatgaacgccaactactccacgctggccgaggactcgccgtccaaggcgcgccagaggcagaggcagcggcagcgggcggcgggcgcactgggctcagccagctcgggcagcatgcccaacctggcggcgcgcgggggtgcggggggcgcggggggcgcggggggcggtgtgtacctgcacagccagagccagcccagctcgcagtaccgcatcaaggagtacccgctgtacatcgagggcggcgccacgcccgtggtggtgcgcagcctggagagcgaccaggagggccactacagcgtcaaggctcagttcaagacgtccaactcctacacggcgggcggcctgttcaaggagagctggcgcggcggcggcggcgacgagggcgacacgggccgcctgacgccgtcgcgatcgcagatcctgcggactccgtcgctgggccgcgagggcgcccacgacaagggcgcgggccgtgccgccgtctcagacgagctgcgccagtggtaccagcgttccaccgcctcgcacaaggagcacagccgcctgtcgcacaccagctccacctcctcggacagcggctcgcagtacagcacctcctcccagagcaccttcgtggcgcacagcagggtcaccaggatgccccagatgtgcaaggccacgtcagctgccttacctcaaagccagagaagctcgacaccgtcaagtgaaattggagccacccccccaagcagcccccaccacatcctaacctggcagactgggagctacaatgatagctgtttcctggattcctccctctatccagaactagctgatgtccagtggtacgggcaggaaaaagccaagcccgggaccctcgtgtgagccagcccggcctaatctgaccgcctcaacgccattctgagatcacctcactgcctctcatttgccttacccagacgcaccgtcaccctgcaccagctttggccctcagcactttttttctcctgtctccgcattccctcccccttgaaaacctgactgaggagacattctggaaggttccggtcccactgtgtgtcccctggcgctcttgcccatagagagccagacaccaatcctcaatggcaccttggtggcttccctctgccatgacagcccctaggccaggaaccatcaggggggccagccggcatccaattcctgcggataagtagcgttgggagagaacgggaaaggggacttgagttacagggtgacccagaaagacgattcagctgtgtccagcctgccacccatacgtaggccaaccaagcacttcatgaagaggaggcctcgtggcatattcagtttacacctgaaatattccttgatgggacagcttgtggggatggctatgggggaaggggaggttgagaaaggaagttctcgacaccagaaatgcatcggaggaccacaatcagttctatgctgccaaagattaaaaataaataaaaacataaaaaattaagaggggccaagaggaagacattctttctgcaaggaaatttcttttaaattctgaactgctactacacacaagtgaaagtcaaccctatgtaaactggtgtcctctctctagccctctcccttactggcccacttctctctccgtagagagcctgaaaaactgccccaatgccacggtaaaggcgaggaagtcttggctggcgttgctgactcacagtcgccatccatctggacacaaagagagacctgtgggagtcgtagagggtactgttagccccggtccatgcagggggttcagccgagcccaagactcaaagctgctttcctttcaggatttgtagtaacgtaaggtgataatggccaaaagtggttctctctcattaaaccaaccagtaaaagcgtatcctatttttttgcacaaggtgtttcattttcgtttttatgggaaaccaagggaaaagcacattgcgatccattcagtgtttaactgtcgtggctcattttctgttcgttagcacttgtgtgacaaaagagctcagatccgacttctcctatgtgtcacttattccaagaacccaactatgcccttaggtagaaagatttgactcgtgtgtctactagccaacaggcagagcagggttgaaaaaaatatcagctcccaaagggcccatgtgtctacatcatcagttactgtcatgcaccacatttgtgtgcagataccaaaagaggaggaaagaagaaaaaaattaatgtgtgggagctgcacgtttacatgttttgagctatgcttcaaacacaactggaaagccatcaatcttcaaaggcctcaaaaatacttttatagtaacaagtgcacgactttagttgggttattcaagatggcacaaaaaggtttccgcagaggtggtatgctgtgcttttggcgcaagtggtggggggatggggtgggggtggaatttttttctcactctaatgacttcctattggaaaggcattgacagccagggacaggagccagggtgggggtagttttgtgggaaagcagaactgaagttagcttaagcataaaaacaaagaaaaatcttcgcttttcatgtatgtggaatccaagaataaccataggctctaccagaccagaagggtaaggatggacactaaaatgaaacaaataccaaggtattccttctgctgcagcctggagaccaccgagagtcgagctggggcacacacacacctggccgggacccggcagggacaaggcgggccgtggcctcctccaccaagtctctctagacaattcagggcctgctttccccagctccatgcatggctggactggtgattccagggtgcagaagggattcatattcccagaacgctttaagtgtacacctgcaggataaagagataccggttacattattaaatgattctagggattcactgggggatatttttgttgcttttactttcatggttagagctacaaagaacagtgattttttttttttctcccttccccattcagaaacattatacattgggccatttttctttctcccaaagaagattcatggatagtcagactgaactgtgtgcaacaggaaaagtcaaaagggaaaaggtagctgatgaggttacatggttacatgttctacatcatgcagagtagcttgaaatctagtctggagaaaactggatcaagattctagcccactggagttgcaaggaatgagaggcaaaaattctaaagatttgggttatattttcaacttgggggacagagagaaatggagagcaggaattacagttccaacaaacatcatgatagtctggtagtcaagacagagattaagtaaaacaggttttactgtttagctgagttcagttaatacaaaatgtacataaaacgttagtcctttgagactgacatgattaatgatcagtgtggtgggaaatgatgtagttattgtacacaagcacttgcaaactctttatccctatttctttaaaacaaaataaggtgaaatacgaagtccttggtctgatataaagcccctattggattcttcggatgcgtaaaagaaattgcctgtttcagccagaagactggtgaaaacacatacatcagactatgttgtgagccaggttgattttttattttattatatgcaggtgagtgttgaaactgttaaaattccaatttgttttcattcagtattagtttagttctaaatatagcaaaccccatccaggtgctatcagatgaccagttactgcttagttaactaggtgtaaagttttacatatacattaatgtcaatagtttattacaagttgtgtaaaatggactctagtttaataatgggggaaaaaagattaggttgctcctgaaactgactgtagagcatgtaaaatgattttactggattctgttcaactgtaatcaatgaaaaagatgtacgttgtagacaaagttgcagaattaaaaaaagaaatctgcttttaatttattctttttgtattaagaatttgtatagtatctttacattttgcaaaacagtgttgtcaacacttattaaagcattttcaaaatgaaaag

SEQ ID NO: 378781 - DNA, 4219 bp, Homo sapiens
tctgcagccacgagaagcaaagttgacatttctggatcactctccccagacgcgtcacttgcccacaagcgggacacggcagtctcgctgagccagctgtgcagagggacagatggaagaaagctagagatgctgcttcgtgggcgctgaagttgcagaacttgggctggttttctttcttcccatcccccctcctcctgacaaaccacatcttgactcagatggtcgaaagaaaaactctttcagttatttgatatttgggaaccctccaggagaccataacttatttttgagggaggctccttctctccctttgctgggaacacacacacacacacacacacacacacacacacacacacacacacacacacacacagctgtacaccatggtggttcaggctgcagtggctccgaatagatcccaaagacttttactgaaaattccttatggatctctgagaaggcgcagcgttgaaaggatgacggagggccgccgatgtcaagtacatcttcttgatgacaggaagctggaactcctagtacagcccaagctgttggccaaggagcttcttgaccttgtggcttctcacttcaatctgaaggaaaaggagtactttggaatagcattcacagatgaaacgggacacttaaactggcttcagctagatcgaagagtattggaacatgacttccctaaaaagtcaggacccgtggttttatacttttgtgtcaggttctatatagaaagcatttcatacctgaaggataatgctaccattgagcttttctttctgaacgcgaagtcctgcatctacaaggagcttattgacgttgacagcgaagtggtgtttgaattagcttcctatattttacaggaggcaaagggagatttttctagcaatgaagttgtgaggagtgacttgaagaagctgccagcccttcccacccaagccctgaaggagcacccttccctggcctactgtgaagacagagtcattgagcactacaagaaactgaacggtcagacaagaggtcaagcaatcgtaaactacatgagcatcgtggagtctctcccaacctacggggttcactattatgcagtgaaggacaagcagggcataccatggtggctgggcctgagctacaaagggatcttccagtatgactaccatgataaagtgaagccaagaaagatattccaatggagacagttggaaaacctgtacttcagagaaaagaagttttccgtggaagttcatgacccacgcagggcttcagtgacaaggaggacgtttgggcacagcggcattgcagtgcacacgtggtatgcatgtccggcattgatcaagtccatctgggctatggccataagccaacaccagttctatctggacagaaagcagagtaagtccaaaatccatgcagcacgcagcctgagtgagatcgccatcgacctgaccgagacggggacgctgaagacctcgaagctggccaacatgggtagcaaggggaagatcatcagcggcagcagcggcagcctgctgtcttcaggttctcaggaatcagatagctcgcagtcggccaagaaggacatgctggctgccttgaagtccaggcaggaagctctggaggaaaccctgcgtcagaggctggaggaactgaagaagctgtgtctccgagaagctgagctcacgggcaagctgccagtagaatatcccctggatccaggggaggaaccacccattgttcggagaagaataggaacagccttcaaactggatgaacagaaaatcctgcccaaaggagaggaagctgagctggaacgcctggaacgagagtttgccattcagtcccagattacggaggccgcccgccgcctagccagtgaccccaacgtcagcaaaaaactgaagaaacaaaggaaaacctcgtatctgaatgcactgaagaaactgcaggagattgaaaatgcaatcaatgagaaccgcatcaagtctgggaagaaacccacccagagggcttcgctgatcatagacgatggaaacattgccagtgaagacagctccctctcagatgcccttgttcttgaggatgaagactctcaggttaccagcacaatatcccccctacattctcctcacaagggactccctcctcggccaccgtcgcacaacaggcctcctcctccccagtccctggagggactccgacagatgcactatcaccgcaacgactatgacaagtcacccatcaagcccaaaatgtggagtgagtcctctttagatgaaccctatgagaaggtcaagaagcgctcctctcacagccattccagcagccacaagcgcttccccagcacaggaagctgtgcggaagccggcggaggaagcaactccttgcagaacagccccatccgcggcctcccgcactggaactcccagtccagcatgccgtccacgccagacctgcgggtccggagtccccactacgtccattccacgaggtcggtggacatcagccccacccgactgcacagcctcgcactgcactttaggcaccggagctccagcctggagtcccagggcaagctcctgggctcggaaaacgacaccgggagccccgacttctacaccccgcggactcgtagcagcaacggctcagaccccatggacgactgctcgtcgtgcaccagccactcgagctcggagcactactacccggcgcagatgaacgccaactactccacgctggccgaggactcgccgtccaaggcgcgccagaggcagaggcagcggcagcgggcggcgggcgcactgggctcagccagctcgggcagcatgcccaacctggcggcgcgcgggggtgcggggggcgcggggggcgcggggggcggtgtgtacctgcacagccagagccagcccagctcgcagtaccgcatcaaggagtacccgctgtacatcgagggcggcgccacgcccgtggtggtgcgcagcctggagagcgaccaggagggccactacagcgtcaaggctcagttcaagacgtccaactcctacacggcgggcggcctgttcaaggagagctggcgcggcggcggcggcgacgagggcgacacgggccgcctgacgccgtcgcgatcgcagatcctgcggactccgtcgctgggccgcgagggcgcccacgacaagggcgcgggccgtgccgccgtctcagacgagctgcgccagtggtaccagcgttccaccgcctcgcacaaggagcacagccgcctgtcgcacaccagctccacctcctcggacagcggctcgcagtacagcacctcctcccagagcaccttcgtggcgcacagcagggtcaccaggatgccccagatgtgcaaggccacgtcagctgccttacctcaaagccagagaagctcgacaccgtcaagtgaaattggagccacccccccaagcagcccccaccacatcctaacctggcagactgggagctacaatgatagctgtttcctggattcctccctctatccagaactagctgatgtccagtggtacgggcaggaaaaagccaagcccgggaccctcgtgtgagccagcccggcctaatctgaccgcctcaacgccattctgagatcacctcactgcctctcatttgccttacccagacgcaccgtcaccctgcaccagctttggccctcagcactttttttctcctgtctccgcattccctcccccttgaaaacctgactgaggagacattctggaaggttccggtcccactgtgtgtcccctggcgctcttgcccatagagagccagacaccaatcctcaatggcaccttggtggcttccctctgccatgacagcccctaggccaggaaccatcaggggggccagccggcatccaattcctgcggataagtagcgttgggagagaacgggaaaggggacttgagttacagggtgacccagaaagacgattcagctgtgtccagcctgccacccatacgtaggccaaccaagcacttcatgaagaggaggcctcgtggcatattcagtttacacctgaaatattccttgatgggacagcttgtggggatggctatgggggaaggggaggttgagaaaggaagttctcgacaccagaaatgttgctaataaacatcccacagtgcacgggacagctccacagccaagaccgaatgaactgcttgggctgttt

SEQ ID NO: 378782 - DNA, 1132 bp, Homo sapiens
tctgcagccacgagaagcaaagttgacatttctggatcactctccccagacgcgtcacttgcccacaagcgggacacggcagtctcgctgagccagctgtgcagagggacagatggaagaaagctagagatgctgcttcgtgggcgctgaagttgcagaacttgggctggttttctttcttcccatcccccctcctcctgacaaaccacatcttgactcagatggtcgaaagaaaaactctttcagttatttgatatttgggaaccctccaggagaccataacttatttttgagggaggctccttctctccctttgctgggaacacacacacacacacacacacacacacacacacacacacacacacacacacacacagctgtacaccatggtggttcaggctgcagtggctccgaatagatcccaaagacttttactgaaaattccttatggatctctgagaaggcgcagcgttgaaaggatgacggagggccgccgatgtcaagtacatcttcttgatgacaggaagctggaactcctagtacagcccaagctgttggccaaggagcttcttgaccttgtggcttctcacttcaatctgaaggaaaaggagtactttggaatagcattcacagatgaaacgggacacttaaactggcttcagctagatcgaagagtattggaacatgacttccctaaaaagtcaggacccgtggttttatacttttgtgtcaggttctatatagaaagcatttcatacctgaaggataatgctaccattgagcttttctttctgaacgcgaagtcctgcatctacaagatggagtctcactctgtagcccaggctgtagtgtaatggcataatctcggctcactgcaacctctgcctcctgggttcaagcgattctctgcctcggcctcctgagcaggtggaattataggcaccagccatcacacctggctaatttttgtatttttagtagagatggggtttcaccgtgttagtcaggccggtctcgaacgcctgacctcatgatccacccaccttggcctcccaaagggctgagattacaggcatgagccaccacacccagccaattctttttttaaataaataaataaataaatgta

SEQ ID NO: 378783 - DNA, 488 bp, Homo sapiens
taacgaggatgatgtgagttcagcatatctacctaaatgacactcttggaccagtaatcaagccttcagaactggaaaactcagagcaaaataagacaggttgagctcagactgcaagaaagtcccgagtggctgattgctatgaaggctgggttgtagaagtcttttctgggcatgaaaaagtacagtctatgattggagcaggtggtaatacaaccaaaatgctcaggaaactaaaattgttccctatcttataatattccaaattcctttgctctaagttctctcattgatttgccaggcttttttatcattcataatttagattacatggttgctatttggaagaaagaaaggaaggaaagaagggagcaaaggaaggagggagagagggagggaggagaaaagaggaatagaaggagagagaaacatctcgatgctttcttatccccaaagtttcaatcaaagttcatcattataatagggta

SEQ ID NO: 378784 - DNA, 586 bp, Homo sapiens
gacattgctctctggataaaggatagacttaggcactgatcagaaacggtctctgtttaccaaaattccttctttgcacacagagctgtgtagtgaaaatgcccgtcctacacaaataatgtgttatagcaaaatgagccagttaacatgtcagctcaaatcaacctaatttgggttaaaaattcttccttttctgtttttttttcttttcccccctccccctcctcaattcttccttttctaaaaggatcttgttacttcataaaaatcaaattggccccacgttaatttatttgggccatcagaacatgggagacttttgccaacatagctatagaacctctgtttttgtttgattttatgacagggatggggtctcactgtgattacaggtgtgagctgccatgcccaaccaaaatctcttcatagatgcgaagtttgggaagctgtgccaggtcccagattcacctccagtgtgactccggggtcgggagtaggtcccttgagagccccagtcactggacttcacaggcagctaaaatgcaggaagaggttgggaagtcagggccactgatctgcttcagta

SEQ ID NO: 378785 - DNA, 4305 bp, Homo sapiens
acgaggctcggccaatgggaacgcgcgctgcgaggcccgccggtctgccctgcggtgctgaaaacccggcgcgcaggcggctggctctgggcgcgcgccagcaaatccactcctggagcccgcggaccccgagcacgcgcctgacagcccctgctggcccggcgcgcggcgtcgccaggccagctatggcccccgacccggtggccgccgagaccgcggctcagggacctaccccgcgctacttcacctgggacgaggtggcccagcgctcagggtgcgaggagcggtggctagtgatcgaccgtaaggtgtacaacatcagcgagttcacccgccggcatccagggggctcccgggtcatcagccactacgccgggcaggatgccacggatccctttgtggccttccacatcaacaagggccttgtgaagaagtatatgaactctctcctgattggagaactgtctccagagcagcccagctttgagcccaccaagaataaagagctgacagatgagttccgggagctgcgggccacagtggagcggatggggctcatgaaggccaaccatgtcttcttcctgctgtacctgctgcacatcttgctgctggatggtgcagcctggctcaccctttgggtctttgggacgtcctttttgcccttcctcctctgtgcggtgctgctcagtgcagttcaggcccaggctggctggctgcagcatgactttgggcacctgtcggtcttcagcacctcaaagtggaaccatctgctacatcattttgtgattggccacctgaagggggcccccgccagttggtggaaccacatgcacttccagcaccatgccaagcccaactgcttccgcaaagacccagacatcaacatgcatcccttcttctttgccttggggaagatcctctctgtggagcttgggaaacagaagaaaaaatatatgccgtacaaccaccagcacaaatacttcttcctaattgggcccccagccttgctgcctctctacttccagtggtatattttctattttgttatccagcgaaagaagtgggtggacttggcctggatgattaccttctacgtccgcttcttcctcacttatgtgccactattggggctgaaagccttcctgggccttttcttcatagtcaggttcctggaaagcaactggtttgtgtgggtgacacagatgaaccatattcccatgcacattgatcatgaccggaacatggactgggtttccacccagctccaggccacatgcaatgtccacaagtctgccttcaatgactggttcagtggacacctcaacttccagattgagcaccatctttttcccacgatgcctcgacacaattaccacaaagtggctcccctggtgcagtccttgtgtgccaagcatggcatagagtaccagtccaagcccctgctgtcagccttcgccgacatcatccactcactaaaggagtcagggcagctctggctagatgcctatcttcaccaataacaacagccaccctgcccagtctggaagaagaggaggaagactctggagccaaggcagaggggagcttgagggacaatgccactatagtttaatactcagagggggttgggtttggggacataaagcctctgactcaaactcctcccttttatcttctagccacagttctaagacccaaagtggggggtggacacagaagtccctaggagggaaggagctgttggggcaggggtgtaaattatttcctttttctagtttggcacatgcaggtagttggtgaacagagagaaccaggagggtaacagaagaggagggacctactgaacccagagtcaggaagagatttaacactaaaattccactcatgccgggcgtggtggcacgcgcctgtaatcccagctacccaggaggctgaggcaggagaatcgcttgaaccggggaggtggaggttgcagtgagctgagatcacgccattgtactccagcctgggcgacagagcaagactccatttcaaaaaaaaaaaaaaaatccactcatataaaaggtgagctcagctcactggtccatttctcagtggcttctccatcctcatttgcaaacctcagagggataaggcagttgaacctgatgagcaagaattataacagcaaggaaacattaatgcttagaattctgagatccagcacaactcagtctgtgggagctcagctcgctgcccagggataggtatgacctatgtctgccttaggctgctgggagatgccattctccagtttcagaagcaggcagggcaaaggtcaagactgtggtattggggtcttttggctctgaaggatcctggaaccactgattttggtttattccctccagggtctaaagagaacaagaggtgctagctcttaccaaaacagatggtagagagagttgctggctatttaaaaagctctttcatcttttaattcacctcttcttttcacctctttaaccactcctcaggaacagaacacttctaggactgggggtcttttagctccataagcaagtgagcagatgggacaagttagtcttttctccctagaaacaaaggggatgcccagtggtttccctttgcttcccaacctaaaatttcaagtttaataaaatagcaattagcagaagtgaccaaattgggagataattatcagtcatgaggaaagacacagatttcggtcataaagaatgtaagggctataagtagaaactttctataacctaaatgatgttatagaattatttttgagcaggagcagaaagattaaatatgatcacttcatacttctaaatcagaaataggaagattaaaaccacagaacagtttgtgatttctattgctgtagctaggtatcttactctgtccactcttgttcaagtatctaactcttctggaaaccaaataggctttagaagagattatcctatattcctatcagtataatactaaaatgtaactttttaatcatctggtttttaaaagataaacagtttagcccatctctccagagagcaaacataggaatatgactcaggagcctcctagggcttatcatcagccctcacacccgcttccccctccaacccacagcctttgcttccaggtggcaggattactactttgcctcttcagcagcatctactctaggcatattgatcattttagacactgggagaagagaacctcaaactaggaggaaaagacagagcctccacttagttttgggaggggatggcagacagtcaaggagatgagcgtcctaaggcatgttgggatagggtcagatgcaccacccatggagaggtttgtcaacacaaagacatggaaggttagaggtttgtcaacaaaaagacatggaaggttaggtttgtcaacacaaagacatggaagattagaggtttgtcaacacaaagacacaggaagaatgggctgcagaagatttagatgttttccatttgggcacattttacttagctggagaactaggtttaaaacagcctgggtaggaaaattagaagcaagctggatgcagtggctcatgcctgtaatcccaacacttttgggaggtccaggcaggaggatcacttgggcccaggaggtcaagcctgcagcgagctgagatcacaccactgcactccagcctggggtgatagaacaagaccctgtctcaaaaaaaaaaaaaaacaacaaaaacttagaattgaggagttgtacctccattggcttcctcactccaaaataggtgctgatccttcctattcctattctttgccaccttttgggtgtggtgtcaccagcctgtttagccaagtagctttgggcataggctgcccaatctgagcaaacaccagtgaggctctattgagccaagaccaagtcctcaaagcacctgaaccactgtggccttctcagcctacagcagtgtggtctcttacatggccacaaagggacacacagtgacaaaaggctcggaatgttacaatggtaaaatgagtgatctcaaatccactgacagatataaaataggcttagagaggaaaagctgcctctggtcaagtagatcatggcagcatgaattccaactcacttttttacaactccaacttctatgtttatctttgttactttcacttttttacaacctggccagaggcattttttaaatcaggcccaatatcagtattctttttgtgtgtgccaattttgttatcacatccctatgaagttgaaaaataaagttaattttgaccaaaa

SEQ ID NO: 378786 - DNA, 789 bp, Homo sapiens
gcatcacttacagggcccggggctgccggacctgccaacgtgaatcttatcgccatggaccttaccttgcacaacccaaagtagctgccttggggcagggggtggccagagtgcttagggaaatgtggagccctacccagaacaacggtggagggaaagggaagaaacgcagaagtgccccagttcggacgtagggaagtcttcctcttcgtggtttttggagaaccctagctaagagaggaaagggacttattgaaagacccgcaagaagggacggaagtctcatagccctgagaggtgaagccagctggagttgatgggtcgaatggggacctagagaacttttctgtatctagaggtttgtaaaatgcaccaatcagtgctctgtaaaaacgcaccaattggcgctctgtagctagctagaggtttgtaaaatgagccaatcagcaggacgtgggcagggacaactaagacaataaaagctggccaccccagccagctgctgcaacccgctccagttcccttacaggctgtggaagcattgttcttttgctcgtcacactaaaccttgctgctgctcattctttgggtctgcaaagagtgttattcctttaagagctataacagcgggaaggtccacggctccattcttgaagtcagtgagaccatacccgccggaaggaaccaacgcccgacacagccccacccatctctcctgtttctcacctatactgaaattcttgggcaaaagctgtctgtggacacacccaggggaaaggccagcccagg

SEQ ID NO: 378787 - DNA, 563 bp, Homo sapiens
gccttggcagatgaaggaagtgggagaggctgaaggaggcatcgaggtcagtgaaggcgacactggggctggtgggctgctctcagtgttgactcttctcacctaggcccaggctggctggctgcagcatgactttgggcacctgtcggtcttcagcacctcaaagtggaaccatctgctacatcattttgtgattggccacctgaagggggcccccgccagttggtggaaccacatgcacttccagcaccatgccaagcccaactgcttccgcaaagacccagacatcaacatgcatcccttcttctttgccttggggaagatcctctctgtggaggtgcgtggaggtatcagtggaaaggtcttggggaataggaggcagccaacataggggagttggggaagatgcccacgatgttgtcagtgtgggcaagacactggggctgggctggctggggcttttgccattttggaagttctggaaggcaacaggcaatagatgggggctgcccaggagggagtcaccatcctccctagagagttcagtcagcaaaccgttactg

SEQ ID NO: 378788 - DNA, 4779 bp, Homo sapiens
acgaggctcggccaatgggaacgcgcgctgcgaggcccgccggtctgccctgcggtgctgaaaacccggcgcgcaggcggctggctctgggcgcgcgccagcaaatccactcctggagcccgcggaccccgagcacgcgcctgacagcccctgctggcccggcgcgcggcgtcgccaggccagctatggcccccgacccggtggccgccgagaccgcggctcagggacctaccccgcgctacttcacctgggacgaggtggcccagcgctcagggtgcgaggagcggtggctagtgatcgaccgtaaggtgtacaacatcagcgagttcacccgccggcatccagggggctcccgggtcatcagccactacgccgggcaggatgccacggatccctttgtggccttccacatcaacaagggccttgtgaagaagtatatgaactctctcctgattggagaactgtctccagagcagcccagctttgagcccaccaagaataaagagctgacagatgagttccgggagctgcgggccacagtggagcggatggggctcatgaaggccaaccatgtcttcttcctgctgtacctgctgcacatcttgctgctggatggtgcagcctggctcaccctttgggtctttgggacgtcctttttgcccttcctcctctgtgcggtgctgctcagtgcagttcaggcccaggctggctggctgcagcatgactttgggcacctgtcggtcttcagcacctcaaagtggaaccatctgctacatcattttgtgattggccacctgaagggggcccccgccagttggtggaaccacatgcacttccagcaccatgccaagcccaactgcttccgcaaagacccagacatcaacatgcatcccttcttctttgccttggggaagatcctctctgtggagcttgggaaacagaagaaaaaatatatgccgtacaaccaccagcacaaatacttcttcctaattgggcccccagccttgctgcctctctacttccagtggtatattttctattttgttatccagcgaaagaagtgggtggacttggcctggatgattaccttctacgtccgcttcttcctcacttatgtgccactattggggctgaaagccttcctgggccttttcttcatagtcaggttcctggaaagcaactggtttgtgtgggtgacacagatgaaccatattcccatgcacattgatcatgaccggaacatggactgggtttccacccagctccaggccacatgcaatgtccacaagtctgccttcaatgactggttcagtggacacctcaacttccagattgagcaccatctttttcccacgatgcctcgacacaattaccacaaagtggctcccctggtgcagtccttgtgtgccaagcatggcatagagtaccagtccaagcccctgctgtcagccttcgccgacatcatccactcactaaaggagtcagggcagctctggctagatgcctatcttcaccaataacaacagccaccctgcccagtctggaagaagaggaggaagactctggagccaaggcagaggggagcttgagggacaatgccactatagtttaatactcagagggggttgggtttggggacataaagcctctgactcaaactcctcccttttatcttctagccacagttctaagacccaaagtggggggtggacacagaagtccctaggagggaaggagctgttggggcaggggtgtaaattatttcctttttctagtttggcacatgcaggtagttggtgaacagagagaaccaggagggtaacagaagaggagggacctactgaacccagagtcaggaagagatttaacactaaaattccactcatgccgggcgtggtggcacgcgcctgtaatcccagctacccaggaggctgaggcaggagaatcgcttgaaccggggaggtggaggttgcagtgagctgagatcacgccattgtactccagcctgggcgacagagcaagactccatttcaaaaaaaaaaaaaaaatccactcatataaaaggtgagctcagctcactggtccatttctcagtggcttctccatcctcatttgcaaacctcagagggataaggcagttgaacctgatgagcaagaattataacagcaaggaaacattaatgcttagaattctgagatccagcacaactcagtctgtgggagctcagctcgctgcccagggataggtatgacctatgtctgccttaggctgctgggagatgccattctccagtttcagaagcaggcagggcaaaggtcaagactgtggtattggggtcttttggctctgaaggatcctggaaccactgattttggtttattccctccagggtctaaagagaacaagaggtgctagctcttaccaaaacagatggtagagagagttgctggctatttaaaaagctctttcatcttttaattcacctcttcttttcacctctttaaccactcctcaggaacagaacacttctaggactgggggtcttttagctccataagcaagtgagcagatgggacaagttagtcttttctccctagaaacaaaggggatgcccagtggtttccctttgcttcccaacctaaaatttcaagtttaataaaatagcaattagcagaagtgaccaaattgggagataattatcagtcatgaggaaagacacagatttcggtcataaagaatgtaagggctataagtagaaactttctataacctaaatgatgttatagaattatttttgagcaggagcagaaagattaaatatgatcacttcatacttctaaatcagaaataggaagattaaaaccacagaacagtttgtgatttctattgctgtagctaggtatcttactctgtccactcttgttcaagtatctaactcttctggaaaccaaataggctttagaagagattatcctatattcctatcagtataatactaaaatgtaactttttaatcatctggtttttaaaagataaacagtttagcccatctctccagagagcaaacataggaatatgactcaggagcctcctagggcttatcatcagccctcacacccgcttccccctccaacccacagcctttgcttccaggtggcaggattactactttgcctcttcagcagcatctactctaggcatattgatcattttagacactgggagaagagaacctcaaactaggaggaaaagacagagcctccacttagttttgggaggggatggcagacagtcaaggagatgagcgtcctaaggcatgttgggatagggtcagatgcaccacccatggagaggtttgtcaacacaaagacatggaaggttagaggtttgtcaacaaaaagacatggaaggttaggtttgtcaacacaaagacatggaagattagaggtttgtcaacacaaagacacaggaagaatgggctgcagaagatttagatgttttccatttgggcacattttacttagctggagaactaggtttaaaacagcctgggtaggaaaattagaagcaagctggatgcagtggctcatgcctgtaatcccaacacttttgggaggtccaggcaggaggatcacttgggcccaggaggtcaagcctgcagcgagctgagatcacaccactgcactccagcctggggtgatagaacaagaccctgtctcaaaaaaaaaaaaaaacaacaaaaacttagaattgaggagttgtacctccattggcttcctcactccaaaataggtgctgatccttcctattcctattctttgccaccttttgggtgtggtgtcaccagcctgtttagccaagtagctttgggcataggctgcccaatctgagcaaacaccagtgaggctctattgagccaagaccaagtcctcaaagcacctgaaccactgtggccttctcagcctacagcagtgtggtctcttacatggccacaaagggacacacagtgacaaaaggctcggaatgttacaatggtaaaatgagtgatctcaaatccactgacagatataaaataggcttagagaggaaaagctgcctctggtcaagtagatcatggcagcatgaattccaactcacttttttacaactccaacttctatgtttatctttgttactttcacttttttacaacctggccagaggcattttttaaatcaggcccaatatcagtattctttttgtgtgtgccaattttgttatcacatccctatgaagttgaaaaataaagttaattttgaccaaaaaaaaaaaaaaaaaaaaaaaaaaaaaaaaaaaacaaaaaaaaaacaagaaaaaacaaaaaaaaaaaaaaaaaaaagaggcgggcggcgcgccccgcgttaataatagtccccctacgcgggggcccaccgacatcgatgcagccccccattttttttgggacaagggcgggccccaaatgagaggggctgtatttaataatacaagacgagcacggcgccgcgttatcaacaccaccggcagagccgaaaaaactgcgccacgtgacctcatttgggaaggaaaccccaccacctcggggggggagacaagaatgagagagccacccacccaaaagaaatataaaaccccccgaggcaggaaaaaaaacacataagcggggattaaggtggggtgacaccaaccggcagtatagatgaccgcgcgaaaaaaacatctgcacaacgcgataatgtagaacacaattaccggcaggg

SEQ ID NO: 378789 - DNA, 4252 bp, Homo sapiens
acgaggctcggccaatgggaacgcgcgctgcgaggcccgccggtctgccctgcggtgctgaaaacccggcgcgcaggcggctggctctgggcgcgcgccagcaaatccactcctggagcccgcggaccccgagcacgcgcctgacagcccctgctggcccggcgcgcggcgtcgccaggccagctatggcccccgacccggtggccgccgagaccgcggctcagggacctaccccgcgctacttcacctgggacgaggtggcccagcgctcagggtgcgaggagcggtggctagtgatcgaccgtaaggtgtacaacatcagcgagttcacccgccggcatccagggggctcccgggtcatcagccactacgccgggcaggatgccacggatccctttgtggccttccacatcaacaagggccttgtgaagaagtatatgaactctctcctgattggagaactgtctccagagcagcccagctttgagcccaccaagaataaagagctgacagatgagttccgggagctgcgggccacagtggagcggatggggctcatgaaggccaaccatgtcttcttcctgctgtacctgctgcacatcttgctgctggatggtgcagcctggctcaccctttgggtctttgggacgtcctttttgcccttcctcctctgtgcggtgctgctcagtgcagttcaggcccaggctggctggctgcagcatgactttgggcacctgtcggtcttcagcacctcaaagtggaaccatctgctacatcattttgtgattggccacctgaagggggcccccgccagttggtggaaccacatgcacttccagcaccatgccaagcccaactgcttccgcaaagacccagacatcaacatgcatcccttcttctttgccttggggaagatcctctctgtggagcttgggaaacagaagaaaaaatatatgccgtacaaccaccagcacaaatacttcttcctaattgggcccccagccttgctgcctctctacttccagtggtatattttctattttgttatccagcgaaagaagtgggtggacttggcctggatgattaccttctacgtccgcttcttcctcacttatgtgccactattggggctgaaagccttcctgggccttttcttcatagtcaggttcctggaaagcaactggtttgtgtgggtgacacagatgaaccatattcccatgcacattgatcatgaccggaacatggactgggtttccacccagctccaggccacatgcaatgtccacaagtctgccttcaatgactggttcagtggacacctcaacttccagattgagcaccatctttttcccacgatgcctcgacacaattaccacaaagtggctcccctggtgcagtccttgtgtgccaagcatggcatagagtaccagtccaagcccctgctgtcagccttcgccgacatcatccactcactaaaggagtcagggcagctctggctagatgcctatcttcaccaataacaacagccaccctgcccagtctggaagaagaggaggaagactctggagccaaggcagaggggagcttgagggacaatgccactatagtttaatactcagagggggttgggtttggggacataaagcctctgactcaaactcctcccttttatcttctagccacagttctaagacccaaagtggggggtggacacagaagtccctaggagggaaggagctgttggggcaggggtgtaaattatttcctttttctagtttggcacatgcaggtagttggtgaacagagagaaccaggagggtaacagaagaggagggacctactgaacccagagtcaggaagagatttaacactaaaattccactcatgccgggcgtggtggcacgcgcctgtaatcccagctacccaggaggctgaggcaggagaatcgcttgaaccggggaggtggaggttgcagtgagctgagatcacgccattgtactccagcctgggcgacagagcaagactccatttcaaaaaaaaaaaaaaaatccactcatataaaaggtgagctcagctcactggtccatttctcagtggcttctccatcctcatttgcaaacctcagagggataaggcagttgaacctgatgagcaagaattataacagcaaggaaacattaatgcttagaattctgagatccagcacaactcagtctgtgggagctcagctcgctgcccagggataggtatgacctatgtctgccttaggctgctgggagatgccattctccagtttcagaagcaggcagggcaaaggtcaagactgtggtattggggtcttttggctctgaaggatcctggaaccactgattttggtttattccctccagggtctaaagagaacaagaggtgctagctcttaccaaaacagatggtagagagagttgctggctatttaaaaagctctttcatcttttaattcacctcttcttttcacctctttaaccactcctcaggaacagaacacttctaggactgggggtcttttagctccataagcaagtgagcagatgggacaagttagtcttttctccctagaaacaaaggggatgcccagtggtttccctttgcttcccaacctaaaatttcaagtttaatgaaagacacagatttcggtcataaagaatgtaagggctataagtagaaactttctataacctaaatgatgttatagaattatttttgagcaggagcagaaagattaaatatgatcacttcatacttctaaatcagaaataggaagattaaaaccacagaacagtttgtgatttctattgctgtagctaggtatcttactctgtccactcttgttcaagtatctaactcttctggaaaccaaataggctttagaagagattatcctatattcctatcagtataatactaaaatgtaactttttaatcatctggtttttaaaagataaacagtttagcccatctctccagagagcaaacataggaatatgactcaggagcctcctagggcttatcatcagccctcacacccgcttccccctccaacccacagcctttgcttccaggtggcaggattactactttgcctcttcagcagcatctactctaggcatattgatcattttagacactgggagaagagaacctcaaactaggaggaaaagacagagcctccacttagttttgggaggggatggcagacagtcaaggagatgagcgtcctaaggcatgttgggatagggtcagatgcaccacccatggagaggtttgtcaacacaaagacatggaaggttagaggtttgtcaacaaaaagacatggaaggttaggtttgtcaacacaaagacatggaagattagaggtttgtcaacacaaagacacaggaagaatgggctgcagaagatttagatgttttccatttgggcacattttacttagctggagaactaggtttaaaacagcctgggtaggaaaattagaagcaagctggatgcagtggctcatgcctgtaatcccaacacttttgggaggtccaggcaggaggatcacttgggcccaggaggtcaagcctgcagcgagctgagatcacaccactgcactccagcctggggtgatagaacaagaccctgtctcaaaaaaaaaaaaaaacaacaaaaacttagaattgaggagttgtacctccattggcttcctcactccaaaataggtgctgatccttcctattcctattctttgccaccttttgggtgtggtgtcaccagcctgtttagccaagtagctttgggcataggctgcccaatctgagcaaacaccagtgaggctctattgagccaagaccaagtcctcaaagcacctgaaccactgtggccttctcagcctacagcagtgtggtctcttacatggccacaaagggacacacagtgacaaaaggctcggaatgttacaatggtaaaatgagtgatctcaaatccactgacagatataaaataggcttagagaggaaaagctgcctctggtcaagtagatcatggcagcatgaattccaactcacttttttacaactccaacttctatgtttatctttgttactttcacttttttacaacctggccagaggcattttttaaatcaggcccaatatcagtattctttttgtgtgtgccaattttgttatcacatccctatgaagttgaaaaataaagttaattttgaccaaaa

SEQ ID NO: 378790 - DNA, 4268 bp, Homo sapiens
acgaggctcggccaatgggaacgcgcgctgcgaggcccgccggtctgccctgcggtgctgaaaacccggcgcgcaggcggctggctctgggcgcgcgccagcaaatccactcctggagcccgcggaccccgagcacgcgcctgacagcccctgctggcccggcgcgcggcgtcgccaggccagctatggcccccgacccggtggccgccgagaccgcggctcagggacctaccccgcgctacttcacctgggacgaggtggcccagcgctcagggtgcgaggagcggtggctagtgatcgaccgtaaggtgtacaacatcagcgagttcacccgccggcatccagggggctcccgggtcatcagccactacgccgggcaggatgccacggatccctttgtggccttccacatcaacaagggccttgtgaagaagtatatgaactctctcctgattggagaactgtctccagagcagcccagctttgagcccaccaagaataaagagctgacagatgagttccgggagctgcgggccacagtggagcggatggggctcatgaaggccaaccatgtcttcttcctgctgtacctgctgcacatcttgctgctggatggtgcagcctggctcaccctttgggtctttgggacgtcctttttgcccttcctcctctgtgcggtgctgctcagtgcagttcaggcccaggctggctggctgcagcatgactttgggcacctgtcggtcttcagcacctcaaagtggaaccatctgctacatcattttgtgattggccacctgaagggggcccccgccagttggtggaaccacatgcacttccagcaccatgccaagcccaactgcttccgcaaagacccagacatcaacatgcatcccttcttctttgccttggggaagatcctctctgtggaggtgcgtggaggtatcagtggaaagttgggcccccagccttgctgcctctctacttccagtggtatattttctattttgttatccagcgaaagaagtgggtggacttggcctggatgattaccttctacgtccgcttcttcctcacttatgtgccactattggggctgaaagccttcctgggccttttcttcatagtcaggttcctggaaagcaactggtttgtgtgggtgacacagatgaaccatattcccatgcacattgatcatgaccggaacatggactgggtttccacccagctccaggccacatgcaatgtccacaagtctgccttcaatgactggttcagtggacacctcaacttccagattgagcaccatctttttcccacgatgcctcgacacaattaccacaaagtggctcccctggtgcagtccttgtgtgccaagcatggcatagagtaccagtccaagcccctgctgtcagccttcgccgacatcatccactcactaaaggagtcagggcagctctggctagatgcctatcttcaccaataacaacagccaccctgcccagtctggaagaagaggaggaagactctggagccaaggcagaggggagcttgagggacaatgccactatagtttaatactcagagggggttgggtttggggacataaagcctctgactcaaactcctcccttttatcttctagccacagttctaagacccaaagtggggggtggacacagaagtccctaggagggaaggagctgttggggcaggggtgtaaattatttcctttttctagtttggcacatgcaggtagttggtgaacagagagaaccaggagggtaacagaagaggagggacctactgaacccagagtcaggaagagatttaacactaaaattccactcatgccgggcgtggtggcacgcgcctgtaatcccagctacccaggaggctgaggcaggagaatcgcttgaaccggggaggtggaggttgcagtgagctgagatcacgccattgtactccagcctgggcgacagagcaagactccatttcaaaaaaaaaaaaaaaatccactcatataaaaggtgagctcagctcactggtccatttctcagtggcttctccatcctcatttgcaaacctcagagggataaggcagttgaacctgatgagcaagaattataacagcaaggaaacattaatgcttagaattctgagatccagcacaactcagtctgtgggagctcagctcgctgcccagggataggtatgacctatgtctgccttaggctgctgggagatgccattctccagtttcagaagcaggcagggcaaaggtcaagactgtggtattggggtcttttggctctgaaggatcctggaaccactgattttggtttattccctccagggtctaaagagaacaagaggtgctagctcttaccaaaacagatggtagagagagttgctggctatttaaaaagctctttcatcttttaattcacctcttcttttcacctctttaaccactcctcaggaacagaacacttctaggactgggggtcttttagctccataagcaagtgagcagatgggacaagttagtcttttctccctagaaacaaaggggatgcccagtggtttccctttgcttcccaacctaaaatttcaagtttaataaaatagcaattagcagaagtgaccaaattgggagataattatcagtcatgaggaaagacacagatttcggtcataaagaatgtaagggctataagtagaaactttctataacctaaatgatgttatagaattatttttgagcaggagcagaaagattaaatatgatcacttcatacttctaaatcagaaataggaagattaaaaccacagaacagtttgtgatttctattgctgtagctaggtatcttactctgtccactcttgttcaagtatctaactcttctggaaaccaaataggctttagaagagattatcctatattcctatcagtataatactaaaatgtaactttttaatcatctggtttttaaaagataaacagtttagcccatctctccagagagcaaacataggaatatgactcaggagcctcctagggcttatcatcagccctcacacccgcttccccctccaacccacagcctttgcttccaggtggcaggattactactttgcctcttcagcagcatctactctaggcatattgatcattttagacactgggagaagagaacctcaaactaggaggaaaagacagagcctccacttagttttgggaggggatggcagacagtcaaggagatgagcgtcctaaggcatgttgggatagggtcagatgcaccacccatggagaggtttgtcaacacaaagacatggaaggttagaggtttgtcaacaaaaagacatggaaggttaggtttgtcaacacaaagacatggaagattagaggtttgtcaacacaaagacacaggaagaatgggctgcagaagatttagatgttttccatttgggcacattttacttagctggagaactaggtttaaaacagcctgggtaggaaaattagaagcaagctggatgcagtggctcatgcctgtaatcccaacacttttgggaggtccaggcaggaggatcacttgggcccaggaggtcaagcctgcagcgagctgagatcacaccactgcactccagcctggggtgatagaacaagaccctgtctcaaaaaaaaaaaaaaacaacaaaaacttagaattgaggagttgtacctccattggcttcctcactccaaaataggtgctgatccttcctattcctattctttgccaccttttgggtgtggtgtcaccagcctgtttagccaagtagctttgggcataggctgcccaatctgagcaaacaccagtgaggctctattgagccaagaccaagtcctcaaagcacctgaaccactgtggccttctcagcctacagcagtgtggtctcttacatggccacaaagggacacacagtgacaaaaggctcggaatgttacaatggtaaaatgagtgatctcaaatccactgacagatataaaataggcttagagaggaaaagctgcctctggtcaagtagatcatggcagcatgaattccaactcacttttttacaactccaacttctatgtttatctttgttactttcacttttttacaacctggccagaggcattttttaaatcaggcccaatatcagtattctttttgtgtgtgccaattttgttatcacatccctatgaagttgaaaaataaagttaattttgaccaaaa

SEQ ID NO: 378791 - DNA, 4110 bp, Homo sapiens
gcatcacttacagggcccggggctgccggacctgccaacgtgaatcttatcgccatggaccttaccttgcacaacccaaagtagctgccttggggcagggggtggccagagtgcttagggaaatgtggagccctacccagaacaacggtggagggaaagggaagaaacgcagaagtgccccagttcggacgtaggatccctttgtggccttccacatcaacaagggccttgtgaagaagtatatgaactctctcctgattggagaactgtctccagagcagcccagctttgagcccaccaagaataaagagctgacagatgagttccgggagctgcgggccacagtggagcggatggggctcatgaaggccaaccatgtcttcttcctgctgtacctgctgcacatcttgctgctggatggtgcagcctggctcaccctttgggtctttgggacgtcctttttgcccttcctcctctgtgcggtgctgctcagtgcagttcaggcccaggctggctggctgcagcatgactttgggcacctgtcggtcttcagcacctcaaagtggaaccatctgctacatcattttgtgattggccacctgaagggggcccccgccagttggtggaaccacatgcacttccagcaccatgccaagcccaactgcttccgcaaagacccagacatcaacatgcatcccttcttctttgccttggggaagatcctctctgtggagcttgggaaacagaagaaaaaatatatgccgtacaaccaccagcacaaatacttcttcctaattgggcccccagccttgctgcctctctacttccagtggtatattttctattttgttatccagcgaaagaagtgggtggacttggcctggatgattaccttctacgtccgcttcttcctcacttatgtgccactattggggctgaaagccttcctgggccttttcttcatagtcaggttcctggaaagcaactggtttgtgtgggtgacacagatgaaccatattcccatgcacattgatcatgaccggaacatggactgggtttccacccagctccaggccacatgcaatgtccacaagtctgccttcaatgactggttcagtggacacctcaacttccagattgagcaccatctttttcccacgatgcctcgacacaattaccacaaagtggctcccctggtgcagtccttgtgtgccaagcatggcatagagtaccagtccaagcccctgctgtcagccttcgccgacatcatccactcactaaaggagtcagggcagctctggctagatgcctatcttcaccaataacaacagccaccctgcccagtctggaagaagaggaggaagactctggagccaaggcagaggggagcttgagggacaatgccactatagtttaatactcagagggggttgggtttggggacataaagcctctgactcaaactcctcccttttatcttctagccacagttctaagacccaaagtggggggtggacacagaagtccctaggagggaaggagctgttggggcaggggtgtaaattatttcctttttctagtttggcacatgcaggtagttggtgaacagagagaaccaggagggtaacagaagaggagggacctactgaacccagagtcaggaagagatttaacactaaaattccactcatgccgggcgtggtggcacgcgcctgtaatcccagctacccaggaggctgaggcaggagaatcgcttgaaccggggaggtggaggttgcagtgagctgagatcacgccattgtactccagcctgggcgacagagcaagactccatttcaaaaaaaaaaaaaaaatccactcatataaaaggtgagctcagctcactggtccatttctcagtggcttctccatcctcatttgcaaacctcagagggataaggcagttgaacctgatgagcaagaattataacagcaaggaaacattaatgcttagaattctgagatccagcacaactcagtctgtgggagctcagctcgctgcccagggataggtatgacctatgtctgccttaggctgctgggagatgccattctccagtttcagaagcaggcagggcaaaggtcaagactgtggtattggggtcttttggctctgaaggatcctggaaccactgattttggtttattccctccagggtctaaagagaacaagaggtgctagctcttaccaaaacagatggtagagagagttgctggctatttaaaaagctctttcatcttttaattcacctcttcttttcacctctttaaccactcctcaggaacagaacacttctaggactgggggtcttttagctccataagcaagtgagcagatgggacaagttagtcttttctccctagaaacaaaggggatgcccagtggtttccctttgcttcccaacctaaaatttcaagtttaataaaatagcaattagcagaagtgaccaaattgggagataattatcagtcatgaggaaagacacagatttcggtcataaagaatgtaagggctataagtagaaactttctataacctaaatgatgttatagaattatttttgagcaggagcagaaagattaaatatgatcacttcatacttctaaatcagaaataggaagattaaaaccacagaacagtttgtgatttctattgctgtagctaggtatcttactctgtccactcttgttcaagtatctaactcttctggaaaccaaataggctttagaagagattatcctatattcctatcagtataatactaaaatgtaactttttaatcatctggtttttaaaagataaacagtttagcccatctctccagagagcaaacataggaatatgactcaggagcctcctagggcttatcatcagccctcacacccgcttccccctccaacccacagcctttgcttccaggtggcaggattactactttgcctcttcagcagcatctactctaggcatattgatcattttagacactgggagaagagaacctcaaactaggaggaaaagacagagcctccacttagttttgggaggggatggcagacagtcaaggagatgagcgtcctaaggcatgttgggatagggtcagatgcaccacccatggagaggtttgtcaacacaaagacatggaaggttagaggtttgtcaacaaaaagacatggaaggttaggtttgtcaacacaaagacatggaagattagaggtttgtcaacacaaagacacaggaagaatgggctgcagaagatttagatgttttccatttgggcacattttacttagctggagaactaggtttaaaacagcctgggtaggaaaattagaagcaagctggatgcagtggctcatgcctgtaatcccaacacttttgggaggtccaggcaggaggatcacttgggcccaggaggtcaagcctgcagcgagctgagatcacaccactgcactccagcctggggtgatagaacaagaccctgtctcaaaaaaaaaaaaaaacaacaaaaacttagaattgaggagttgtacctccattggcttcctcactccaaaataggtgctgatccttcctattcctattctttgccaccttttgggtgtggtgtcaccagcctgtttagccaagtagctttgggcataggctgcccaatctgagcaaacaccagtgaggctctattgagccaagaccaagtcctcaaagcacctgaaccactgtggccttctcagcctacagcagtgtggtctcttacatggccacaaagggacacacagtgacaaaaggctcggaatgttacaatggtaaaatgagtgatctcaaatccactgacagatataaaataggcttagagaggaaaagctgcctctggtcaagtagatcatggcagcatgaattccaactcacttttttacaactccaacttctatgtttatctttgttactttcacttttttacaacctggccagaggcattttttaaatcaggcccaatatcagtattctttttgtgtgtgccaattttgttatcacatccctatgaagttgaaaaataaagttaattttgaccaaaa

SEQ ID NO: 378792 - DNA, 4085 bp, Homo sapiens
agaaaagttctccaagtctgcactcgacccaggaagtccatctggcttcacctctcacttcaacttgggtacagccttctggcgggcaggaggatggcctttggtgcgaacactgccggagtccagggggctggctccctcacctttcatcttctcccggcacttgcaggatccctttgtggccttccacatcaacaagggccttgtgaagaagtatatgaactctctcctgattggagaactgtctccagagcagcccagctttgagcccaccaagaataaagagctgacagatgagttccgggagctgcgggccacagtggagcggatggggctcatgaaggccaaccatgtcttcttcctgctgtacctgctgcacatcttgctgctggatggtgcagcctggctcaccctttgggtctttgggacgtcctttttgcccttcctcctctgtgcggtgctgctcagtgcagttcaggcccaggctggctggctgcagcatgactttgggcacctgtcggtcttcagcacctcaaagtggaaccatctgctacatcattttgtgattggccacctgaagggggcccccgccagttggtggaaccacatgcacttccagcaccatgccaagcccaactgcttccgcaaagacccagacatcaacatgcatcccttcttctttgccttggggaagatcctctctgtggagcttgggaaacagaagaaaaaatatatgccgtacaaccaccagcacaaatacttcttcctaattgggcccccagccttgctgcctctctacttccagtggtatattttctattttgttatccagcgaaagaagtgggtggacttggcctggatgattaccttctacgtccgcttcttcctcacttatgtgccactattggggctgaaagccttcctgggccttttcttcatagtcaggttcctggaaagcaactggtttgtgtgggtgacacagatgaaccatattcccatgcacattgatcatgaccggaacatggactgggtttccacccagctccaggccacatgcaatgtccacaagtctgccttcaatgactggttcagtggacacctcaacttccagattgagcaccatctttttcccacgatgcctcgacacaattaccacaaagtggctcccctggtgcagtccttgtgtgccaagcatggcatagagtaccagtccaagcccctgctgtcagccttcgccgacatcatccactcactaaaggagtcagggcagctctggctagatgcctatcttcaccaataacaacagccaccctgcccagtctggaagaagaggaggaagactctggagccaaggcagaggggagcttgagggacaatgccactatagtttaatactcagagggggttgggtttggggacataaagcctctgactcaaactcctcccttttatcttctagccacagttctaagacccaaagtggggggtggacacagaagtccctaggagggaaggagctgttggggcaggggtgtaaattatttcctttttctagtttggcacatgcaggtagttggtgaacagagagaaccaggagggtaacagaagaggagggacctactgaacccagagtcaggaagagatttaacactaaaattccactcatgccgggcgtggtggcacgcgcctgtaatcccagctacccaggaggctgaggcaggagaatcgcttgaaccggggaggtggaggttgcagtgagctgagatcacgccattgtactccagcctgggcgacagagcaagactccatttcaaaaaaaaaaaaaaaatccactcatataaaaggtgagctcagctcactggtccatttctcagtggcttctccatcctcatttgcaaacctcagagggataaggcagttgaacctgatgagcaagaattataacagcaaggaaacattaatgcttagaattctgagatccagcacaactcagtctgtgggagctcagctcgctgcccagggataggtatgacctatgtctgccttaggctgctgggagatgccattctccagtttcagaagcaggcagggcaaaggtcaagactgtggtattggggtcttttggctctgaaggatcctggaaccactgattttggtttattccctccagggtctaaagagaacaagaggtgctagctcttaccaaaacagatggtagagagagttgctggctatttaaaaagctctttcatcttttaattcacctcttcttttcacctctttaaccactcctcaggaacagaacacttctaggactgggggtcttttagctccataagcaagtgagcagatgggacaagttagtcttttctccctagaaacaaaggggatgcccagtggtttccctttgcttcccaacctaaaatttcaagtttaataaaatagcaattagcagaagtgaccaaattgggagataattatcagtcatgaggaaagacacagatttcggtcataaagaatgtaagggctataagtagaaactttctataacctaaatgatgttatagaattatttttgagcaggagcagaaagattaaatatgatcacttcatacttctaaatcagaaataggaagattaaaaccacagaacagtttgtgatttctattgctgtagctaggtatcttactctgtccactcttgttcaagtatctaactcttctggaaaccaaataggctttagaagagattatcctatattcctatcagtataatactaaaatgtaactttttaatcatctggtttttaaaagataaacagtttagcccatctctccagagagcaaacataggaatatgactcaggagcctcctagggcttatcatcagccctcacacccgcttccccctccaacccacagcctttgcttccaggtggcaggattactactttgcctcttcagcagcatctactctaggcatattgatcattttagacactgggagaagagaacctcaaactaggaggaaaagacagagcctccacttagttttgggaggggatggcagacagtcaaggagatgagcgtcctaaggcatgttgggatagggtcagatgcaccacccatggagaggtttgtcaacacaaagacatggaaggttagaggtttgtcaacaaaaagacatggaaggttaggtttgtcaacacaaagacatggaagattagaggtttgtcaacacaaagacacaggaagaatgggctgcagaagatttagatgttttccatttgggcacattttacttagctggagaactaggtttaaaacagcctgggtaggaaaattagaagcaagctggatgcagtggctcatgcctgtaatcccaacacttttgggaggtccaggcaggaggatcacttgggcccaggaggtcaagcctgcagcgagctgagatcacaccactgcactccagcctggggtgatagaacaagaccctgtctcaaaaaaaaaaaaaaacaacaaaaacttagaattgaggagttgtacctccattggcttcctcactccaaaataggtgctgatccttcctattcctattctttgccaccttttgggtgtggtgtcaccagcctgtttagccaagtagctttgggcataggctgcccaatctgagcaaacaccagtgaggctctattgagccaagaccaagtcctcaaagcacctgaaccactgtggccttctcagcctacagcagtgtggtctcttacatggccacaaagggacacacagtgacaaaaggctcggaatgttacaatggtaaaatgagtgatctcaaatccactgacagatataaaataggcttagagaggaaaagctgcctctggtcaagtagatcatggcagcatgaattccaactcacttttttacaactccaacttctatgtttatctttgttactttcacttttttacaacctggccagaggcattttttaaatcaggcccaatatcagtattctttttgtgtgtgccaattttgttatcacatccctatgaagttgaaaaataaagttaattttgaccaaaa

SEQ ID NO: 378793 - DNA, 3431 bp, Homo sapiens
  misc_feature (17)..(17): n is a, c, g, or t
ggcaggcttgtacgccngggaagtaaaggatatcgggaagatcctctctgtggagcttgggaaacagaagaaaaaatatatgccgtacaaccaccagcacaaatacttcttcctaattgggcccccagccttgctgcctctctacttccagtggtatattttctattttgttatccagcgaaagaagtgggtggacttggcctggatgattaccttctacgtccgcttcttcctcacttatgtgccactattggggctgaaagccttcctgggccttttcttcatagtcaggttcctggaaagcaactggtttgtgtgggtgacacagatgaaccatattcccatgcacattgatcatgaccggaacatggactgggtttccacccagctccaggccacatgcaatgtccacaagtctgccttcaatgactggttcagtggacacctcaacttccagattgagcaccatctttttcccacgatgcctcgacacaattaccacaaagtggctcccctggtgcagtccttgtgtgccaagcatggcatagagtaccagtccaagcccctgctgtcagccttcgccgacatcatccactcactaaaggagtcagggcagctctggctagatgcctatcttcaccaataacaacagccaccctgcccagtctggaagaagaggaggaagactctggagccaaggcagaggggagcttgagggacaatgccactatagtttaatactcagagggggttgggtttggggacataaagcctctgactcaaactcctcccttttatcttctagccacagttctaagacccaaagtggggggtggacacagaagtccctaggagggaaggagctgttggggcaggggtgtaaattatttcctttttctagtttggcacatgcaggtagttggtgaacagagagaaccaggagggtaacagaagaggagggacctactgaacccagagtcaggaagagatttaacactaaaattccactcatgccgggcgtggtggcacgcgcctgtaatcccagctacccaggaggctgaggcaggagaatcgcttgaaccggggaggtggaggttgcagtgagctgagatcacgccattgtactccagcctgggcgacagagcaagactccatttcaaaaaaaaaaaaaaaatccactcatataaaaggtgagctcagctcactggtccatttctcagtggcttctccatcctcatttgcaaacctcagagggataaggcagttgaacctgatgagcaagaattataacagcaaggaaacattaatgcttagaattctgagatccagcacaactcagtctgtgggagctcagctcgctgcccagggataggtatgacctatgtctgccttaggctgctgggagatgccattctccagtttcagaagcaggcagggcaaaggtcaagactgtggtattggggtcttttggctctgaaggatcctggaaccactgattttggtttattccctccagggtctaaagagaacaagaggtgctagctcttaccaaaacagatggtagagagagttgctggctatttaaaaagctctttcatcttttaattcacctcttcttttcacctctttaaccactcctcaggaacagaacacttctaggactgggggtcttttagctccataagcaagtgagcagatgggacaagttagtcttttctccctagaaacaaaggggatgcccagtggtttccctttgcttcccaacctaaaatttcaagtttaataaaatagcaattagcagaagtgaccaaattgggagataattatcagtcatgaggaaagacacagatttcggtcataaagaatgtaagggctataagtagaaactttctataacctaaatgatgttatagaattatttttgagcaggagcagaaagattaaatatgatcacttcatacttctaaatcagaaataggaagattaaaaccacagaacagtttgtgatttctattgctgtagctaggtatcttactctgtccactcttgttcaagtatctaactcttctggaaaccaaataggctttagaagagattatcctatattcctatcagtataatactaaaatgtaactttttaatcatctggtttttaaaagataaacagtttagcccatctctccagagagcaaacataggaatatgactcaggagcctcctagggcttatcatcagccctcacacccgcttccccctccaacccacagcctttgcttccaggtggcaggattactactttgcctcttcagcagcatctactctaggcatattgatcattttagacactgggagaagagaacctcaaactaggaggaaaagacagagcctccacttagttttgggaggggatggcagacagtcaaggagatgagcgtcctaaggcatgttgggatagggtcagatgcaccacccatggagaggtttgtcaacacaaagacatggaaggttagaggtttgtcaacaaaaagacatggaaggttaggtttgtcaacacaaagacatggaagattagaggtttgtcaacacaaagacacaggaagaatgggctgcagaagatttagatgttttccatttgggcacattttacttagctggagaactaggtttaaaacagcctgggtaggaaaattagaagcaagctggatgcagtggctcatgcctgtaatcccaacacttttgggaggtccaggcaggaggatcacttgggcccaggaggtcaagcctgcagcgagctgagatcacaccactgcactccagcctggggtgatagaacaagaccctgtctcaaaaaaaaaaaaaaacaacaaaaacttagaattgaggagttgtacctccattggcttcctcactccaaaataggtgctgatccttcctattcctattctttgccaccttttgggtgtggtgtcaccagcctgtttagccaagtagctttgggcataggctgcccaatctgagcaaacaccagtgaggctctattgagccaagaccaagtcctcaaagcacctgaaccactgtggccttctcagcctacagcagtgtggtctcttacatggccacaaagggacacacagtgacaaaaggctcggaatgttacaatggtaaaatgagtgatctcaaatccactgacagatataaaataggcttagagaggaaaagctgcctctggtcaagtagatcatggcagcatgaattccaactcacttttttacaactccaacttctatgtttatctttgttactttcacttttttacaacctggccagaggcattttttaaatcaggcccaatatcagtattctttttgtgtgtgccaattttgttatcacatccctatgaagttgaaaaataaagttaattttgaccaaaa

SEQ ID NO: 378794 - DNA, 1791 bp, Homo sapiens
acgaggctcggccaatgggaacgcgcgctgcgaggcccgccggtctgccctgcggtgctgaaaacccggcgcgcaggcggctggctctgggcgcgcgccagcaaatccactcctggagcccgcggaccccgagcacgcgcctgacagcccctgctggcccggcgcgcggcgtcgccaggccagctatggcccccgacccggtggccgccgagaccgcggctcagggacctaccccgcgctacttcacctgggacgaggtggcccagcgctcagggtgcgaggagcggtggctagtgatcgaccgtaaggtgtacaacatcagcgagttcacccgccggcatccagggggctcccgggtcatcagccactacgccgggcaggatgccacggatccctttgtggccttccacatcaacaagggccttgtgaagaagtatatgaactctctcctgattggagaactgtctccagagcagcccagctttgagcccaccaagaataaagagctgacagatgagttccgggagctgcgggccacagtggagcggatggggctcatgaaggccaaccatgtcttcttcctgctgtacctgctgcacatcttgctgctggatggtgcagcctggctcaccctttgggtctttgggacgtcctttttgcccttcctcctctgtgcggtgctgctcagtgcagttcaggcccaggctggctggctgcagcatgactttgggcacctgtcggtcttcagcacctcaaagtggaaccatctgctacatcattttgtgattggccacctgaagggggcccccgccagttggtggaaccacatgcacttccagcaccatgccaagcccaactgcttccgcaaagacccagacatcaacatgcatcccttcttctttgccttggggaagatcctctctgtggagcttgggaaacagaagaaaaaatatatgccgtacaaccaccagcacaaatacttcttcctaattgggcccccagccttgctgcctctctacttccagtggtatattttctattttgttatccagcgaaagaagtgggtggacttggcctggatgattaccttctacgtccgcttcttcctcacttatgtgccactattggggctgaaagccttcctgggccttttcttcatagtcaggttcctggaaagcaactggtttgtgtgggtgacacagatgaaccatattcccatgcacattgatcatgaccggaacatggactgggtttccacccagctccaggccacatgcaatgtccacaagtctgccttcaatgactggttcagtggacacctcaacttccagattgagcaccatctttttcccacgatgcctcgacacaattaccacaaagtggctcccctggtgcagtccttgtgtgccaagcatggcatagagtaccagtccaagcccctgctgtcagccttcgccgacatcatccactcactaaaggagtcagggcagctctggctagatgcctatcttcaccaataacaacagccaccctgcccagtctggaagaagaggaggaagactctggagccaaggcagaggggagcttgagggacaatgccactatagtttaatactcagagggggttgggtttggggacataaagcctctgactcaaactcctcccttttatcttctagccacagttctaagacccagctccaggccacatgcaatgtccacaagtctgccttcaatgactggttcagtgacacctcaacttccagattgagcaccatgtttttccagctt

SEQ ID NO: 378795 - DNA, 1562 bp, Homo sapiens
gcactttgtgagatccaccccctgcccacaacaaattgctcctaactccaccgcctatcccaaacctgtaagaactaatgataatcccaccaccctttgctgactctcttttcggactcagcccgcctgcacccaggtgattaaaaagctttattgctcacacaaagcctgtttggtggtctcttcacatggatgtgcgcgaccaccaaataggctttagaagagattatcctatattcctatcagtataatactaaaatgtaactttttaatcatctggtttttaaaagataaacagtttagcccatctctccagagagcaaacataggaatatgactcaggagcctcctagggcttatcatcagccctcacacccgcttccccctccaacccacagcctttgcttccaggtggcaggattactactttgcctcttcagcagcatctactctaggcatattgatcattttagacactgggagaagagaacctcaaactaggaggaaaagacagagcctccacttagttttgggaggggatggcagacagtcaaggagatgagcgtcctaaggcatgttgggatagggtcagatgcaccacccatggagaggtttgtcaacacaaagacatggaaggttagaggtttgtcaacaaaaagacatggaaggttaggtttgtcaacacaaagacatggaagattagaggtttgtcaacacaaagacacaggaagaatgggctgcagaagatttagatgttttccatttgggcacattttacttagctggagaactaggtttaaaacagcctgggtaggaaaattagaagcaagctggatgcagtggctcatgcctgtaatcccaacacttttgggaggtccaggcaggaggatcacttgggcccaggaggtcaagcctgcagcgagctgagatcacaccactgcactccagcctggggtgatagaacaagaccctgtctcaaaaaaaaaaaaaaacaacaaaaacttagaattgaggagttgtacctccattggcttcctcactccaaaataggtgctgatccttcctattcctattctttgccaccttttgggtgtggtgtcaccagcctgtttagccaagtagctttgggcataggctgcccaatctgagcaaacaccagtgaggctctattgagccaagaccaagtcctcaaagcacctgaaccactgtggccttctcagcctacagcagtgtggtctcttacatggccacaaagggacacacagtgacaaaaggctcggaatgttacaatggtaaaatgagtgatctcaaatccactgacagatataaaataggcttagagaggaaaagctgcctctggtcaagtagatcatggcagcatgaattccaactcacttttttacaactccaacttctatgtttatctttgttactttcacttttttacaacctggccagaggcattttttaaatcaggcccaatatcagtattctttttgtgtgtgccaattttgttatcacatccctatgaagttgaaaaataaagttaattttgaccaaaa

SEQ ID NO: 378796 - DNA, 1290 bp, Homo sapiens
acgaggctcggccaatgggaacgcgcgctgcgaggcccgccggtctgccctgcggtgctgaaaacccggcgcgcaggcggctggctctgggcgcgcgccagcaaatccactcctggagcccgcggaccccgagcacgcgcctgacagcccctgctggcccggcgcgcggcgtcgccaggccagctatggcccccgacccggtggccgccgagaccgcggctcagggacctaccccgcgctacttcacctgggacgaggtggcccagcgctcagggtgcgaggagcggtggctagtgatcgaccgtaaggtgtacaacatcagcgagttcacccgccggcatccagggggctcccgggtcatcagccactacgccgggcaggatgccacggatccctttgtggccttccacatcaacaagggccttgtgaagaagtatatgaactctctcctgattggagaactgtctccagagcagcccagctttgagcccaccaagaataaagagctgacagatgagttccgggagctgcgggccacagtggagcggatggggctcatgaaggccaaccatgtcttcttcctgctgtacctgctgcacatcttgctgctggatggtgcagcctggctcaccctttgggtctttgggacgtcctttttgcccttcctcctctgtgcggtgctgctcagtgcagttcaggcccaggctggctggctgcagcatgactttgggcacctgtcggtcttcagcacctcaaagtggaaccatctgctacatcattttgtgattggccacctgaagggggcccccgccagttggtggaaccacatgcacttccagcaccatgccaagcccaactgcttccgcaaagacccagacatcaacatgcatcccttcttctttgccttggggaagatcctctctgtggagcttgggaaacagaagaaaaaatatatgccgtacaaccaccagcacaaatacttcttcctaattgggcccccagccttgctgcctctctacttccagtggtatattttctattttgttatccagcgaaagaagtgggtggacttggcctggatcagcaaacaggaatacgatgaagccgggcttccattgtccaccgcaaatgcttctaaaacactttcctgctcctctctgtctctagcacacaactgtgaatgtcctgtggaattatgccttcagttcttttccaaatcattcctagccaaagctctgactcgttacctatgtgttttttaataaatctgaaataggctactggtaaaaa

SEQ ID NO: 378797 - DNA, 1008 bp, Homo sapiens
acgaggctcggccaatgggaacgcgcgctgcgaggcccgccggtctgccctgcggtgctgaaaacccggcgcgcaggcggctggctctgggcgcgcgccagcaaatccactcctggagcccgcggaccccgagcacgcgcctgacagcccctgctggcccggcgcgcggcgtcgccaggccagctatggcccccgacccggtggccgccgagaccgcggctcagggacctaccccgcgctacttcacctgggacgaggtggcccagcgctcagggtgcgaggagcggtggctagtgatcgaccgtaaggtgtacaacatcagcgagttcacccgccggcatccagggggctcccgggtcatcagccactacgccgggcaggatgccacggatccctttgtggccttccacatcaacaagggccttgtgaagaagtatatgaactctctcctgattggagaactgtctccagagcagcccagctttgagcccaccaagaataaagagctgacagatgagttccgggagctgcgggccacagtggagcggatggggctcatgaaggccaaccatgtcttcttcctgctgtacctgctgcacatcttgctgctggatggtgcagcctggctcaccctttgggtctttgggacgtcctttttgcccttcctcctctgtgcggtgctgctcagtgcagttcaggcccaggctggctggctgcagcatgactttgggcacctgtcggtcttcagcacctcaaagtggaaccatctgctacatcattttgtgattggccacctgaagggggcccccgccagttggtggaaccacatgcacttccagcaccatgccaagcccaactgcttccgcaaagacccagacatcaacatgcatcccttcttctttgccttggggaagatcctctctgtggagctgggaaccgaagaaaaatatacatgcagaaaaaggctggccaaggggcccataaaacaaatggtcccgaattctagtc

SEQ ID NO: 378798 - DNA, 354 bp, Homo sapiens
tggagcagttatctgaggggggaatcagaattctgggctctgtgtgtactgtttttgtctgtgtaatacatctaacaggttcctggaaagcaactggtttgtgtgggtgacacagatgaaccatattcccatgcacattgatcatgaccggaacatggactgggtttccacccaggtaagggacagtcactcagaagactggagcataacacaactattgaaaaggatgcgtaggtgaaaacagcaaaaacaaaaagtcccccaaacagcattttctcattagcctgaggctcttgttctgcaaccatgtgaagggagtgaccaagacagtctcatgtcccttcctcagccagc

SEQ ID NO: 378799 - DNA, 1280 bp, Homo sapiens
tgtactttaacccgttttaaagtacgtttgccattctcagggcaactgaatatgactcaggagcctcctagggcttatcatcagccctcacacccgcttccccctccaacccacagcctttgcttccaggtggcaggattactactttgcctcttcagcagcatctactctaggcatattgatcattttagacactgggagaagagaacctcaaactaggaggaaaagacagagcctccacttagttttgggaggggatggcagacagtcaaggagatgagcgtcctaaggcatgttgggatagggtcagatgcaccacccatggagaggtttgtcaacacaaagacatggaaggttagaggtttgtcaacaaaaagacatggaaggttaggtttgtcaacacaaagacatggaagattagaggtttgtcaacacaaagacacaggaagaatgggctgcagaagatttagatgttttccatttgggcacattttacttagctggagaactaggtttaaaacagcctgggtaggaaaattagaagcaagctggatgcagtggctcatgcctgtaatcccaacacttttgggaggtccaggcaggaggatcacttgggcccaggaggtcaagcctgcagcgagctgagatcacaccactgcactccagcctggggtgatagaacaagaccctgtctcaaaaaaaaaaaaaaacaacaaaaacttagaattgaggagttgtacctccattggcttcctcactccaaaataggtgctgatccttcctattcctattctttgccaccttttgggtgtggtgtcaccagcctgtttagccaagtagctttgggcataggctgcccaatctgagcaaacaccagtgaggctctattgagccaagaccaagtcctcaaagcacctgaaccactgtggccttctcagcctacagcagtgtggtctcttacatggccacaaagggacacacagtgacaaaaggctcggaatgttacaatggtaaaatgagtgatctcaaatccactgacagatataaaataggcttagagaggaaaagctgcctctggtcaagtagatcatggcagcatgaattccaactcacttttttacaactccaacttctatgtttatctttgttactttcacttttttacaacctggccagaggcattttttaaatcaggcccaatatcagtattctttttgtgtgtgccaattttgttatcacatccctatgaagttgaaaaataaagttaattttgaccaaaa

SEQ ID NO: 378800 - DNA, 4747 bp, Homo sapiens
acgaggctcggccaatgggaacgcgcgctgcgaggcccgccggtctgccctgcggtgctgaaaacccggcgcgcaggcggctggctctgggcgcgcgccagcaaatccactcctggagcccgcggaccccgagcacgcgcctgacagcccctgctggcccggcgcgcggcgtcgccaggccagctatggcccccgacccggtggccgccgagaccgcggctcagggacctaccccgcgctacttcacctgggacgaggtggcccagcgctcagggtgcgaggagcggtggctagtgatcgaccgtaaggtgtacaacatcagcgagttcacccgccggcatccagggggctcccgggtcatcagccactacgccgggcaggatgccacggatccctttgtggccttccacatcaacaagggccttgtgaagaagtatatgaactctctcctgattggagaactgtctccagagcagcccagctttgagcccaccaagaataaagagctgacagatgagttccgggagctgcgggccacagtggagcggatggggctcatgaaggccaaccatgtcttcttcctgctgtacctgctgcacatcttgctgctggatggtgcagcctggctcaccctttgggtctttgggacgtcctttttgcccttcctcctctgtgcggtgctgctcagtgcagttcaggcccaggctggctggctgcagcatgactttgggcacctgtcggtcttcagcacctcaaagtggaaccatctgctacatcattttgtgattggccacctgaagggggcccccgccagttggtggaaccacatgcacttccagcaccatgccaagcccaactgcttccgcaaagacccagacatcaacatgcatcccttcttctttgccttggggaagatcctctctgtggagcttgggaaacagaagaaaaaatatatgccgtacaaccaccagcacaaatacttcttcctaattgggcccccagccttgctgcctctctacttccagtggtatattttctattttgttatccagcgaaagaagtgggtggacttggcctggatgattaccttctacgtccgcttcttcctcacttatgtgccactattggggctgaaagccttcctgggccttttcttcatagtcaggttcctggaaagcaactggtttgtgtgggtgacacagatgaaccatattcccatgcacattgatcatgaccggaacatggactgggtttccacccagctccaggccacatgcaatgtccacaagtctgccttcaatgactggttcagtggacacctcaacttccagattgagcaccatctttttcccacgatgcctcgacacaattaccacaaagtggctcccctggtgcagtccttgtgtgccaagcatggcatagagtaccagtccaagcccctgctgtcagccttcgccgacatcatccactcactaaaggagtcagggcagctctggctagatgcctatcttcaccaataacaacagccaccctgcccagtctggaagaagaggaggaagactctggagccaaggcagaggggagcttgagggacaatgccactatagtttaatactcagagggggttgggtttggggacataaagcctctgactcaaactcctcccttttatcttctagccacagttctaagacccaaagtggggggtggacacagaagtccctaggagggaaggagctgttggggcaggggtgtaaattatttcctttttctagtttggcacatgcaggtagttggtgaacagagagaaccaggagggtaacagaagaggagggacctactgaacccagagtcaggaagagatttaacactaaaattccactcatgccgggcgtggtggcacgcgcctgtaatcccagctacccaggaggctgaggcaggagaatcgcttgaaccggggaggtggaggttgcagtgagctgagatcacgccattgtactccagcctgggcgacagagcaagactccatttcaaaaaaaaaaaaaaaatccactcatataaaaggtgagctcagctcactggtccatttctcagtggcttctccatcctcatttgcaaacctcagagggataaggcagttgaacctgatgagcaagaattataacagcaaggaaacattaatgcttagaattctgagatccagcacaactcagtctgtgggagctcagctcgctgcccagggataggtatgacctatgtctgccttaggctgctgggagatgccattctccagtttcagaagcaggcagggcaaaggtcaagactgtggtattggggtcttttggctctgaaggatcctggaaccactgattttggtttattccctccagggtctaaagagaacaagaggtgctagctcttaccaaaacagatggtagagagagttgctggctatttaaaaagctctttcatcttttaattcacctcttcttttcacctctttaaccactcctcaggaacagaacacttctaggactgggggtcttttagctccataagcaagtgagcagatgggacaagttagtcttttctccctagaaacaaaggggatgcccagtggtttccctttgcttcccaacctaaaatttcaagtttaataaaatagcaattagcagaagtgaccaaattgggagataattatcagtcatgaggaaagacacagatttcggtcataaagaatgtaagggctataagtagaaactttctataacctaaatgatgttatagaattatttttgagcaggagcagaaagattaaatatgatcacttcatacttctaaatcagaaataggaagattaaaaccacagaacagtttgtgatttctattgctgtagctaggtatcttactctgtccactcttgttcaagtatctaactcttctggaaaccaaataggctttagaagagattatcctatattcctatcagtataatactaaaatgtaactttttaatcatctggtttttaaaagataaacagtttagcccatctctccagagagcaaacataggaatatgactcaggagcctcctagggcttatcatcagccctcacacccgcttccccctccaacccacagcctttgcttccaggtggcaggattactactttgcctcttcagcagcatctactctaggcatattgatcattttagacactgggagaagagaacctcaaactaggaggaaaagacagagcctccacttagttttgggaggggatggcagacagtcaaggagatgagcgtcctaaggcatgttgggatagggtcagatgcaccacccatggagaggtttgtcaacacaaagacatggaaggttagaggtttgtcaacaaaaagacatggaaggttaggtttgtcaacacaaagacatggaagattagaggtttgtcaacacaaagacacaggaagaatgggctgcagaagatttagatgttttccatttgggcacattttacttagctggagaactaggtttaaaacagcctgggtaggaaaattagaagcaagctggatgcagtggctcatgcctgtaatcccaacacttttgggaggtccaggcaggaggatcacttgggcccaggaggtcaagcctgcagcgagctgagatcacaccactgcactccagcctggggtgatagaacaagaccctgtctcaaaaaaaaaaaaaaacaacaaaaacttagaattgaggagttgtacctccattggcttcctcactccaaaataggtgctgatccttcctattcctattctttgccaccttttgggtgtggtgtcaccagcctgtttagccaagtagctttgggcataggctgcccaatctgagcaaacaccagtgaggctctattgagccaagaccaagtcctcaaagcacctgaaccactgtggccttctcagcctacagcagtgtggtctcttacatggccacaaagggacacacagtgacaaaaggctcggaatgttacaatggtaaaatgagtgatctcaaatccactgacagatataaaataggcttagagaggaaaagctgcctctggtcaagtagatcatggcagcatgaattccaactcacttttttacaactccaacttctatgtttatctttgttactttcacttttttacaacctggccagaggcattttttaaatcaggcccaatatcagtattctttttgtgtgtgccaattttgttatcacatccctatgaagttgaaaaataaagttaattttgaccaaaacaaaaaaaaaacaagaaaaaacaaaaaaaaaaaaaaaaaaaagaggcgggcggcgcgccccgcgttaataatagtccccctacgcgggggcccaccgacatcgatgcagccccccattttttttgggacaagggcgggccccaaatgagaggggctgtatttaataatacaagacgagcacggcgccgcgttatcaacaccaccggcagagccgaaaaaactgcgccacgtgacctcatttgggaaggaaaccccaccacctcggggggggagacaagaatgagagagccacccacccaaaagaaatataaaaccccccgaggcaggaaaaaaaacacataagcggggattaaggtggggtgacaccaaccggcagtatagatgaccgcgcgaaaaaaacatctgcacaacgcgataatgtagaacacaattaccggcaggg

SEQ ID NO: 378801 - DNA, 4205 bp, Homo sapiens
taaaaacgaagcacaattatagcggcgctattcataagcatctgagcctagaccgagcccgcgctaagcctctgccggcgcgcgtcaggcactgtggcccgaccgtgcgcgagacgcggctcagggacctaccccgcgctacttcacctgggacgaggtggcccagcgctcagggtgcgaggagcggtggctagtgatcgaccgtaaggtgtacaacatcagcgagttcacccgccggcatccagggggctcccgggtcatcagccactacgccgggcaggatgccacggatccctttgtggccttccacatcaacaagggccttgtgaagaagtatatgaactctctcctgattggagaactgtctccagagcagcccagctttgagcccaccaagaataaagagctgacagatgagttccgggagctgcgggccacagtggagcggatggggctcatgaaggccaaccatgtcttcttcctgctgtacctgctgcacatcttgctgctggatggtgcagcctggctcaccctttgggtctttgggacgtcctttttgcccttcctcctctgtgcggtgctgctcagtgcagttcaggcccaggctggctggctgcagcatgactttgggcacctgtcggtcttcagcacctcaaagtggaaccatctgctacatcattttgtgattggccacctgaagggggcccccgccagttggtggaaccacatgcacttccagcaccatgccaagcccaactgcttccgcaaagacccagacatcaacatgcatcccttcttctttgccttggggaagatcctctctgtggagcttgggaaacagaagaaaaaatatatgccgtacaaccaccagcacaaatacttcttcctaattgggcccccagccttgctgcctctctacttccagtggtatattttctattttgttatccagcgaaagaagtgggtggacttggcctggatgattaccttctacgtccgcttcttcctcacttatgtgccactattggggctgaaagccttcctgggccttttcttcatagtcaggttcctggaaagcaactggtttgtgtgggtgacacagatgaaccatattcccatgcacattgatcatgaccggaacatggactgggtttccacccagctccaggccacatgcaatgtccacaagtctgccttcaatgactggttcagtggacacctcaacttccagattgagcaccatctttttcccacgatgcctcgacacaattaccacaaagtggctcccctggtgcagtccttgtgtgccaagcatggcatagagtaccagtccaagcccctgctgtcagccttcgccgacatcatccactcactaaaggagtcagggcagctctggctagatgcctatcttcaccaataacaacagccaccctgcccagtctggaagaagaggaggaagactctggagccaaggcagaggggagcttgagggacaatgccactatagtttaatactcagagggggttgggtttggggacataaagcctctgactcaaactcctcccttttatcttctagccacagttctaagacccaaagtggggggtggacacagaagtccctaggagggaaggagctgttggggcaggggtgtaaattatttcctttttctagtttggcacatgcaggtagttggtgaacagagagaaccaggagggtaacagaagaggagggacctactgaacccagagtcaggaagagatttaacactaaaattccactcatgccgggcgtggtggcacgcgcctgtaatcccagctacccaggaggctgaggcaggagaatcgcttgaaccggggaggtggaggttgcagtgagctgagatcacgccattgtactccagcctgggcgacagagcaagactccatttcaaaaaaaaaaaaaaaatccactcatataaaaggtgagctcagctcactggtccatttctcagtggcttctccatcctcatttgcaaacctcagagggataaggcagttgaacctgatgagcaagaattataacagcaaggaaacattaatgcttagaattctgagatccagcacaactcagtctgtgggagctcagctcgctgcccagggataggtatgacctatgtctgccttaggctgctgggagatgccattctccagtttcagaagcaggcagggcaaaggtcaagactgtggtattggggtcttttggctctgaaggatcctggaaccactgattttggtttattccctccagggtctaaagagaacaagaggtgctagctcttaccaaaacagatggtagagagagttgctggctatttaaaaagctctttcatcttttaattcacctcttcttttcacctctttaaccactcctcaggaacagaacacttctaggactgggggtcttttagctccataagcaagtgagcagatgggacaagttagtcttttctccctagaaacaaaggggatgcccagtggtttccctttgcttcccaacctaaaatttcaagtttaataaaatagcaattagcagaagtgaccaaattgggagataattatcagtcatgaggaaagacacagatttcggtcataaagaatgtaagggctataagtagaaactttctataacctaaatgatgttatagaattatttttgagcaggagcagaaagattaaatatgatcacttcatacttctaaatcagaaataggaagattaaaaccacagaacagtttgtgatttctattgctgtagctaggtatcttactctgtccactcttgttcaagtatctaactcttctggaaaccaaataggctttagaagagattatcctatattcctatcagtataatactaaaatgtaactttttaatcatctggtttttaaaagataaacagtttagcccatctctccagagagcaaacataggaatatgactcaggagcctcctagggcttatcatcagccctcacacccgcttccccctccaacccacagcctttgcttccaggtggcaggattactactttgcctcttcagcagcatctactctaggcatattgatcattttagacactgggagaagagaacctcaaactaggaggaaaagacagagcctccacttagttttgggaggggatggcagacagtcaaggagatgagcgtcctaaggcatgttgggatagggtcagatgcaccacccatggagaggtttgtcaacacaaagacatggaaggttagaggtttgtcaacaaaaagacatggaaggttaggtttgtcaacacaaagacatggaagattagaggtttgtcaacacaaagacacaggaagaatgggctgcagaagatttagatgttttccatttgggcacattttacttagctggagaactaggtttaaaacagcctgggtaggaaaattagaagcaagctggatgcagtggctcatgcctgtaatcccaacacttttgggaggtccaggcaggaggatcacttgggcccaggaggtcaagcctgcagcgagctgagatcacaccactgcactccagcctggggtgatagaacaagaccctgtctcaaaaaaaaaaaaaaacaacaaaaacttagaattgaggagttgtacctccattggcttcctcactccaaaataggtgctgatccttcctattcctattctttgccaccttttgggtgtggtgtcaccagcctgtttagccaagtagctttgggcataggctgcccaatctgagcaaacaccagtgaggctctattgagccaagaccaagtcctcaaagcacctgaaccactgtggccttctcagcctacagcagtgtggtctcttacatggccacaaagggacacacagtgacaaaaggctcggaatgttacaatggtaaaatgagtgatctcaaatccactgacagatataaaataggcttagagaggaaaagctgcctctggtcaagtagatcatggcagcatgaattccaactcacttttttacaactccaacttctatgtttatctttgttactttcacttttttacaacctggccagaggcattttttaaatcaggcccaatatcagtattctttttgtgtgtgccaattttgttatcacatccctatgaagttgaaaaataaagttaattttgaccaaaa

SEQ ID NO: 378802 - DNA, 4116 bp, Homo sapiens
aattcggaggaaagcccggaggcgcctgatcatacctgttgcccggtgattgggtgtcctgcggatgcgggatgaaaaggcgggagagaggcctggagaagtggagtctggggagtggggatggaggccaacaacacgcacacacaaacaaagggtcccgcctccctgccgtgcattccatctgcagccccgagcctcaggatccctttgtggccttccacatcaacaagggccttgtgaagaagtatatgaactctctcctgattggagaactgtctccagagcagcccagctttgagcccaccaagaataaagagctgacagatgagttccgggagctgcgggccacagtggagcggatggggctcatgaaggccaaccatgtcttcttcctgctgtacctgctgcacatcttgctgctggatggtgcagcctggctcaccctttgggtctttgggacgtcctttttgcccttcctcctctgtgcggtgctgctcagtgcagttcaggcccaggctggctggctgcagcatgactttgggcacctgtcggtcttcagcacctcaaagtggaaccatctgctacatcattttgtgattggccacctgaagggggcccccgccagttggtggaaccacatgcacttccagcaccatgccaagcccaactgcttccgcaaagacccagacatcaacatgcatcccttcttctttgccttggggaagatcctctctgtggagcttgggaaacagaagaaaaaatatatgccgtacaaccaccagcacaaatacttcttcctaattgggcccccagccttgctgcctctctacttccagtggtatattttctattttgttatccagcgaaagaagtgggtggacttggcctggatgattaccttctacgtccgcttcttcctcacttatgtgccactattggggctgaaagccttcctgggccttttcttcatagtcaggttcctggaaagcaactggtttgtgtgggtgacacagatgaaccatattcccatgcacattgatcatgaccggaacatggactgggtttccacccagctccaggccacatgcaatgtccacaagtctgccttcaatgactggttcagtggacacctcaacttccagattgagcaccatctttttcccacgatgcctcgacacaattaccacaaagtggctcccctggtgcagtccttgtgtgccaagcatggcatagagtaccagtccaagcccctgctgtcagccttcgccgacatcatccactcactaaaggagtcagggcagctctggctagatgcctatcttcaccaataacaacagccaccctgcccagtctggaagaagaggaggaagactctggagccaaggcagaggggagcttgagggacaatgccactatagtttaatactcagagggggttgggtttggggacataaagcctctgactcaaactcctcccttttatcttctagccacagttctaagacccaaagtggggggtggacacagaagtccctaggagggaaggagctgttggggcaggggtgtaaattatttcctttttctagtttggcacatgcaggtagttggtgaacagagagaaccaggagggtaacagaagaggagggacctactgaacccagagtcaggaagagatttaacactaaaattccactcatgccgggcgtggtggcacgcgcctgtaatcccagctacccaggaggctgaggcaggagaatcgcttgaaccggggaggtggaggttgcagtgagctgagatcacgccattgtactccagcctgggcgacagagcaagactccatttcaaaaaaaaaaaaaaaatccactcatataaaaggtgagctcagctcactggtccatttctcagtggcttctccatcctcatttgcaaacctcagagggataaggcagttgaacctgatgagcaagaattataacagcaaggaaacattaatgcttagaattctgagatccagcacaactcagtctgtgggagctcagctcgctgcccagggataggtatgacctatgtctgccttaggctgctgggagatgccattctccagtttcagaagcaggcagggcaaaggtcaagactgtggtattggggtcttttggctctgaaggatcctggaaccactgattttggtttattccctccagggtctaaagagaacaagaggtgctagctcttaccaaaacagatggtagagagagttgctggctatttaaaaagctctttcatcttttaattcacctcttcttttcacctctttaaccactcctcaggaacagaacacttctaggactgggggtcttttagctccataagcaagtgagcagatgggacaagttagtcttttctccctagaaacaaaggggatgcccagtggtttccctttgcttcccaacctaaaatttcaagtttaataaaatagcaattagcagaagtgaccaaattgggagataattatcagtcatgaggaaagacacagatttcggtcataaagaatgtaagggctataagtagaaactttctataacctaaatgatgttatagaattatttttgagcaggagcagaaagattaaatatgatcacttcatacttctaaatcagaaataggaagattaaaaccacagaacagtttgtgatttctattgctgtagctaggtatcttactctgtccactcttgttcaagtatctaactcttctggaaaccaaataggctttagaagagattatcctatattcctatcagtataatactaaaatgtaactttttaatcatctggtttttaaaagataaacagtttagcccatctctccagagagcaaacataggaatatgactcaggagcctcctagggcttatcatcagccctcacacccgcttccccctccaacccacagcctttgcttccaggtggcaggattactactttgcctcttcagcagcatctactctaggcatattgatcattttagacactgggagaagagaacctcaaactaggaggaaaagacagagcctccacttagttttgggaggggatggcagacagtcaaggagatgagcgtcctaaggcatgttgggatagggtcagatgcaccacccatggagaggtttgtcaacacaaagacatggaaggttagaggtttgtcaacaaaaagacatggaaggttaggtttgtcaacacaaagacatggaagattagaggtttgtcaacacaaagacacaggaagaatgggctgcagaagatttagatgttttccatttgggcacattttacttagctggagaactaggtttaaaacagcctgggtaggaaaattagaagcaagctggatgcagtggctcatgcctgtaatcccaacacttttgggaggtccaggcaggaggatcacttgggcccaggaggtcaagcctgcagcgagctgagatcacaccactgcactccagcctggggtgatagaacaagaccctgtctcaaaaaaaaaaaaaaacaacaaaaacttagaattgaggagttgtacctccattggcttcctcactccaaaataggtgctgatccttcctattcctattctttgccaccttttgggtgtggtgtcaccagcctgtttagccaagtagctttgggcataggctgcccaatctgagcaaacaccagtgaggctctattgagccaagaccaagtcctcaaagcacctgaaccactgtggccttctcagcctacagcagtgtggtctcttacatggccacaaagggacacacagtgacaaaaggctcggaatgttacaatggtaaaatgagtgatctcaaatccactgacagatataaaataggcttagagaggaaaagctgcctctggtcaagtagatcatggcagcatgaattccaactcacttttttacaactccaacttctatgtttatctttgttactttcacttttttacaacctggccagaggcattttttaaatcaggcccaatatcagtattctttttgtgtgtgccaattttgttatcacatccctatgaagttgaaaaataaagttaattttgaccaaaa

SEQ ID NO: 378803 - DNA, 2125 bp, Homo sapiens
acgaggctcggccaatgggaacgcgcgctgcgaggcccgccggtctgccctgcggtgctgaaaacccggcgcgcaggcggctggctctgggcgcgcgccagcaaatccactcctggagcccgcggaccccgagcacgcgcctgacagcccctgctggcccggcgcgcggcgtcgccaggccagctatggcccccgacccggtggccgccgagaccgcggctcagggacctaccccgcgctacttcacctgggacgaggtggcccagcgctcagggtgcgaggagcggtggctagtgatcgaccgtaaggtgtacaacatcagcgagttcacccgccggcatccagggggctcccgggtcatcagccactacgccgggcaggatgccacggatccctttgtggccttccacatcaacaagggccttgtgaagaagtatatgaactctctcctgattggagaactgtctccagagcagcccagctttgagcccaccaagaataaagagctgacagatgagttccgggagctgcgggccacagtggagcggatggggctcatgaaggccaaccatgtcttcttcctgctgtacctgctgcacatcttgctgctggatggtgcagcctggctcaccctttgggtctttgggacgtcctttttgcccttcctcctctgtgcggtgctgctcagtgcagttcaggcccaggctggctggctgcagcatgactttgggcacctgtcggtcttcagcacctcaaagtggaaccatctgctacatcattttgtgattggccacctgaagggggcccccgccagttggtggaaccacatgcacttccagcaccatgccaagcccaactgcttccgcaaagacccagacatcaacatgcatcccttcttctttgccttggggaagatcctctctgtggagcttgggaaacagaagaaaaaatatatgccgtacaaccaccagcacaaatacttcttcctaattgggcccccagccttgctgcctctctacttccagtggtatattttctattttgttatccagcgaaagaagtgggtggacttggcctggatgattaccttctacgtccgcttcttcctcacttatgtgccactattggggctgaaagccttcctgggccttttcttcatagtcaggttcctggaaagcaactggtttgtgtgggtgacacagatgaaccatattcccatgcacattgatcatgaccggaacatggactgggtttccacccagctccaggccacatgcaatgtccacaagtctgccttcaatgactggttcagtggacacctcaacttccagattgagcaccatctttttcccacgatgcctcgacacaattaccacaaagtggctcccctggtgcagtccttgtgtgccaagcatggcatagagtaccagtccaagcccctgctgtcagccttcgccgacatcatccactcactaaaggagtcagggcagctctggctagatgcctatcttcaccaataacaacagccaccctgcccagtctggaagaagaggaggaagactctggagccaaggcagaggggagcttgagggacaatgccactatagtttaatactcagagggggttgggtttggggacataaagcctctgactcaaactccaaaaaaaaaaaaaaaaaaaaaaaaaaaaaaaacaaaaaaaaaacaagaaaaaacaaaaaaaaaaaggggggggcgccccaaaaaaaataaccccccggggggcccctttttccccctccccccttttttttaaaaggggggcccccaaaggggggggccgttaataaaaacacgaaggagcggcgccgggtaaacacccgcgcgcggggggaacgacccgtgctcgcggggctcttggtggggggagcgccccacctttgtggcgcgcggcacatggctgacccaccccaaagggagtttaccgggccacggaaaaacaacactagcggtttggtggtgcccgcaatctcgccgggaagcctgcgtcgtttttgacgcttccgtttacactactatttgtcatatttgccgttgctcacgtaacataacgctattcctactctcgcgagtcacaactagctga

SEQ ID NO: 378804 - DNA, 1517 bp, Homo sapiens
acgaggctcggccaatgggaacgcgcgctgcgaggcccgccggtctgccctgcggtgctgaaaacccggcgcgcaggcggctggctctgggcgcgcgccagcaaatccactcctggagcccgcggaccccgagcacgcgcctgacagcccctgctggcccggcgcgcggcgtcgccaggccagctatggcccccgacccggtggccgccgagaccgcggctcagggacctaccccgcgctacttcacctgggacgaggtggcccagcgctcagggtgcgaggagcggtggctagtgatcgaccgtaaggtgtacaacatcaccctcacacccgcttccccctccaacccacagcctttgcttccaggtggcaggattactactttgcctcttcagcagcatctactctaggcatattgatcattttagacactgggagaagagaacctcaaactaggaggaaaagacagagcctccacttagttttgggaggggatggcagacagtcaaggagatgagcgtcctaaggcatgttgggatagggtcagatgcaccacccatggagaggtttgtcaacacaaagacatggaaggttagaggtttgtcaacaaaaagacatggaaggttaggtttgtcaacacaaagacatggaagattagaggtttgtcaacacaaagacacaggaagaatgggctgcagaagatttagatgttttccatttgggcacattttacttagctggagaactaggtttaaaacagcctgggtaggaaaattagaagcaagctggatgcagtggctcatgcctgtaatcccaacacttttgggaggtccaggcaggaggatcacttgggcccaggaggtcaagcctgcagcgagctgagatcacaccactgcactccagcctggggtgatagaacaagaccctgtctcaaaaaaaaaaaaaaacaacaaaaacttagaattgaggagttgtacctccattggcttcctcactccaaaataggtgctgatccttcctattcctattctttgccaccttttgggtgtggtgtcaccagcctgtttagccaagtagctttgggcataggctgcccaatctgagcaaacaccagtgaggctctattgagccaagaccaagtcctcaaagcacctgaaccactgtggccttctcagcctacagcagtgtggtctcttacatggccacaaagggacacacagtgacaaaaggctcggaatgttacaatggtaaaatgagtgatctcaaatccactgacagatataaaataggcttagagaggaaaagctgcctctggtcaagtagatcatggcagcatgaattccaactcacttttttacaactccaacttctatgtttatctttgttactttcacttttttacaacctggccagaggcattttttaaatcaggcccaatatcagtattctttttgtgtgtgccaattttgttatcacatccctatgaagttgaaaaataaagttaattttgaccaaaa

SEQ ID NO: 378805 - DNA, 1072 bp, Homo sapiens
  misc_feature (9)..(10): n is a, c, g, or t
  misc_feature (13)..(13): n is a, c, g, or t
  misc_feature (20)..(21): n is a, c, g, or t
  misc_feature (24)..(25): n is a, c, g, or t
  misc_feature (27)..(27): n is a, c, g, or t
  misc_feature (29)..(29): n is a, c, g, or t
  misc_feature (31)..(32): n is a, c, g, or t
  misc_feature (874)..(874): n is a, c, g, or t
  misc_feature (876)..(876): n is a, c, g, or t
  misc_feature (881)..(882): n is a, c, g, or t
  misc_feature (888)..(888): n is a, c, g, or t
  misc_feature (890)..(890): n is a, c, g, or t
  misc_feature (894)..(894): n is a, c, g, or t
aaggcgagnngangctgggnnganncngngnngcaaggtacagtcgccgcgtgcggagcttgttactggttacttggcctcatggcggtccgagcttcgttcgagaacaactgtgagatcggctgctttgccaagctcaccaacacctactgtctggtagcgatcggaggctcagagaacttctacagtgtgttcgagggcgagctctccgataccatccccgtggtgcacgcgtctatcgccggctgccgcatcatcgggcgcatgtgtgtggggaacaggcacggtctcctggtacccaacaataccaccgaccaggagctgcaacacattcgcaacagcctcccagacacagtgcagattaggcgggtggaggagcggctctcagccttgggcaatgtcaccacctgcaatgactacgtggccttggtccacccagacttggacagggagacagaagaaattctggcagatgtgctcaaggtggaagtcttcagacagacagtggccgaccaggtgctagtaggaagctactgtgtcttcagcaatcagggagggctggtgcatcccaagacttcaattgaagaccaggatgagctgtcctctcttcttcaagtcccccttgtggcggggactgtgaaccgaggcagtgaggtgattgctgctgggatggtggtgaatgactggtgtgccttctgtggcctggacacaaccagcacagagctgtcagtggtggagagtgtcttcaagctgaatgaagcccagcctagcaccattgccaccagcatgcgggattccctcattgaagcctcactgagtcacttccaagttgtccatggctctggtctggatgggccactttccattcgccaangncgggnngcgggngnaaanccatgggatgggggtggagccaccttcactggtattgcggcttatgcggaaacgctgtggtggtgagctgctcggtaagtgggcgcacctaaggtccgggaaaaaaaacaaagaaacacacaaacgctgggggagagctctcacagggctaagcaagaccacaggtccttttcttctc

SEQ ID NO: 378806 - DNA, 640 bp, Homo sapiens
  misc_feature (41)..(41): n is a, c, g, or t
acacctagaggattacgctgatcgcttaggtgcaagtcttnaacagacagtggccgaccaggtgctagtaggaagctactgtgtcttcagcaatcagggagggctggtgcatcccaagacttcaattgaagaccaggatgagctgtcctctcttcttcaagtcccccttgtggcggggactgtgaaccgaggcagtgaggtgattgctgctgggatggtggtgaatgactggtgtgccttctgtggcctggacacaaccagcacagagctgtcagtggtggagagtgtcttcaagctgaatgaagcccagcctagcaccattgccaccagcatgcgggattccctcattgacagcctcacctgagtcaccttccaagttgttccatgggctcctggctctggactgtggccaaccttctccacattccgcccaatctgtaccggatgctggcagggaggtggcagagagctcactgggactgaggggctgggcacccaacccttttccacctgtgcttatcgcctggatctatcattactgcaaaaacctgctctgttgtgctggctggcaggccctgtggctgctggctgagggttctgctgtcctgtgccaccccattaaagtgcagttccctccggg

SEQ ID NO: 378807 - DNA, 563 bp, Homo sapiens
  misc_feature (12)..(12): n is a, c, g, or t
  misc_feature (543)..(543): n is a, c, g, or t
  misc_feature (562)..(562): n is a, c, g, or t
attcggcacagngtttttagggagtccaaggtacagtcgccgcgtgcggagcttgttactggttacttggcctcatggcggtccgagcttcgttcgagaacaactgtgagatcggctgctttgccaagctcaccaacacctactgtctggtagcgatcggaggctcagagaacttctacagtgtgttcgagggcgagctctccgataccatccccgtggtgcacgcgtctatcgccggctgccgcatcatcgggcgcatgtgtgtggggaacaggcacggtctcctggtacccaacaataccaccgaccaggagctgcaacacattcgcaacagcctcccagacacagtgcagattaggcgggtggaggagcggctctcagccttgggcaatgtcaccacctgcaatgactacgtggccttggtccacccagacttggacagggagacagaagaaattctggcagatgtgctcaaggtggaagtcttcagacagacatggcgacagtgctatagagcacgtgcttcacatcaggaggtgtcanccagctcattcagatctgnc

SEQ ID NO: 378808 - DNA, 1097 bp, Homo sapiens
gtaagctggtgtgaggggaacctgggagggtcagctccggtcctgggtcgggaggggtgggggccagaggattcagggccggaggttctggtgggggcccagtgggcgggacccgaggacggaggggccgggaggccgagaggggcggggtcgcggcggggcctgagggacggaggccgggatacttgggaaaggatccgccggccttgaactcccgcctccgccgcccctaggcctcatggcggtccgagcttcgttcgagaacaactgtgagatcggctgctttgccaagctcaccaacacctactgtctggtagcgatcggaggctcagagaacttctacagtgtgttcgagggcgagctctccgataccatccccgtggtgcacgcgtctatcgccggctgccgcatcatcgggcgcatgtgtgtggacagggagacagaagaaattctggcagatgtgctcaaggtggaagtcttcagacagacagtggccgaccaggtgctagtaggaagctactgtgtcttcagcaatcagggagggctggtgcatcccaagacttcaattgaagaccaggatgagctgtcctctcttcttcaagtcccccttgtggcggggactgtgaaccgaggcagtgaggtgattgctgctgggatggtggtgaatgactggtgtgccttctgtggcctggacacaaccagcacagagctgtcagtggtggagagtgtcttcaagctgaatgaagcccagcctagcaccattgccaccagcatgcgggattccctcattgacagcctcacctgagtcaccttccaagttgttccatgggctcctggctctggactgtggccaaccttctccacattccgcccaatctgtaccggatgctgaatctgtaccggatgctggcagggaggtggcagagagctcactgggactgaggggctgggcacccaacccttttccacctgtgcttatcgcctggatctatcattactgcaaaaacctgctctgttgtgctggctggcaggccctgtggctgctggctgagggttctgctgtcctgtggcaccccattaaagtgcagttcctccgg

SEQ ID NO: 378809 - DNA, 1516 bp, Homo sapiens
gaagggcttgttgccccagtggccagcagtgtggccagcaggcagttttcaactgtcagcccctttggggatgttccctgcttcagagagctctcctcagtcactggatgcccttcctcatccagtgattgaatgaggtaggggttataatgttccagatattttggacccaacgtaggctgagtgacaggccaccgtagccccagagctccctgcgggggtggctgaggctgccatgggcctctgttgccacttaacctctccctcttccctgtcctgcttccttctccccctcacaaatgttgattctgaaagtactctctaatcgaaatcctgcattccagaccccacctcagagttcactccccgagagcccaacctgcaacacgtcaagcagactgccaccctgtcagtccatggctgatggaggacagatgacaagatataccctgggctgctgccagtagcagcccctcaagccttggtagggtctggagtcagactcagccaccactgacctagcccctactccaagttgaccatcttcagagccgggtactcactggatcttcacacactctttgttagaggaatgactcccccaggtttcggatggagaaactgaggtcccaagaagggtggtcacagaccagaagccagcttcagcactttctcccagcattaaccccaggggaggtgagggatcacccatctttccccctccctcttgggaacagttgattcacccagcagcactaggaagagaccccatgccctggccactgggctagctcctgtccaggccccattgtaatcgaatcccaaatcaggagccttccccagctccatgatgtcggggaggaggaggaaaggtcaggggccagctgggtggtgccaatccattggccctaccttaaagacaaacatctcgccccggaagagggccactgtgttgaagttgccgtcacagatgttgggtttggtgcctggtgtggatggccggtccccgaggggcggccgagggggcctgggctggcgctcgtgtttcctctccgatggtgagtggatcctgcggacggggagtgtagggagtggccttgtgggctccagaggctcggctgggggtcctggagagaggagctgcatcttagagagggggcagccgtttcccgcctcccattgccagtctcagcatcacccaggcagctctgagacaagtctgtcccagttcagcctcctgttccctctccccagtttaactcccccagtctttgagaaaatggatgaaaatagccattagaatgggactctcatctttccatccccgaatctggtatcttctcttttctctctcctgttacagagcaatcatgtccttccttagggtcagcgctcttccttaggccataccctctttgcccccttcacacgcactggccccacttcctcacccccttcatttattctctttcccaccccagtgcagcttctacccgtcacccactccaactgctct

SEQ ID NO: 378810 - DNA, 487 bp, Homo sapiens
tcacttgagagtgaggtgggctctgtgaaacagctactgaccgtgcgctttcctttctcttcagcctcacctgagtcaccttccaagttgttccatgggctcctggctctggactgtggccaaccttctccacattcccgccaaatctgtaccggatgctggcagggaggtggcagagagctcactgggactgaggggctgggcacccaacccttttccacctgtgcttatcgcctggatctatcattactgcaaaaacctgctctgttgtgctggctggcaggccctgtggctgctggctgagggttctgctgtcctgtggcaccccattaaagtgcagttcctccggaaaaaaaaaaaaaaaaaaactgggttttgggggggaaaggggtaaagggggtagtttcggcgcctttgtgaagggacgggccatggggtatcgaggaggtgtggaggagggaaaaaaaaaggaaagagatagggacgg

SEQ ID NO: 378811 - DNA, 1095 bp, Homo sapiens
  misc_feature (9)..(10): n is a, c, g, or t
  misc_feature (13)..(13): n is a, c, g, or t
  misc_feature (20)..(21): n is a, c, g, or t
  misc_feature (24)..(25): n is a, c, g, or t
  misc_feature (27)..(27): n is a, c, g, or t
  misc_feature (29)..(29): n is a, c, g, or t
  misc_feature (31)..(32): n is a, c, g, or t
aaggcgagnngangctgggnnganncngngnngcaaggtacagtcgccgcgtgcggagcttgttactggttacttggcctcatggcggtccgagcttcgttcgagaacaactgtgagatcggctgctttgccaagctcaccaacacctactgtctggtagcgatcggaggctcagagaacttctacagtgtgttcgagggcgagctctccgataccatccccgtggtgcacgcgtctatcgccggctgccgcatcatcgggcgcatgtgtgtggggaacaggcacggtctcctggtacccaacaataccaccgaccaggagctgcaacacattcgcaacagcctcccagacacagtgcagattaggcgggtggaggagcggctctcagccttgggcaatgtcaccacctgcaatgactacgtggccttggtccacccagacttggacagggagacagaagaaattctggcagatgtgctcaaggtggaagtcttcagacagacagtggccgaccaggtgctagtaggaagctactgtgtcttcagcaatcagggagggctggtgcatcccaagacttcaattgaagaccaggatgagctgtcctctcttcttcaagtcccccttgtggcggggactgtgaaccgaggcagtgaggtgattgctgctgggatggtggtgaatgactggtgtgccttctgtggcctggacacaaccagcacagagctgtcagtggtggagagtgtcttcaagctgaatgaagcccagcctagcaccattgccaccagcatgcgggattccctcattgacagcctcacctgagtcaccttccaagttgttccatgggctcctggctctggactgtggccaaccttctccacattccgcccaatctgtaccggatgctggcagggaggtggcagagagctcactgggactgaggggctgggcacccaacccttttccacctgtgcttatcgcctggatctatcattactgcaaaaacctgctctgttgtgctggctggcaggccctgtggctgctggctgagggttctgctgtcctgtgccaccccattaaagtgcagttccctccggg

SEQ ID NO: 378812 - DNA, 1832 bp, Homo sapiens
  misc_feature (1581)..(1581): n is a, c, g, or t
gtcgatgacagctcctaaaaagctcctgaatgaataatgaatgaatgaacgcgagcaggctaggcgtggggccaggcggggtcgcgcccagaccgctcgcgaccatagagtccgccggaggccggaggtagaggggctggatgcgtggcggggagcgccgggctctcccggaagtctccctggacggaagtggaaacggaaacctttttagggagtccaaggtacagtcgccgcgtgcggagcttgttactggttacttggcctcatggcggtccgagcttcgttcgagaacaactgtgagatcggctgctttgccaagctcaccaacacctactgtctggtagcgatcggaggctcagagaacttctacagtgtgttcgagggcgagctctccgataccatccccgtggtgcacgcgtctatcgccggctgccgcatcatcgggcgcatgtgtgtggggaacaggcacggtctcctggtacccaacaataccaccgaccaggagctgcaacacattcgcaacagcctcccagacacagtgcagattaggcgggtggaggagcggctctcagccttgggcaatgtcaccacctgcaatgactacgtggccttggtccacccagacttggacagggagacagaagaaattctggcagatgtgctcaaggtggaagtcttcagacagacagtggccgaccaggtgctagtaggaagctactgtgtcttcagcaatcagggagggctggtgcatcccaagacttcaattgaagaccaggatgagctgtcctctcttcttcaagtcccccttgtggcggggactgtgaaccgaggcagtgaggtgattgctgctgggatggtggtgaatgactggtgtgccttctgtggcctggacacaaccagcacagagctgtcagtggtggagagtgtcttcaagctgaatgaagcccagcctagcaccattgccaccagcatgcgggattccctcattgacagcctcacctgagtcaccttccaagttgttccatgggctcctggctctggactgtggccaaccttctccacattccgcccaatctgtaccggatgctggcagggaggtggcagagagctcactgggactgaggggctgggcacccaacccttttccacctgtgcttatcgcctggatctatcattactgcaaaaacctgctctgttgtgctggctggcaggccctgtggctgctggctgagggttctgctgtcctgtgccaccccattaaagtgcagttccctccgggaaaaaaaaaaaaaaaaaaaaaaaaaaaaaaggggggggggtcaaaaaatttcccccgcgagaggggcccccaagctttaagcgccgttaccccggtcttttctggttcacaaggggggcccctaatgaggggagctccgtaataaatagagcctagggccacagggcgccagcagcgtttaaacacacggttgcgggacatcgtgggaaacaccggcctaagccgtgggagactcctgtgggagaagccagacccacttatacttttcgtgggggggggtgcgacccaataattgggcgacnagacttttactctaagaggagaggattttcgagagagctctcctaagaggggtaacatctttttaaaagatgcttttcacaggggtgtgtatatacaggtgtggttttcacacatctgagccggtgacatatatagagtccatggagcgggcttgtggaaaaaagttatggggcgatataacgggagagttaagtgacaatttgtagtgaacaaatttttttattaccagcgggggactgcggggagaaaa

SEQ ID NO: 378813 - DNA, 1271 bp, Homo sapiens
gtcgatgacagctcctaaaaagctcctgaatgaataatgaatgaatgaacgcgagcaggctaggcgtggggccaggcggggtcgcgcccagaccgctcgcgaccatagagtccgccggaggccggaggtagaggggctggatgcgtggcggggagcgccgggctctcccggaagtctccctggacggaagtggaaacggaaacctttttagggagtccaaggtacagtcgccgcgtgcggagcttgttactggttacttggcctcatggcggtccgagcttcgttcgagaacaactgtgagatcggctgctttgccaagctcaccaacacctactgtctggtagcgatcggaggctcagagaacttctacagtgtgttcgagggcgagctctccgataccatccccgtggtgcacgcgtctatcgccggctgccgcatcatcgggcgcatgtgtgtggggaacaggcacggtctcctggtacccaacaataccaccgaccaggagctgcaacacattcgcaacagcctcccagacacagtgcagattaggcgggtggaggagcggctctcagccttgggcaatgtcaccacctgcaatgactacgtggccttggtccacccagacttggacagggagacagaagaaattctggcagatgtgctcaaggtggaagtcttcagacagacagtggccgaccaggtgctagtaggaagctactgtgtcttcagcaatcagggagggctggtgcatcccaagacttcaattgaagaccaggatgagctgtcctctcttcttcaagtcccccttgtggcggggactgtgaaccgaggcagtgaggtgattgctgctgggatggtggtgaatgactggtgtgccttctgtggcctggacacaaccagcacagagctgtcagtggtggagagtgtcttcaagctgaatgaagcccagcctagcaccattgccaccagcatgcgggattccctcattgacagcctcacctgagtcaccttccaagttgttccatgggctcctggctctggactgtggccaaccttctccacattccgcccaatctgtaccggatgctggcagggaggtggcagagagctcactgggactgaggggctgggcacccaacccttttccacctgtgcttatcgcccggtacatgcaagttgcatgtaccgggccgggcctggcgtgcgggaggcggccacgacggcgcctttctcccaggaactccgggagggaccccaggactcagcgccag

SEQ ID NO: 378814 - DNA, 1433 bp, Homo sapiens
gtcgatgacagctcctaaaaagctcctgaatgaataatgaatgaatgaacgcgagcaggctaggcgtggggccaggcggggtcgcgcccagaccgctcgcgaccatagagtccgccggaggccggaggtagaggggctggatgcgtggcggggagcgccgggctctcccggaagtctccctggacggaagtggaaacggaaacctttttagggagtccaaggtacagtcgccgcgtgcggagcttgttactggttacttggcctcatggcggtccgagcttcgttcgagaacaactgtgagatcggctgctttgccaagctcaccaacacctactgtctggtagcgatcggaggctcagagaacttctacagtgtgttcgagggcgagctctccgataccatccccgtggtgcacgcgtctatcgccggctgccgcatcatcgggcgcatgtgtgtggggaacaggcacggtctcctggtacccaacaataccaccgaccaggagctgcaacacattcgcaacagcctcccagacacagtgcagattaggcgggtggaggagcggctctcagccttgggcaatgtcaccacctgcaatgactacgtggccttggtccacccagacttggacagggagacagaagaaattctggcagatgtgctcaaggtggaagtcttcagacagacagtggccgaccaggtgctagtaggaagctactgtgtcttcagcaatcagggagggctggtgcatcccaagacttcaattgaagaccaggatgagctgtcctctcttcttcaagtcccccttgtggcggggactgtgaaccgaggcagtgaggtgattgctgctgggatggtggtgaatgactggtgtgccttctgtggcctggacacaaccagcacagagctgtcagtggtggagagtgtcttcaagctgaatgaagcccagcctagcaccattgccaccagcatgcgggattccctcattgacagcctcacctgagtcaccttccaagttgttccatgggctcctggctctggactgtggccaaccttctccacattccgcccaatctgtaccggatgctgaatctgtaccggatgctggcagggaggtggcagagagctcactgggactgaggggctgggcacccaacccttttccacctgtgcttatcgcctggatctatcattactgcaaaaacctgctctgttgtgctggctggcaggccctgtggctgctggctgagggttctgctgtcctgtggcaccccattaaagtgcagttcctccggaaaaaaaaaaaaaaaaaaactgggttttgggggggaaaggggtaaagggggtagtttcggcgcctttgtgaagggacgggccatggggtatcgaggaggtgtggaggagggaaaaaaaaaggaaagagatagggacgg

SEQ ID NO: 378815 - DNA, 2987 bp, Homo sapiens
gtcgatgacagctcctaaaaagctcctgaatgaataatgaatgaatgaacgcgagcaggctaggcgtggggccaggcggggtcgcgcccagaccgctcgcgaccatagagtccgccggaggccggaggtagaggggctggatgcgtggcggggagcgccgggctctcccggaagtctccctggacggaagtggaaacggaaacctttttagggagtccaaggtacagtcgccgcgtgcggagcttgttactggttacttggcctcatggcggtccgagcttcgttcgagaacaactgtgagatcggctgctttgccaagctcaccaacacctactgtctggtagcgatcggaggctcagagaacttctacagtgtgttcgagggcgagctctccgataccatccccgtggtgcacgcgtctatcgccggctgccgcatcatcgggcgcatgtgtgtggggaacaggcacggtctcctggtacccaacaataccaccgaccaggagctgcaacacattcgcaacagcctcccagacacagtgcagattaggcgggtggaggagcggctctcagccttgggcaatgtcaccacctgcaatgactacgtggccttggtccacccagacttggacagggagacagaagaaattctggcagatgtgctcaaggtggaagtcttcagacagacagtggccgaccaggtgctagtaggaagctactgtgtcttcagcaatcagggagggctggtgcatcccaagacttcaattgaagaccaggatgagctgtcctctcttcttcaagtcccccttgtggcggggactgtgaaccgaggcagtgaggtgattgctgctgggatggtggtgaatgactggtgtgccttctgtggcctggacacaaccagcacagagctgtcagtggtggagagtgtcttcaagctgaatgaagcccagcctagcaccattgccaccagcatgcgggattccctcattgacagcctcacctgagtcaccttccaagttgttccatgggctcctggctctggactgtggccaaccttctccacattccgcccaatctgtaccggatgctggcctggatctatcattactgcaaaaacctgctctgttgtgctggctggcaggccctgtggctgctggctgagggttctgctgtcctgtgccaccccattaaagtgcagttccctccggataaaaaaaaaaaaaaaaaaaaaaaaaaaaaaaaaaaaaaaaaaaaaaaaaaaaaaaaaaaaaaaaaaaaaaaaaaaaaaaaaccccgggttttttttttttttttttaaatagttgacactcaattttattgctaaaaaaaatgtcctctggagtgacagcaggtatttgtcctcaacctctccccagagtccctgggagtgtttctgttattgtggagggaataggggatctggggacagggtgggacgtaccatggggacaggaggtcacagaacacacacacacacacacacacacacacacacacgtgcacacacacatccccccacaactacagccgccaaaataaccagcatggtgttgtaacatccccccagtgggggctagaattccccatggtgacctgtgacctgctccctgagacaggggaggccaggcaggtcacggtggggacgcagcagaacattatttctccatcttgctgttttctagccttgagttggggacatgagtgagaactgggggttttgaggagtaacccttgtgaacacatgtactccagcagccaggcatcccagatctcctgtcctggagggtgctggggcccctggctccccagagtgtgcaggcagacccccagagccctagctcatccatttatccattcctcataatccagtgtccaaagagcacccccagcagggcagggaaggtccctcccggggtttacatgactgattccttctcagaggcgaccgtggcatcccctgcgggcccccgatagtgtttgaggagggggtttccttcctcagtggggagtggcagcggatccaggggcagctcactcttcacttgtatcaactcaggctctgtgcttctcgactccgtacggtccacgtaattttggaggagtcctgcccccagagcgtcaccttctacattgaggacggtacaggaccggtcgactagccagtccacagccaggatcaaggagatatggtcgaccgggaggttgactgcttcgaggatgatggccagagtgaggacacctccagcagggatgcccgctgcccccacgctggacgctgtggccgtgaccaggatggtgatgatctttacgaagtccaaggactgctggctgagctgtgcaatgaacactgcggccacgcactggaagagcgcggcaccgtccatgttgacggtggcgccgatgggcaggatgaaacggctgatgtgcttggccacgccattattctcctccacgcacttcatcatcagcggcagcgtggcggaactggaagaggtcccaaaggcagtggccagcggcgtcacgatgccccacaggaagcggtaggggtttttgcgggtgaagaggaagtagatgaggggcagtaccaggagcccatggatggcgtgacccagcaggcagcacagaatgtacttgccaaggcgggcaaagagtaaacccacatcctccatctccacgatcttgccagccaccaggaacatgatgcccacaggggcgtaccacatgatccaggagaccagaaccatggtggcctcattgaaggagttgaagaagcggataagcagctccccttcaggccccagcttccgcagcgccacaccaaagacgatggcaaacactaccaagcccaggatgttcatcccctccacctcctgccccacgggcaccttcaccctggttccggtgatattcctctcttcataggtggtagagtatgagcgaaaggctgctgacaccaggttggaaggg

SEQ ID NO: 378816 - DNA, 1278 bp, Homo sapiens
gtcgatgacagctcctaaaaagctcctgaatgaataatgaatgaatgaacgcgagcaggctaggcgtggggccaggcggggtcgcgcccagaccgctcgcgaccatagagtccgccggaggccggaggtagaggggctggatgcgtggcggggagcgccgggctctcccggaagtctccctggacggaagtggaaacggaaacctttttagggagtccaaggtacagtcgccgcgtgcggagcttgttactggttacttggcctcatggcggtccgagcttcgttcgagaacaactgtgagatcggctgctttgccaagctcaccaacacctactgtctggtagcgatcggaggctcagagaacttctacagtgtgttcgagggcgagctctccgataccatccccgtggtgcacgcgtctatcgccggctgccgcatcatcgggcgcatgtgtgtggggaacaggcacggtctcctggtacccaacaataccaccgaccaggagctgcaacacattcgcaacagcctcccagacacagtgcagattaggcgggtggaggagcggctctcagccttgggcaatgtcaccacctgcaatgactacgtggccttggtccacccagacttggacagggagacagaagaaattctggcagatgtgctcaaggtggaagtcttcagacagacagtggccgaccaggtgctagtaggaagctactgtgtcttcagcaatcagggagggctggtgcatcccaagacttcaattgaagaccaggatgagctgtcctctcttcttcaagtcccccttgtggcggggactgtgaaccgaggcagtgaggtgattgctgctgggatggtggtgaatgactggtgtgccttctgtggcctggacacaaccagcacagagctgtcagtggtggagagtgtcttcaagctgaatgaagcccagcctagcaccattgccaccagcatgcgggattccctcattgacagcctcacctgagtcaccttccaagttgttccatgggctcctggctctggactgtgggcaaaccttctccaattccggccaaatctgtaccggatgctggcagggaggtggcagagagctcactgggactgaggggctgggcacccaacccttttccacctgtgcttatcgcctggatctatcattactgcaaaaacctgctctgttgtgctggctggcaggccctgtggctgctggctgagggttctgctgtcctgtggcaccccattaaagtgcagttcctccgg

SEQ ID NO: 378817 - DNA, 1048 bp, Homo sapiens
  misc_feature (7)..(7): n is a, c, g, or t
  misc_feature (15)..(15): n is a, c, g, or t
gcgtggngagtgtgnttactggttacttggcctcatggcggtccgagcttcgttcgagaacaactgtgagatcggctgctttgccaagctcaccaacacctactgtctggtagcgatcggaggctcagagaacttctacagtgtgttcgagggcgagctctccgataccatccccgtggtgcacgcgtctatcgccggctgccgcatcatcgggcgcatgtgtgtggggaacaggcacggtctcctggtacccaacaataccaccgaccaggagctgcaacacattcgcaacagcctcccagacacagtgcagattaggcgggtggaggagcggctctcagccttgggcaatgtcaccacctgcaatgactacgtggccttggtccacccagacttggacagggagacagaagaaattctggcagatgtgctcaaggtggaagtcttcagacagacagtggccgaccaggtgctagtaggaagctactgtgtcttcagcaatcagggagggctggtgcatcccaagacttcaattgaagaccaggatgagctgtcctctcttcttcaagtcccccttgtggcggggactgtgaaccgaggcagtgaggtgattgctgctgggatggtggtgaatgactggtgtgccttctgtggcctggacacaaccagcacagagctgtcagtggtggagagtgtcttcaagctgaatgaagcccagcctagcaccattgccaccagcatgcgggattccctcattgacagcctcacctgagtcaccttccaagttgttccatgggctcctggctctggactgtggccaaccttctccacattccgcccaatctgtaccggatgctggcagggaggtggcagagagctcactgggactgaggggctgggcacccaacccttttccacctgtgcttatcgcctggatctatcattactgcaaaaacctgctctgttgtgctggctggcaggccctgtggctgctggctgagggttctgctgtcctgtgccaccccattaaagtgcagttccctccggg

SEQ ID NO: 378818 - DNA, 1256 bp, Homo sapiens
  misc_feature (1058)..(1058): n is a, c, g, or t
  misc_feature (1060)..(1060): n is a, c, g, or t
  misc_feature (1065)..(1066): n is a, c, g, or t
  misc_feature (1072)..(1072): n is a, c, g, or t
  misc_feature (1074)..(1074): n is a, c, g, or t
  misc_feature (1078)..(1078): n is a, c, g, or t
gtcgatgacagctcctaaaaagctcctgaatgaataatgaatgaatgaacgcgagcaggctaggcgtggggccaggcggggtcgcgcccagaccgctcgcgaccatagagtccgccggaggccggaggtagaggggctggatgcgtggcggggagcgccgggctctcccggaagtctccctggacggaagtggaaacggaaacctttttagggagtccaaggtacagtcgccgcgtgcggagcttgttactggttacttggcctcatggcggtccgagcttcgttcgagaacaactgtgagatcggctgctttgccaagctcaccaacacctactgtctggtagcgatcggaggctcagagaacttctacagtgtgttcgagggcgagctctccgataccatccccgtggtgcacgcgtctatcgccggctgccgcatcatcgggcgcatgtgtgtggggaacaggcacggtctcctggtacccaacaataccaccgaccaggagctgcaacacattcgcaacagcctcccagacacagtgcagattaggcgggtggaggagcggctctcagccttgggcaatgtcaccacctgcaatgactacgtggccttggtccacccagacttggacagggagacagaagaaattctggcagatgtgctcaaggtggaagtcttcagacagacagtggccgaccaggtgctagtaggaagctactgtgtcttcagcaatcagggagggctggtgcatcccaagacttcaattgaagaccaggatgagctgtcctctcttcttcaagtcccccttgtggcggggactgtgaaccgaggcagtgaggtgattgctgctgggatggtggtgaatgactggtgtgccttctgtggcctggacacaaccagcacagagctgtcagtggtggagagtgtcttcaagctgaatgaagcccagcctagcaccattgccaccagcatgcgggattccctcattgaagcctcactgagtcacttccaagttgtccatggctctggtctggatgggccactttccattcgccaangncgggnngcgggngnaaanccatgggatgggggtggagccaccttcactggtattgcggcttatgcggaaacgctgtggtggtgagctgctcggtaagtgggcgcacctaaggtccgggaaaaaaaacaaagaaacacacaaacgctgggggagagctctcacagggctaagcaagaccacaggtccttttcttctc

SEQ ID NO: 378819 - DNA, 2306 bp, Homo sapiens
gtcgatgacagctcctaaaaagctcctgaatgaataatgaatgaatgaacgcgagcaggctaggcgtggggccaggcggggtcgcgcccagaccgctcgcgaccatagagtccgccggaggccggaggtagaggggctggatgcgtggcggggagcgccgggctctcccggaagtctccctggacggaagtggaaacggaaacctttttagggagtccaaggtacagtcgccgcgtgcggagcttgttactggttacttggcctcatggcggtccgagcttcgttcgagaacaactgtgagatcggctgctttgccaagctcaccaacacctactgtctggtagcgatcggaggctcagagaacttctacagtgtgttcgagggcgagctctccgataccatccccgtggtgcacgcgtctatcgccggctgccgcatcatcgggcgcatgtgtgtggggaacaggcacggtctcctggtacccaacaataccaccgaccaggagctgcaacacattcgcaacagcctcccagacacagtgcagattaggcgggtggaggagcggctctcagccttgggcaatgtcaccacctgcaatgactacgtggccttggtccacccagacttggacagggagacagaagaaattctggcagatgtgctcaaggtggaagtcttcagacagacagtggccgaccaggtgctagtaggaagctactgtgtcttcagcaatcagggagggctggtgcatcccaagacttcaattgaagaccaggatgagctgtcctctcttcttcaagtcccccttgtggcggggactgtgaaccgaggcagtgaggtgattgctgctgggatggtggtgaatgactggtgtgccttctgtggcctggacacaaccagcacagagctgtcagtggtggagagtgtcttcaagctgaatgaagcccagcctagcaccattgccaccagcatgcgggattccctcattgacagattgggtaactcaaggcgtccctggagtacactgaggataagtgtttgagaaatgctgtctgaaggaatgaagtcagtctatgacaacgtctctctgccgtgaatcattcctgcagatgaaaaagtgtgacttggcagctgaccccacctcagagttcactccccgagagcccaacctgcaacacgtcaagcagactgccaccctgtcagtccatggctgatggaggacagatgacaagatataccctgggctgctgccagtagcagcccctcaagccttggtagggtctggagtcagactcagccaccactgacctagcccctactccaagttgaccatcttcagagccgggtactcactggatcttcacacactctttgttagaggaatgactcccccaggtttcggatggagaaactgaggtcccaagaagggtggtcacagaccagaagccagcttcagcactttctcccagcattaaccccaggggaggtgagggatcacccatctttccccctccctcttgggaacagttgattcacccagcagcactaggaagagaccccatgccctggccactgggctagctcctgtccaggccccattgtaatcgaatcccaaatcaggagccttccccagctccatgatgtcggggaggaggaggaaaggtcaggggccagctgggtggtgccaatccattggccctaccttaaagacaaacatctcgccccggaagagggccactgtgttgaagttgccgtcacagatgttgggtttggtgcctggtgtggatggccggtccccgaggggcggccgagggggcctgggctggcgctcgtgtttcctctccgatggtgagtggatcctgcggacggggagtgtagggagtggccttgtgggctccagaggctcggctgggggtcctggagagaggagctgcatcttagagagggggcagccgtttcccgcctcccattgccagtctcagcatcacccaggcagctctgagacaagtctgtcccagttcagcctcctgttccctctccccagtttaactcccccagtctttgagaaaatggatgaaaatagccattagaatgggactctcatctttccatccccgaatctggtatcttctcttttctctctcctgttacagagcaatcatgtccttccttagggtcagcgctcttccttaggccataccctctttgcccccttcacacgcactggccccacttcctcacccccttcatttattctctttcccaccccagtgcagcttctacccgtcacccactccaactgctct

SEQ ID NO: 378820 - DNA, 1184 bp, Homo sapiens
gtcgatgacagctcctaaaaagctcctgaatgaataatgaatgaatgaacgcgagcaggctaggcgtggggccaggcggggtcgcgcccagaccgctcgcgaccatagagtccgccggaggccggaggtagaggggctggatgcgtggcggggagcgccgggctctcccggaagtctccctggacggaagtggaaacggaaacctttttagggagtccaaggtacagtcgccgcgtgcggagcttgttactggttacttggcctcatggcggtccgagcttcgttcgagaacaactgtgagatcggctgctttgccaagctcaccaacacctactgtctggtagcgatcggaggctcagagaacttctacagtgtgttcgagggcgagctctccgataccatccccgtggtgcacgcgtctatcgccggctgccgcatcatcgggcgcatgtgtgtggggaacaggcacggtctcctggtacccaacaataccaccgaccaggagctgcaacacattcgcaacagcctcccagacacagtgcagattaggcgggtggaggagcggctctcagccttgggcaatgtcaccacctgcaatgactacgtggccttggtccacccagacttggacagggagacagaagaaattctggcagatgtgctcaaggtggaagtcttcagacagacagtggccgaccaggtgctagtaggaagctactgtgtcttcagcaatcagggagggctggtgcatcccaagacttcaattgaagaccaggatgagctgtcctctcttcttcaagtcccccttgtggcggggactgtgaaccgaggcagtgaggtgattgctgctgggatggtggtgaatgactggtgtgccttctgtggcctggacacaaccagcacagagctgtcagtggtggagagtgtcttcaagctgaatgaagcccagcctagcaccattgccaccagcatgcgggattccctcattgacagattgggtaactcaaggcgtccctggagtacactgaggataagtgtttgagaaatgctgtctgaaggaatgaagtcagtctatgacaacgtctctctgccgtgaatcattcctgcagatgaaaaagtgtgacttggcagctgatggagtctcgctctgtcacccaggctggagtgcagtggcgcaatctcgg

SEQ ID NO: 378821 - DNA, 1136 bp, Homo sapiens
gtcgatgacagctcctaaaaagctcctgaatgaataatgaatgaatgaacgcgagcaggctaggcgtggggccaggcggggtcgcgcccagaccgctcgcgaccatagagtccgccggaggccggaggtagaggggctggatgcgtggcggggagcgccgggctctcccggaagtctccctggacggaagtggaaacggaaacctttttagggagtccaaggtacagtcgccgcgtgcggagcttgttactggttacttggcctcatggcggtccgagcttcgttcgagaacaactgtgagatcggctgctttgccaagctcaccaacacctactgtctggtagcgatcggaggctcagagaacttctacagtgtgttcgagggcgagctctccgataccatccccgtggtgcacgcgtctatcgccggctgccgcatcatcgggcgcatgtgtgtggggaacaggcacggtctcctggtacccaacaataccaccgaccaggagctgcaacacattcgcaacagcctcccagacacagtgcagattaggcgggtggaggagcggctctcagccttgggcaatgtcaccacctgcaatgactacgtggccttggtccacccagacttggacagggagacagaagaaattctggcagatgtgctcaaggtggaagtcttcagacagacagtggccgaccaggtgctagtaggaagctactgtgtcttcagcaatcagggagggctggtgcatcccaagacttcaattgaagaccaggatgagctgtcctctcttcttcaagtcccccttgtggcggggactgtgaaccgaggcagtgaggtgattgctgctgggatggtggtgaatgactggtgtgccttctgtggcctggacacaaccagcacagagctgtcagtggtggagagtgtcttcaagctgaatgaagccgcagggaggtggcagagagctcactgggactgaggggctgggcacccaacccttttccacctgtgcttatcgcctggatctatcattactgcaaaaacctgctctgttgtgctggctggcaggccctgtggctgctggctgagggttctgctgtcctgtgccaccccattaaagtgcagttccctccggg

SEQ ID NO: 378822 - DNA, 1689 bp, Homo sapiens
  misc_feature (1438)..(1438): n is a, c, g, or t
gtcgatgacagctcctaaaaagctcctgaatgaataatgaatgaatgaacgcgagcaggctaggcgtggggccaggcggggtcgcgcccagaccgctcgcgaccatagagtccgccggaggccggaggtagaggggctggatgcgtggcggggagcgccgggctctcccggaagtctccctggacggaagtggaaacggaaacctttttagggagtccaaggtacagtcgccgcgtgcggagcttgttactggttacttggcctcatggcggtccgagcttcgttcgagaacaactgtgagatcggctgctttgccaagctcaccaacacctactgtctggtagcgatcggaggctcagagaacttctacagtgtgttcgagggcgagctctccgataccatccccgtggtgcacgcgtctatcgccggctgccgcatcatcgggcgcatgtgtgtggggaacaggcacggtctcctggtacccaacaataccaccgaccaggagctgcaacacattcgcaacagcctcccagacacagtgcagattaggcgggtggaggagcggctctcagccttgggcaatgtcaccacctgcaatgactacgtggccttggtccacccagacttggacagggagacagaagaaattctggcagatgtgctcaaggtggaagtcttcagacagacagtggccgaccaggtgctagtaggaagctactgtgtcttcagcaatcagggagggctggtgcatcccaagacttcaattgaagaccaggatgagctgtcctctcttcttcaagtcccccttgtggcggggactgtgaaccgaggcagtgaggtgattgctgctgggatggtggtgaatgactggtgtgccttctgtggcctggacacaaccagcacagagctgtcagtggtggagagtgtcttcaagctgaatgaagccgcagggaggtggcagagagctcactgggactgaggggctgggcacccaacccttttccacctgtgcttatcgcctggatctatcattactgcaaaaacctgctctgttgtgctggctggcaggccctgtggctgctggctgagggttctgctgtcctgtgccaccccattaaagtgcagttccctccgggaaaaaaaaaaaaaaaaaaaaaaaaaaaaaaggggggggggtcaaaaaatttcccccgcgagaggggcccccaagctttaagcgccgttaccccggtcttttctggttcacaaggggggcccctaatgaggggagctccgtaataaatagagcctagggccacagggcgccagcagcgtttaaacacacggttgcgggacatcgtgggaaacaccggcctaagccgtgggagactcctgtgggagaagccagacccacttatacttttcgtgggggggggtgcgacccaataattgggcgacnagacttttactctaagaggagaggattttcgagagagctctcctaagaggggtaacatctttttaaaagatgcttttcacaggggtgtgtatatacaggtgtggttttcacacatctgagccggtgacatatatagagtccatggagcgggcttgtggaaaaaagttatggggcgatataacgggagagttaagtgacaatttgtagtgaacaaatttttttattaccagcgggggactgcggggagaaaa

SEQ ID NO: 378823 - DNA, 1106 bp, Homo sapiens
gtcgatgacagctcctaaaaagctcctgaatgaataatgaatgaatgaacgcgagcaggctaggcgtggggccaggcggggtcgcgcccagaccgctcgcgaccatagagtccgccggaggccggaggtagaggggctggatgcgtggcggggagcgccgggctctcccggaagtctccctggacggaagtggaaacggaaacctttttagggagtccaaggtacagtcgccgcgtgcggagcttgttactggttacttggcctcatggcggtccgagcttcgttcgagaacaactgtgagatcggctgctttgccaagctcaccaacacctactgtctggtagcgatcggaggctcagagaacttctacagtgtgttcgagggcgagctctccgataccatccccgtggtgcacgcgtctatcgccggctgccgcatcatcgggcgcatgtgtgtggggaacaggcacggtctcctggtacccaacaataccaccgaccaggagctgcaacacattcgcaacagcctcccagacacagtgcagattaggcgggtggaggagcggctctcagccttgggcaatgtcaccacctgcaatgactacgtggccttggtccacccagacttggacagggagacagaagaaattctggcagatgtgctcaaggtggaagtcttcagacagacagtggccgaccaggtgctagtaggaagctactgtgtcttcagcaatcagggagggctggtgcatcccaagacttcaattgaagaccaggatgagctgtcctctcttcttcaagtcccccttgtggcggggactgtgaaccgaggcagtgaggtgattgctgctgggatggtggtgaatgactggtgtgccttctgtggcctggacacaaccagcacagagctgtcagtggtggagagtgtcttcaagctgaatgaagcctgaggggctgggcacccaacccttttccacctgtgcttatcgcctggatctatcattactgcaaaaacctgctctgttgtgctggctggcaggccctgtggctgctggctgagggttctgctgtcctgtgccaccccattaaagtgcagttccctccggg

SEQ ID NO: 378824 - DNA, 1214 bp, Homo sapiens
  misc_feature (9)..(10): n is a, c, g, or t
  misc_feature (13)..(13): n is a, c, g, or t
  misc_feature (20)..(21): n is a, c, g, or t
  misc_feature (24)..(25): n is a, c, g, or t
  misc_feature (27)..(27): n is a, c, g, or t
  misc_feature (29)..(29): n is a, c, g, or t
  misc_feature (31)..(32): n is a, c, g, or t
aaggcgagnngangctgggnnganncngngnngcaaggtacagtcgccgcgtgcggagcttgttactggttacttggcctcatggcggtccgagcttcgttcgagaacaactgtgagatcggctgctttgccaagctcaccaacacctactgtctggtagcgatcggaggctcagagaacttctacaggtgcggcgggagccccggggcttacggtggcggggaggcgtgcgcaggagtcaagagctccggcagtgggagggtgccggcccctctgccccgccaccaccgagtccatgtccctacagtgtgttcgagggcgagctctccgataccatccccgtggtgcacgcgtctatcgccggctgccgcatcatcgggcgcatgtgtgtggggaacaggcacggtctcctggtacccaacaataccaccgaccaggagctgcaacacattcgcaacagcctcccagacacagtgcagattaggcgggtggaggagcggctctcagccttgggcaatgtcaccacctgcaatgactacgtggccttggtccacccagacttggacagggagacagaagaaattctggcagatgtgctcaaggtggaagtcttcagacagacagtggccgaccaggtgctagtaggaagctactgtgtcttcagcaatcagggagggctggtgcatcccaagacttcaattgaagaccaggatgagctgtcctctcttcttcaagtcccccttgtggcggggactgtgaaccgaggcagtgaggtgattgctgctgggatggtggtgaatgactggtgtgccttctgtggcctggacacaaccagcacagagctgtcagtggtggagagtgtcttcaagctgaatgaagcccagcctagcaccattgccaccagcatgcgggattccctcattgacagcctcacctgagtcaccttccaagttgttccatgggctcctggctctggactgtggccaaccttctccacattccgcccaatctgtaccggatgctggcagggaggtggcagagagctcactgggactgaggggctgggcacccaacccttttccacctgtgcttatcgcctggatctatcattactgcaaaaacctgctctgttgtgctggctggcaggccctgtggctgctggctgagggttctgctgtcctgtgccaccccattaaagtgcagttccctccggg

SEQ ID NO: 378825 - DNA, 1043 bp, Homo sapiens
  misc_feature (9)..(10): n is a, c, g, or t
  misc_feature (13)..(13): n is a, c, g, or t
  misc_feature (20)..(21): n is a, c, g, or t
  misc_feature (24)..(25): n is a, c, g, or t
  misc_feature (27)..(27): n is a, c, g, or t
  misc_feature (29)..(29): n is a, c, g, or t
  misc_feature (31)..(32): n is a, c, g, or t
aaggcgagnngangctgggnnganncngngnngcaaggtacagtcgccgcgtgcggagcttgttactggttacttggcctcatggcggtccgagcttcgttcgagaacaactgtgagatcggctgctttgccaagctcaccaacacctactgtctggtagcgatcggaggctcagagaacttctacaggtgcggcgggagccccggggcttacggtggcggggaggcgtgcgcaggagtcaagagctccggcagtgggagggtgccggcccctctgccccgccaccaccgagtccatgtccctacagtgtgttcgagggcgagctctccgataccatccccgtggtgcacgcgtctatcgccggctgccgcatcatcgggcgcatgtgtgtggacagggagacagaagaaattctggcagatgtgctcaaggtggaagtcttcagacagacagtggccgaccaggtgctagtaggaagctactgtgtcttcagcaatcagggagggctggtgcatcccaagacttcaattgaagaccaggatgagctgtcctctcttcttcaagtcccccttgtggcggggactgtgaaccgaggcagtgaggtgattgctgctgggatggtggtgaatgactggtgtgccttctgtggcctggacacaaccagcacagagctgtcagtggtggagagtgtcttcaagctgaatgaagcccagcctagcaccattgccaccagcatgcgggattccctcattgacagcctcacctgagtcaccttccaagttgttccatgggctcctggctctggactgtggccaaccttctccacattccgcccaatctgtaccggatgctggcagggaggtggcagagagctcactgggactgaggggctgggcacccaacccttttccacctgtgcttatcgcctggatctatcattactgcaaaaacctgctctgttgtgctggctggcaggccctgtggctgctggctgagggttctgctgtcctgtgccaccccattaaagtgcagttccctccggg

SEQ ID NO: 378826 - DNA, 839 bp, Homo sapiens
  misc_feature (9)..(10): n is a, c, g, or t
  misc_feature (13)..(13): n is a, c, g, or t
  misc_feature (20)..(21): n is a, c, g, or t
  misc_feature (24)..(25): n is a, c, g, or t
  misc_feature (27)..(27): n is a, c, g, or t
  misc_feature (29)..(29): n is a, c, g, or t
  misc_feature (31)..(32): n is a, c, g, or t
aaggcgagnngangctgggnnganncngngnngcaaggtacagtcgccgcgtgcggagcttgttactggttacttggcctcatggcggtccgagcttcgttcgagaacaactgtgagatcggctgctttgccaagctcaccaacacctactgtctggtagcgatcggaggctcagagaacttctacaggacagggagacagaagaaattctggcagatgtgctcaaggtggaagtcttcagacagacagtggccgaccaggtgctagtaggaagctactgtgtcttcagcaatcagggagggctggtgcatcccaagacttcaattgaagaccaggatgagctgtcctctcttcttcaagtcccccttgtggcggggactgtgaaccgaggcagtgaggtgattgctgctgggatggtggtgaatgactggtgtgccttctgtggcctggacacaaccagcacagagctgtcagtggtggagagtgtcttcaagctgaatgaagcccagcctagcaccattgccaccagcatgcgggattccctcattgacagcctcacctgagtcaccttccaagttgttccatgggctcctggctctggactgtggccaaccttctccacattccgcccaatctgtaccggatgctggcagggaggtggcagagagctcactgggactgaggggctgggcacccaacccttttccacctgtgcttatcgcctggatctatcattactgcaaaaacctgctctgttgtgctggctggcaggccctgtggctgctggctgagggttctgctgtcctgtgccaccccattaaagtgcagttccctccggg

SEQ ID NO: 378827 - DNA, 954 bp, Homo sapiens
gacggccagtactcctacggtttaaggtacgaggctgggtggcggaaacctttttagggagtccaaggtacagtcgccgcgtgcggagcttgttactggttacttggcctcatggcggtccgagcttcgttcgagaacaactgtgagatcggctgctttgccaagctcaccaacacctactgtctggtagcgatcggaggctcagagaacttctacagtgtgttcgagggcgagctctccgataccatccccgtggtgcacgcgtctatcgccggctgccgcatcatcgggcgcatgtgtgtggacagggagacagaagaaattctggcagatgtgctcaaggtggaagtcttcagacagacagtggccgaccaggtgctagtaggaagctactgtgtcttcagcaatcagggagggctggtgcatcccaagacttcaattgaagaccaggatgagctgtcctctcttcttcaagtcccccttgtggcggggactgtgaaccgaggcagtgaggtgattgctgctgggatggtggtgaatgactggtgtgccttctgtggcctggacacaaccagcacagagctgtcagtggtggagagtgtcttcaagctgaatgaagcccagcctagcaccattgccaccagcatgcgggattccctcattgacagcctcacctgagtcaccttccaagttgttccatgggctcctggctctggactgtggccaaccttctccacattccgcccaatctgtaccggatgctggcagggaggtggcagagagctcactgggactgaggggctgggcacccaacccttttccacctgtgcttatcgcctggatctatcattactgcaaaaacctgctctgttgtgctggctggcaggccctgtggctgctggctgagggttctgctgtcctgtgccaccccattaaagtgcagttccctccggg

SEQ ID NO: 378828 - DNA, 1645 bp, Homo sapiens
tgagccaacacgcccggcagctcagtttttaagtagcaaaatatacagctaatgccaagagctcagcttccctcccagttggtgatggtgaagtaggcaggatttattgggattcctgggtggtctctggcctgccctgggtgttttccagatcagtgggttggagggctgggctctgggcctagagctttcctgggaaagctgattgggctgggctgagtggtatcctcagcccctagggctcagcaggcatcttgtgtattcaccctctaatttgggtttctccagggaacaggcacggtctcctggtacccaacaataccaccgaccaggagctgcaacacattcgcaacagcctcccagacacagtgcagattaggcgggtggaggagcggctctcagccttgggcaatgtcaccacctgcaatgactacgtggccttggtccacccagacttggacagggtgaggcagcccaacttgacccaagagtcacagggccatcctagtcagtggttagccactgttctttcccaacaggcagcaattaggggtctctcctgtggtttttctatatgggctcttgagtttcaggtactcattggaatagtgataacagaggccttatcaagtgtcagaaagaagctggggagggtatgaatccttcatgattggggagattgaaccatccagtcctgcatcctgggccaggataggtgattgactgttgaacttttgactgtgggtgagaggggaaagaagtgatattgagaccagcctccagctgttcagggcatgcatgaatattaggggcttcacagctgcccttgactctgctctaagctgtacttcctcctttctctgggtgaggctttcatatgaggtacagaggagaaatgaggggctcagggagccaaggcctggatgcttctgggcatggagaaccttggttctggggctgtaagttctgagccctgaacacaatatctttgattgacagggagacagaagaaattctggcagatgtgctcaaggtggaagtcttcagacagacagtggccgaccaggtgctagtaggaagctactgtgtcttcagcaatcagggagggctggtgcatcccaagacttcaattgaagaccaggatgagctgtcctctcttcttcaagtcccccttgtggcggggactgtgaaccgaggcagtgaggtgattgctgctgggatggtggtgaatgactggtgtgccttctgtggcctggacacaaccagcacagagctgtcagtggtggagagtgtcttcaagctgaatgaagcccagcctagcaccattgccaccagcatgcgggattccctcattgacagcctcacctgagtcaccttccaagttgttccatgggctcctggctctggactgtggccaaccttctccacattccgcccaatctgtaccggatgctggcagggaggtggcagagagctcactgggactgaggggctgggcacccaacccttttccacctgtgcttatcgcctggatctatcattactgcaaaaacctgctctgttgtgctggctggcaggccctgtggctgctggctgagggttctgctgtcctgtgccaccccattaaagtgcagttccctccggg

SEQ ID NO: 378829 - DNA, 976 bp, Homo sapiens
gtcgatgacagctcctaaaaagctcctgaatgaataatgaatgaatgaacgcgagcaggctaggcgtggggccaggcggggtcgcgcccagaccgctcgcgaccatagagtccgccggaggccggaggtagaggggctggatgcgtggcggggagcgccgggctctcccggaagtctccctggacggaagtggaaacggaaacctttttagggagtccaaggtacagtcgccgcgtgcggagcttgttactggttacttggcctcatggcggtccgagcttcgttcgagaacaactgtgagatcggctgctttgccaagctcaccaacacctactgtctggtagcgatcggaggctcagagaacttctacagtgtgttcgagggcgagctctccgataccatccccgtggtgcacgcgtctatcgccggctgccgcatcatcgggcgcatgtgtgtggggaacaggcacggtctcctggtacccaacaataccaccgaccaggagctgcaacacattcgcaacagcctcccagacacagtgcagattaggcgggtggaggagcggctctcagccttgggcaatgtcaccacctgcaatgactacgtggccttggtccacccagacttggacagggagacagaagaaattctggcagatgtgctcaaggtggaagtcttcagacagaccagcctcacctgagtcaccttccaagttgttccatgggctcctggctctggactgtggccaaccttctccacattccgcccaatctgtaccggatgctggcagggaggtggcagagagctcactgggactgaggggctgggcacccaacccttttccacctgtgcttatcgcctggatctatcattactgcaaaaacctgctctgttgtgctggctggcaggccctgtggctgctggctgagggttctgctgtcctgtgccaccccattaaagtgcagttccctccggg

SEQ ID NO: 378830 - DNA, 512 bp, Homo sapiens
caatggtttggcacaggacagcagaaccctcagccagcagccacagggcaggtttttgcagtaatgatagatccaggcgataagcacaggtggtgaatgactggtgtgccttctgtggcctggacacaaccagcacagagctgtcagtggtggagagtgtcttcaagctgaatgaagcccagcctagcaccattgccaccagcatgcgggattccctcattgacagcctcacctgagtcaccttccaagttgttccatgggctcctggctctggactgtggccaaccttctccacattccgcccaatctgtaccggatgctggcagggaggtggcagagagctcactgggactgaggggctgggcacccaacccttttccacctgtgcttatcgcctggatctatcattactgcaaaaacctgctctgttgtgctggctggcaggccctgtggctgctggctgagggttctgctgtcctgtgccaccccattaaagtgcagttccctccggg

SEQ ID NO: 378831 - DNA, 1108 bp, Homo sapiens
gacggccagtactcctacggtttaaggtacgaggctgggtggcggaaacctttttagggagtccaaggtacagtcgccgcgtgcggagcttgttactggttacttggcctcatggcggtccgagcttcgttcgagaacaactgtgagatcggctgctttgccaagctcaccaacacctactgtctggtagcgatcggaggctcagagaacttctacagtgtgttcgagggcgagctctccgataccatccccgtggtgcacgcgtctatcgccggctgccgcatcatcgggcgcatgtgtgtggacagggagacagaagaaattctggcagatgtgctcaaggtggaagtcttcagacagacagtggccgaccaggtgctagtaggaagctactgtgtcttcagcaatcagggagggctggtgcatcccaagacttcaattgaagaccaggatgagctgtcctctcttcttcaagtcccccttgtggcggggactgtgaaccgaggcagtgaggtgattgctgctgggatggtggtgaatgactggtgtgccttctgtggcctggacacaaccagcacagagctgtcagtggtggagagtgtcttcaagctgaatgaagcccagcctagcaccattgccaccagcatgcgggattccctcattgacagcctcacctgagtcaccttccaagttgttccatgggctcctggctctggactgtggccaaccttctccacattccgcccaatctgtaccggatgctgaatctgtaccggatgctggcagggaggtggcagagagctcactgggactgaggggctgggcacccaacccttttccacctgtgcttatcgcctggatctatcattactgcaaaaacctgctctgttgtgctggctggcaggccctgtggctgctggctgagggttctgctgtcctgtggcaccccattaaagtgcagttcctccggaaaaaaaaaaaaaaaaaaactgggttttgggggggaaaggggtaaagggggtagtttcggcgcctttgtgaagggacgggccatggggtatcgaggaggtgtggaggagggaaaaaaaaaggaaagagatagggacgg

SEQ ID NO: 378832 - DNA, 513 bp, Homo sapiens
  misc_feature (493)..(494): n is a, c, g, or t
gacggccagtactcctacggtttaaggtacgaggctgggtggcggaaacctttttagggagtccaaggtacagtcgccgcgtgcggagcttgttactggttacttggcctcatggcggtccgagcttcgttcgagaacaactgtgagatcggctgctttgccaagctcaccaacacctactgtctggtagcgatcggaggctcagagaacttctacagtgtgttcgagggcgagctctccgataccatccccgtggtgcacgcgtctatcgccggctgccgcatcatcgggcgcatgtgtgtggggaacaggcacggtctcctggtacccaacaataccaccgaccaggagctgcaacacattcgcaacagcctcccagacacagtgcagattaggcgggtggaggagcggctctcagccttgggcaatgtcaccacctgcaatgactacgtggccttggtccacccagacttggacacgaatgttcaggtannagctcgagtctatcatgta

SEQ ID NO: 378833 - DNA, 1009 bp, Homo sapiens
  misc_feature (811)..(811): n is a, c, g, or t
  misc_feature (813)..(813): n is a, c, g, or t
  misc_feature (818)..(819): n is a, c, g, or t
  misc_feature (825)..(825): n is a, c, g, or t
  misc_feature (827)..(827): n is a, c, g, or t
  misc_feature (831)..(831): n is a, c, g, or t
gacggccagtactcctacggtttaaggtacgaggctgggtggcggaaacctttttagggagtccaaggtacagtcgccgcgtgcggagcttgttactggttacttggcctcatggcggtccgagcttcgttcgagaacaactgtgagatcggctgctttgccaagctcaccaacacctactgtctggtagcgatcggaggctcagagaacttctacagtgtgttcgagggcgagctctccgataccatccccgtggtgcacgcgtctatcgccggctgccgcatcatcgggcgcatgtgtgtggggaacaggcacggtctcctggtacccaacaataccaccgaccaggagctgcaacacattcgcaacagcctcccagacgacagggagacagaagaaattctggcagatgtgctcaaggtggaagtcttcagacagacagtggccgaccaggtgctagtaggaagctactgtgtcttcagcaatcagggagggctggtgcatcccaagacttcaattgaagaccaggatgagctgtcctctcttcttcaagtcccccttgtggcggggactgtgaaccgaggcagtgaggtgattgctgctgggatggtggtgaatgactggtgtgccttctgtggcctggacacaaccagcacagagctgtcagtggtggagagtgtcttcaagctgaatgaagcccagcctagcaccattgccaccagcatgcgggattccctcattgaagcctcactgagtcacttccaagttgtccatggctctggtctggatgggccactttccattcgccaangncgggnngcgggngnaaanccatgggatgggggtggagccaccttcactggtattgcggcttatgcggaaacgctgtggtggtgagctgctcggtaagtgggcgcacctaaggtccgggaaaaaaaacaaagaaacacacaaacgctgggggagagctctcacagggctaagcaagaccacaggtccttttcttctc

SEQ ID NO: 378834 - DNA, 898 bp, Homo sapiens
gtgactcggtctacattatccgctcgagctgcccaacggcatacacgtgtccagatggcttgtatcgaacatggtcctatacatcaatcgtatgataagccaagcgcaacgtgtccgacgatacttaccacagtgttggactgggacaactgctacgttgagccatctccgtgatggacaccttatatctgcggtgggagttcttggaccgcctatctatagagatcaagcgctctcatccgcgtggttcctcaacatttaccacgcgtctaaggtgtgccaactaattcgcatatagctctgcctcgcgtacgacgagtctagcttaacgtgaggtaggtgatgatgacttgatcacattctattcgaccggagctactagatagcaatgactacgtggccttggtccacccagacttggacagggagacagaagaaattctggcagatgtgctcaaggtggaagtcttcagacagacagtggccgaccaggtgctagtaggaagctactgtgtcttcagcaatcagggagggctggtgcatcccaagacttcaattgaagaccaggatgagctgtcctctcttcttcaagtcccccttgtggcggggactgtgaaccgaggcagtgaggtgattgctgctgggatggtggtgaatgactggtgtgccttctgtggcctggacacaaccagcacagagctgtcagtggtggagagtgtcttcaagctgaatgaagcctgaggggctgggcacccaacccttttccacctgtgcttatcgcctggatctatcattactgcaaaaacctgctctgttgtgctggctggcaggccctgtggctgctggctgagggttctgctgtcctgtgccaccccattaaagtgcagttccctccggg

SEQ ID NO: 378835 - DNA, 1125 bp, Homo sapiens
gacggccagtactcctacggtttaaggtacgaggctgggtggcggaaacctttttagggagtccaaggtacagtcgccgcgtgcggagcttgttactggttacttggcctcatggcggtccgagcttcgttcgagaacaactgtgagatcggctgctttgccaagctcaccaacacctactgtctggtagcgatcggaggctcagagaacttctacagtgtgttcgagggcgagctctccgataccatccccgtggtgcacgcgtctatcgccggctgccgcatcatcgggcgcatgtgtgtggggaacaggcacggtctcctggtacccaacaataccaccgaccaggagctgcaacacattcgcaacagcctcccagacacagtgcagattaggcgggtggaggagcggctctcagccttgggcaatgtcaccacctgcaatgactacgtggccttggtccacccagacttggacagggagacagaagaaattctggcagatgtgctcaaggtggaagtcttcagacagacagtggccgaccaggtgctagtaggaagctactgtgtcttcagcaatcagggagggctggtgcatcccaagacttcaattgaagaccaggatgagctgtcctctcttcttcaagtcccccttgtggcggggactgtgaaccgaggcagtgaggtgattgctgctgggatggtggtgaatgactggtgtgccttctgtggcctggacacaaccagcacagagctgtcagtggtggagagtgtcttcaagctgaatgaagcccagcctagcaccattgccaccagcatgcgggattccctcattgacagcctcacctgagtcaccttccaagttgttccatgggctcctggctctggactgtggccaaccttctccacattccgcccaatctgtaccggatgctggcagggaggtggcagagagctcactgggactgaggggctgggcacccaacccttttccacctgtgcttatcgcctggatctatcattactgcaaaaacctgctctgttgtgctggctggcaggccctgtggctgctggctgagggttctgctgtcctgtgccaccccattaaagtgcagttccctccggg

SEQ ID NO: 378836 - DNA, 3564 bp, Homo sapiens
cagacccaagccgggttttattgaaatgccaggagcaggcacatgtcaaagtagccaaggaaggggggacagtggtacaggctgtgtaagttggcagggatgggcaagcctcatgtccatggtcctggcatcccctctgccaggggataagtaggcacaactaccctcccctcaaaatggcatgctcaggccagtggggcccctacccctggaccatgaaggctccaagaagggctggaagcactaagttttctctctcctgagggggaaggaaagaaggggagatgcaggaggaaggggaggtatagcgggggatgagcgttccaagaagtctctccttctaggtgtctgcacccaactcatggtgctgggcagtggagaggagcagcattacaaagggaggctgaaggctcatccctcagggaaccggagccccccagcctgtggggcttgtgtcagccctgaacagagggcagaagttcaaggggactgaagatgcaggtagttcccaagtgacctaggagtccccagagctggggggtgtggccttcatgggacaaggaggaagacaggaggatccaaccccagcatggaggggggagtgggcagtctccccaatttggcccctctaggtcagttccacgttgttggcacggtcaagcactcgggagccacgggcactacccccaagctggaaacggctctcatagagagtggggcagagcctcgtgccgaattcggcacgagggttactggttacttggcctcatggcggtccgagcttcgttcgagaacaactgtgagatcggctgctttgccaagctcaccaacacctactgtctggtagcgatcggaggctcagagaacttctacagtgtgttcgagggcgagctctccgataccatccccgtggtgcacgcgtctatcgccggctgccgcatcatcgggcgcatgtgtgtggggaacaggcacggtctcctggtacccaacaataccaccgaccaggagctgcaacacattcgcaacagcctcccagacacagtgcagattaggcgggtggaggagcggctctcagccttgggcaatgtcaccacctgcaatgactacgtggccttggtccacccagacttggacagggagacagaagaaattctggcagatgtgctcaaggtggaagtcttcagacagacagtggccgaccaggtgctagtaggaagctactgtgtcttcagcaatcagggagggctggtgcatcccaagacttcaattgaagaccaggatgagctgtcctctcttcttcaagtcccccttgtggcggggactgtgaaccgaggcagtgaggtgattgctgctgggatggtggtgaatgactggtgtgccttctgtggcctggacacaaccagcacagagctgtcagtggtggagagtgtcttcaagctgaatgaagcccagcctagcaccattgccaccagcatgcgggattccctcattgacagcctcacctgagtcaccttccaagttgttccatgggctcctggctctggactgtggccaaccttctccacattccgcccaatctgtaccggatgctggcagggaggtggcagagagctcactgggactgaggggctgggcacccaacccttttccacctgtgcttatcgccgcctggatctatcattactgcaaaaacctgctctgttgtgctggctggcaggccctgtggctgctggctgagggttctgctgtcctgtgccaccccattaaagtgcagttccctccggataaaaaaaaaaaaaaaaaaaaaaaaaaaaaaaaaaaaaaaaaaaaaaaaaaaaaaaaaaaaaaaaaaaaaaaaaaaaaaaaaccccgggttttttttttttttttttaaatagttgacactcaattttattgctaaaaaaaatgtcctctggagtgacagcaggtatttgtcctcaacctctccccagagtccctgggagtgtttctgttattgtggagggaataggggatctggggacagggtgggacgtaccatggggacaggaggtcacagaacacacacacacacacacacacacacacacacacgtgcacacacacatccccccacaactacagccgccaaaataaccagcatggtgttgtaacatccccccagtgggggctagaattccccatggtgacctgtgacctgctccctgagacaggggaggccaggcaggtcacggtggggacgcagcagaacattatttctccatcttgctgttttctagccttgagttggggacatgagtgagaactgggggttttgaggagtaacccttgtgaacacatgtactccagcagccaggcatcccagatctcctgtcctggagggtgctggggcccctggctccccagagtgtgcaggcagacccccagagccctagctcatccatttatccattcctcataatccagtgtccaaagagcacccccagcagggcagggaaggtccctcccggggtttacatgactgattccttctcagaggcgaccgtggcatcccctgcgggcccccgatagtgtttgaggagggggtttccttcctcagtggggagtggcagcggatccaggggcagctcactcttcacttgtatcaactcaggctctgtgcttctcgactccgtacggtccacgtaattttggaggagtcctgcccccagagcgtcaccttctacattgaggacggtacaggaccggtcgactagccagtccacagccaggatcaaggagatatggtcgaccgggaggttgactgcttcgaggatgatggccagagtgaggacacctccagcagggatgcccgctgcccccacgctggacgctgtggccgtgaccaggatggtgatgatctttacgaagtccaaggactgctggctgagctgtgcaatgaacactgcggccacgcactggaagagcgcggcaccgtccatgttgacggtggcgccgatgggcaggatgaaacggctgatgtgcttggccacgccattattctcctccacgcacttcatcatcagcggcagcgtggcggaactggaagaggtcccaaaggcagtggccagcggcgtcacgatgccccacaggaagcggtaggggtttttgcgggtgaagaggaagtagatgaggggcagtaccaggagcccatggatggcgtgacccagcaggcagcacagaatgtacttgccaaggcgggcaaagagtaaacccacatcctccatctccacgatcttgccagccaccaggaacatgatgcccacaggggcgtaccacatgatccaggagaccagaaccatggtggcctcattgaaggagttgaagaagcggataagcagctccccttcaggccccagcttccgcagcgccacaccaaagacgatggcaaacactaccaagcccaggatgttcatcccctccacctcctgccccacgggcaccttcaccctggttccggtgatattcctctcttcataggtggtagagtatgagcgaaaggctgctgacaccaggttggaaggg

SEQ ID NO: 378837 - DNA, 1268 bp, Homo sapiens
gtaagctggtgtgaggggaacctgggagggtcagctccggtcctgggtcgggaggggtgggggccagaggattcagggccggaggttctggtgggggcccagtgggcgggacccgaggacggaggggccgggaggccgagaggggcggggtcgcggcggggcctgagggacggaggccgggatacttgggaaaggatccgccggccttgaactcccgcctccgccgcccctaggcctcatggcggtccgagcttcgttcgagaacaactgtgagatcggctgctttgccaagctcaccaacacctactgtctggtagcgatcggaggctcagagaacttctacagtgtgttcgagggcgagctctccgataccatccccgtggtgcacgcgtctatcgccggctgccgcatcatcgggcgcatgtgtgtggggaacaggcacggtctcctggtacccaacaataccaccgaccaggagctgcaacacattcgcaacagcctcccagacacagtgcagattaggcgggtggaggagcggctctcagccttgggcaatgtcaccacctgcaatgactacgtggccttggtccacccagacttggacagggagacagaagaaattctggcagatgtgctcaaggtggaagtcttcagacagacagtggccgaccaggtgctagtaggaagctactgtgtcttcagcaatcagggagggctggtgcatcccaagacttcaattgaagaccaggatgagctgtcctctcttcttcaagtcccccttgtggcggggactgtgaaccgaggcagtgaggtgattgctgctgggatggtggtgaatgactggtgtgccttctgtggcctggacacaaccagcacagagctgtcagtggtggagagtgtcttcaagctgaatgaagcccagcctagcaccattgccaccagcatgcgggattccctcattgacagcctcacctgagtcaccttccaagttgttccatgggctcctggctctggactgtggccaaccttctccacattccgcccaatctgtaccggatgctgaatctgtaccggatgctggcagggaggtggcagagagctcactgggactgaggggctgggcacccaacccttttccacctgtgcttatcgcctggatctatcattactgcaaaaacctgctctgttgtgctggctggcaggccctgtggctgctggctgagggttctgctgtcctgtggcaccccattaaagtgcagttcctccgg

SEQ ID NO: 378838 - DNA, 401 bp, Homo sapiens
gtgaccttgaggatccaatcgccacgacaaggagcttgttactggttacttggcctcatggcggtccgagcttcgttcgagaacaactgtgagatcggctgctttgccaagctcaccaacacctactgtctggtagcgatcggaggctcagagaacttctacagtgtgttcgagggcgagctctccgataccatccccgtggtgcacgcgtctatcgccggctgccgcatcatcgggcgcatgtgtgtggggaacaggcacggtctcctggtacccaacaataccaccgaccaggagctgcaacacattcgcaacagcctcccagacacagtgcagattaggcgggtggaggagcgctccttgtcgtgcgattggggatcctaaagagcgaccccagcaac

SEQ ID NO: 378839 - DNA, 1279 bp, Homo sapiens
gtcgatgacagctcctaaaaagctcctgaatgaataatgaatgaatgaacgcgagcaggctaggcgtggggccaggcggggtcgcgcccagaccgctcgcgaccatagagtccgccggaggccggaggtagaggggctggatgcgtggcggggagcgccgggctctcccggaagtctccctggacggaagtggaaacggaaacctttttagggagtccaaggtacagtcgccgcgtgcggagcttgttactggttacttggcctcatggcggtccgagcttcgttcgagaacaactgtgagatcggctgctttgccaagctcaccaacacctactgtctggtagcgatcggaggctcagagaacttctacagtgtgttcgagggcgagctctccgataccatccccgtggtgcacgcgtctatcgccggctgccgcatcatcgggcgcatgtgtgtggggaacaggcacggtctcctggtacccaacaataccaccgaccaggagctgcaacacattcgcaacagcctcccagacacagtgcagattaggcgggtggaggagcggctctcagccttgggcaatgtcaccacctgcaatgactacgtggccttggtccacccagacttggacagggagacagaagaaattctggcagatgtgctcaaggtggaagtcttcagacagacagtggccgaccaggtgctagtaggaagctactgtgtcttcagcaatcagggagggctggtgcatcccaagacttcaattgaagaccaggatgagctgtcctctcttcttcaagtcccccttgtggcggggactgtgaaccgaggcagtgaggtgattgctgctgggatggtggtgaatgactggtgtgccttctgtggcctggacacaaccagcacagagctgtcagtggtggagagtgtcttcaagctgaatgaagcccagcctagcaccattgccaccagcatgcgggattccctcattgacagcctcacctgagtcaccttccaagttgttccatgggctcctggctctggactgtggccaaccttctccacattccgcccaatctgtaccggatgctggcagggaggtggcagagagctcactgggactgaggggctgggcacccaacccttttccacctgtgcttatcgcctggatctatcattactgcaaaaacctgctctgttgtgctggctggcaggccctgtggctgctggctgagggttctgctgtcctgtgccaccccattaaagtgcagttccctccggg

SEQ ID NO: 378840 - DNA, 1088 bp, Homo sapiens
  misc_feature (12)..(12): n is a, c, g, or t
attcggcacagngtttttagggagtccaaggtacagtcgccgcgtgcggagcttgttactggttacttggcctcatggcggtccgagcttcgttcgagaacaactgtgagatcggctgctttgccaagctcaccaacacctactgtctggtagcgatcggaggctcagagaacttctacagtgtgttcgagggcgagctctccgataccatccccgtggtgcacgcgtctatcgccggctgccgcatcatcgggcgcatgtgtgtggggaacaggcacggtctcctggtacccaacaataccaccgaccaggagctgcaacacattcgcaacagcctcccagacacagtgcagattaggcgggtggaggagcggctctcagccttgggcaatgtcaccacctgcaatgactacgtggccttggtccacccagacttggacagggagacagaagaaattctggcagatgtgctcaaggtggaagtcttcagacagacagtggccgaccaggtgctagtaggaagctactgtgtcttcagcaatcagggagggctggtgcatcccaagacttcaattgaagaccaggatgagctgtcctctcttcttcaagtcccccttgtggcggggactgtgaaccgaggcagtgaggtgattgctgctgggatggtggtgaatgactggtgtgccttctgtggcctggacacaaccagcacagagctgtcagtggtggagagtgtcttcaagctgaatgaagcccagcctagcaccattgccaccagcatgcgggattccctcattgacagcctcacctgagtcaccttccaagttgttccatgggctcctggctctggactgtggccaaccttctccacattccgcccaatctgtaccggatgctggcagggaggtggcagagagctcactgggactgaggggctgggcacccaacccttttccacctgtgcttatcgcctggatctatcattactgcaaaaacctgctctgttgtgctggctggcaggccctgtggctgctggctgagggttctgctgtcctgtgccaccccattaaagtgcagttccctccggg

SEQ ID NO: 378841 - DNA, 1297 bp, Homo sapiens
  misc_feature (1242)..(1242): n is a, c, g, or t
  misc_feature (1253)..(1253): n is a, c, g, or t
  misc_feature (1259)..(1259): n is a, c, g, or t
  misc_feature (1280)..(1280): n is a, c, g, or t
  misc_feature (1293)..(1293): n is a, c, g, or t
gtcgatgacagctcctaaaaagctcctgaatgaataatgaatgaatgaacgcgagcaggctaggcgtggggccaggcggggtcgcgcccagaccgctcgcgaccatagagtccgccggaggccggaggtagaggggctggatgcgtggcggggagcgccgggctctcccggaagtctccctggacggaagtggaaacggaaacctttttagggagtccaaggtacagtcgccgcgtgcggagcttgttactggttacttggcctcatggcggtccgagcttcgttcgagaacaactgtgagatcggctgctttgccaagctcaccaacacctactgtctggtagcgatcggaggctcagagaacttctacagtgtgttcgagggcgagctctccgataccatccccgtggtgcacgcgtctatcgccggctgccgcatcatcgggcgcatgtgtgtggggaacaggcacggtctcctggtacccaacaataccaccgaccaggagctgcaacacattcgcaacagcctcccagacacagtgcagattaggcgggtggaggagcggctctcagccttgggcaatgtcaccacctgcaatgactacgtggccttggtccacccagacttggacagggagacagaagaaattctggcagatgtgctcaaggtggaagtcttcagacagacagtggccgaccaggtgctagtaggaagctactgtgtcttcagcaatcagggagggctggtgcatcccaagacttcaattgaagaccaggatgagctgtcctctcttcttcaagtcccccttgtggcggggactgtgaaccgaggcagtgaggtgattgctgctgggatggtggtgaatgactggtgtgccttctgtggcctggacacaaccagcacagagctgtcagtggtggagagtgtcttcaagctgaatgaagcccagcctagcaccattgccaccagcatgcgggattccctcattgacagcctcacctgagtcaccttccaagttgttccatgggctcctggctctggactgtggccaaccttctccacattccgcccaatctgtaccggatgctggcagggaggtggcagagagctcactgggactgaggggctgggcacccaacccttttccacctgtgcttatcgcctggatctatcattactgcaaaaacctgctctgttgtgctggctggcaggccctgttggttgcttgggcttgaggggttnttgttgttccntgttgnccaaccccatttaaaagttgncagttttcccttncggg

SEQ ID NO: 378842 - DNA, 1071 bp, Homo sapiens
gtgaccttgaggatccaatcgccacgacaaggagcttgttactggttacttggcctcatggcggtccgagcttcgttcgagaacaactgtgagatcggctgctttgccaagctcaccaacacctactgtctggtagcgatcggaggctcagagaacttctacagtgtgttcgagggcgagctctccgataccatccccgtggtgcacgcgtctatcgccggctgccgcatcatcgggcgcatgtgtgtggggaacaggcacggtctcctggtacccaacaataccaccgaccaggagctgcaacacattcgcaacagcctcccagacacagtgcagattaggcgggtggaggagcggctctcagccttgggcaatgtcaccacctgcaatgactacgtggccttggtccacccagacttggacagggagacagaagaaattctggcagatgtgctcaaggtggaagtcttcagacagacagtggccgaccaggtgctagtaggaagctactgtgtcttcagcaatcagggagggctggtgcatcccaagacttcaattgaagaccaggatgagctgtcctctcttcttcaagtcccccttgtggcggggactgtgaaccgaggcagtgaggtgattgctgctgggatggtggtgaatgactggtgtgccttctgtggcctggacacaaccagcacagagctgtcagtggtggagagtgtcttcaagctgaatgaagcccagcctagcaccattgccaccagcatgcgggattccctcattgacagcctcacctgagtcaccttccaagttgttccatgggctcctggctctggactgtggccaaccttctccacattccgcccaatctgtaccggatgctggcagggaggtggcagagagctcactgggactgaggggctgggcacccaacccttttccacctgtgcttatcgcctggatctatcattactgcaaaaacctgctctgttgtgctggctggcaggccctgtggctgctggctgagggttctgctgtcctgtgccaccccattaaagtgcagttccctccggg

SEQ ID NO: 378843 - DNA, 1252 bp, Homo sapiens
gtaagctggtgtgaggggaacctgggagggtcagctccggtcctgggtcgggaggggtgggggccagaggattcagggccggaggttctggtgggggcccagtgggcgggacccgaggacggaggggccgggaggccgagaggggcggggtcgcggcggggcctgagggacggaggccgggatacttgggaaaggatccgccggccttgaactcccgcctccgccgcccctaggcctcatggcggtccgagcttcgttcgagaacaactgtgagatcggctgctttgccaagctcaccaacacctactgtctggtagcgatcggaggctcagagaacttctacagtgtgttcgagggcgagctctccgataccatccccgtggtgcacgcgtctatcgccggctgccgcatcatcgggcgcatgtgtgtggggaacaggcacggtctcctggtacccaacaataccaccgaccaggagctgcaacacattcgcaacagcctcccagacacagtgcagattaggcgggtggaggagcggctctcagccttgggcaatgtcaccacctgcaatgactacgtggccttggtccacccagacttggacagggagacagaagaaattctggcagatgtgctcaaggtggaagtcttcagacagacagtggccgaccaggtgctagtaggaagctactgtgtcttcagcaatcagggagggctggtgcatcccaagacttcaattgaagaccaggatgagctgtcctctcttcttcaagtcccccttgtggcggggactgtgaaccgaggcagtgaggtgattgctgctgggatggtggtgaatgactggtgtgccttctgtggcctggacacaaccagcacagagctgtcagtggtggagagtgtcttcaagctgaatgaagcccagcctagcaccattgccaccagcatgcgggattccctcattgacagcctcacctgagtcaccttccaagttgttccatgggctcctggctctggactgtggccaaccttctccacattccgcccaatctgtaccggatgctggcagggaggtggcagagagctcactgggactgaggggctgggcacccaacccttttccacctgtgcttatcgcctggatctatcattactgcaaaaacctgctctgttgtgctggctggcaggccctgtggctgctggctgagggttctgctgtcctgtgccaccccattaaagtgcagttccctccggg

SEQ ID NO: 378844 - DNA, 1782 bp, Homo sapiens
cagacccaagccgggttttattgaaatgccaggagcaggcacatgtcaaagtagccaaggaaggggggacagtggtacaggctgtgtaagttggcagggatgggcaagcctcatgtccatggtcctggcatcccctctgccaggggataagtaggcacaactaccctcccctcaaaatggcatgctcaggccagtggggcccctacccctggaccatgaaggctccaagaagggctggaagcactaagttttctctctcctgagggggaaggaaagaaggggagatgcaggaggaaggggaggtatagcgggggatgagcgttccaagaagtctctccttctaggtgtctgcacccaactcatggtgctgggcagtggagaggagcagcattacaaagggaggctgaaggctcatccctcagggaaccggagccccccagcctgtggggcttgtgtcagccctgaacagagggcagaagttcaaggggactgaagatgcaggtagttcccaagtgacctaggagtccccagagctggggggtgtggccttcatgggacaaggaggaagacaggaggatccaaccccagcatggaggggggagtgggcagtctccccaatttggcccctctaggtcagttccacgttgttggcacggtcaagcactcgggagccacgggcactacccccaagctggaaacggctctcatagagagtggggcagagcctcgtgccgaattcggcacgagggttactggttacttggcctcatggcggtccgagcttcgttcgagaacaactgtgagatcggctgctttgccaagctcaccaacacctactgtctggtagcgatcggaggctcagagaacttctacagtgtgttcgagggcgagctctccgataccatccccgtggtgcacgcgtctatcgccggctgccgcatcatcgggcgcatgtgtgtggggaacaggcacggtctcctggtacccaacaataccaccgaccaggagctgcaacacattcgcaacagcctcccagacacagtgcagattaggcgggtggaggagcggctctcagccttgggcaatgtcaccacctgcaatgactacgtggccttggtccacccagacttggacagggagacagaagaaattctggcagatgtgctcaaggtggaagtcttcagacagacagtggccgaccaggtgctagtaggaagctactgtgtcttcagcaatcagggagggctggtgcatcccaagacttcaattgaagaccaggatgagctgtcctctcttcttcaagtcccccttgtggcggggactgtgaaccgaggcagtgaggtgattgctgctgggatggtggtgaatgactggtgtgccttctgtggcctggacacaaccagcacagagctgtcagtggtggagagtgtcttcaagctgaatgaagcccagcctagcaccattgccaccagcatgcgggattccctcattgacagcctcacctgagtcaccttccaagttgttccatgggctcctggctctggactgtggccaaccttctccacattccgcccaatctgtaccggatgctggcagggaggtggcagagagctcactgggactgaggggctgggcacccaacccttttccacctgtgcttatcgcctggatctatcattactgcaaaaacctgctctgttgtgctggctggcaggccctgtggctgctggctgagggttctgctgtcctgtgccaccccattaaagtgcagttccctccggg

SEQ ID NO: 378845 - DNA, 1237 bp, Homo sapiens
gtcgatgacagctcctaaaaagctcctgaatgaataatgaatgaatgaacgcgagcaggctaggcgtggggccaggcggggtcgcgcccagaccgctcgcgaccatagagtccgccggaggccggaggtagaggggctggatgcgtggcggggagcgccgggctctcccggaagtctccctggacggaagtggaaacggaaacctttttagggagtcggcctcatggcggtccgagcttcgttcgagaacaactgtgagatcggctgctttgccaagctcaccaacacctactgtctggtagcgatcggaggctcagagaacttctacagtgtgttcgagggcgagctctccgataccatccccgtggtgcacgcgtctatcgccggctgccgcatcatcgggcgcatgtgtgtggggaacaggcacggtctcctggtacccaacaataccaccgaccaggagctgcaacacattcgcaacagcctcccagacacagtgcagattaggcgggtggaggagcggctctcagccttgggcaatgtcaccacctgcaatgactacgtggccttggtccacccagacttggacagggagacagaagaaattctggcagatgtgctcaaggtggaagtcttcagacagacagtggccgaccaggtgctagtaggaagctactgtgtcttcagcaatcagggagggctggtgcatcccaagacttcaattgaagaccaggatgagctgtcctctcttcttcaagtcccccttgtggcggggactgtgaaccgaggcagtgaggtgattgctgctgggatggtggtgaatgactggtgtgccttctgtggcctggacacaaccagcacagagctgtcagtggtggagagtgtcttcaagctgaatgaagcccagcctagcaccattgccaccagcatgcgggattccctcattgacagcctcacctgagtcaccttccaagttgttccatgggctcctggctctggactgtggccaaccttctccacattccgcccaatctgtaccggatgctggcagggaggtggcagagagctcactgggactgaggggctgggcacccaacccttttccacctgtgcttatcgcctggatctatcattactgcaaaaacctgctctgttgtgctggctggcaggccctgtggctgctggctgagggttctgctgtcctgtgccaccccattaaagtgcagttccctccggg

SEQ ID NO: 378846 - DNA, 1476 bp, Homo sapiens
gtcgatgacagctcctaaaaagctcctgaatgaataatgaatgaatgaacgcgagcaggctaggcgtggggccaggcggggtcgcgcccagaccgctcgcgaccatagagtccgccggaggccggaggtagaggggctggatgcgtggcggggagcgccgggctctcccggaagtctccctggacggaagtggaaacggaaacctttttagggagtccaaggtacagtcgccgcgtgcggagcttgttactggttacttggcctcatggcggtccgagcttcgttcgagaacaactgtgagatcggctgctttgccaagctcaccaacacctactgtctggtagcgatcggaggctcagagaacttctacagtgtgttcgagggcgagctctccgataccatccccgtggtgcacgcgtctatcgccggctgccgcatcatcgggcgcatgtgtgtggggaacaggcacggtctcctggtacccaacaataccaccgaccaggagctgcaacacattcgcaacagcctcccagacacagtgcagattaggcgggtggaggagcggctctcagccttgggcaatgtcaccacctgcaatgactacgtggccttggtccacccagacttggacagggagacagaagaaattctggcagatgtgctcaaggtggaagtcttcagacagacagtggccgaccaggtgctagtaggaagctactgtgtcttcagcaatcagggagggctggtgcatcccaagacttcaattgaagaccaggatgagctgtcctctcttcttcaagtcccccttgtggcggggactgtgaaccgaggcagtgaggtgattgctgctgggatggtggtgaatgactggtgtgccttctgtggcctggacacaaccagcacagagctgtcagtggtggagagtgtcttcaagctgaatgaagcccagcctagcaccattgccaccagcatgcgggattccctcattgacagattgggtaactcaaggcgtccctggagtacactgaggataagtgtttgagaaatgctgtctgaaggaatgaagtcagtctatgacaacgtctctctgccgtgaatcattcctgcagatgaaaaagtgtgacttggcagctggtgattctgctgtgccctacagtttgagaaccatggaagcttagcatgatggctgacagcatgggctccagggccataatgcccagattcaaagccttatttcaccattcaccaactgtgggaccttaggtaggtgacttaatgtttctctatatctcagtttacctatctgtaaaatgaagatagcaatatttacctataataataatttaacattatatattgcttaatacataaatttaattatgcattataatgtattaatagatataatagtttccacacataatgggtggcaagcacttggcacgggcctcagaacaccagcatacccactaatta

SEQ ID NO: 378847 - DNA, 1293 bp, Homo sapiens
gtcgatgacagctcctaaaaagctcctgaatgaataatgaatgaatgaacgcgagcaggctaggcgtggggccaggcggggtcgcgcccagaccgctcgcgaccatagagtccgccggaggccggaggtagaggggctggatgcgtggcggggagcgccgggctctcccggaagtctccctggacggaagtggaaacggaaacctttttagggagtccaaggtacagtcgccgcgtgcggagcttgttactggttacttggcctcatggcggtccgagcttcgttcgagaacaactgtgagatcggctgctttgccaagctcaccaacacctactgtctggtagcgatcggaggctcagagaacttctacagtgtgttcgagggcgagctctccgataccatccccgtggtgcacgcgtctatcgccggctgccgcatcatcgggcgcatgtgtgtggggaacaggcacggtctcctggtacccaacaataccaccgaccaggagctgcaacacattcgcaacagcctcccagacacagtgcagattaggcgggtggaggagcggctctcagccttgggcaatgtcaccacctgcaatgactacgtggccttggtccacccagacttggacagggagacagaagaaattctggcagatgtgctcaaggtggaagtcttcagacagacagtggccgaccaggtgctagtaggaagctactgtgtcttcagcaatcagggagggctggtgcatcccaagacttcaattgaagaccaggatgagctgtcctctcttcttcaagtcccccttgtggcggggactgtgaaccgaggcagtgaggtgattgctgctgggatggtggtgaatgactggtgtgccttctgtggcctggacacaaccagcacagagctgtcagtggtggagagtgtcttcaagctgaatgaagccagcctagcaccattgccaccagcatgcgggattccctcattgcagcctcacctgagtcaccttccaagttgttccatgggctcctggctctggactgtggccaaccttctccacattccgcccaatctgtaccggatgctgaatctgtaccggatgctggcagggaggtggcagagagctcactgggactgaggggctgggcacccaacccttttccacctgtgcttatcgcctggatctatcattactgcaaaaacctgctctgttgtgctggctggcaggccctgtggctgctggctgagggttctgctgtcctgtggcaccccattaaagtgcagttcctccgg

SEQ ID NO: 378848 - DNA, 1661 bp, Homo sapiens
gacggccagtactcctacggtttaaggtacgaggctgggtggcggaaacctttttagggagtccaaggtacagtcgccgcgtgcggagcttgttactggttacttggcctcatggcggtccgagcttcgttcgagaacaactgtgagatcggctgctttgccaagctcaccaacacctactgtctggtagcgatcggaggctcagagaacttctacagtgtgttcgagggcgagctctccgataccatccccgtggtgcacgcgtctatcgccggctgccgcatcatcgggcgcatgtgtgtggggaacaggcacggtctcctggtacccaacaataccaccgaccaggagctgcaacacattcgcaacagcctcccagacacagtgcagattaggcgggtggaggagcggctctcagccttgggcaatgtcaccacctgcaatgactacgtggccttggtccacccagacttggacagggtgaggcagcccaacttgacccaagagtcacagggccatcctagtcagtggttagccactgttctttcccaacaggcagcaattaggggtctctcctgtggtttttctatatgggctcttgagtttcaggtactcattggaatagtgataacagaggccttatcaagtgtcagaaagaagctggggagggtatgaatccttcatgattggggagattgaaccatccagtcctgcatcctgggccaggataggtgattgactgttgaacttttgactgtgggtgagaggggaaagaagtgatattgagaccagcctccagctgttcagggcatgcatgaatattaggggcttcacagctgcccttgactctgctctaagctgtacttcctcctttctctgggtgaggctttcatatgaggtacagaggagaaatgaggggctcagggagccaaggcctggatgcttctgggcatggagaaccttggttctggggctgtaagttctgagccctgaacacaatatctttgattgacagggagacagaagaaattctggcagatgtgctcaaggtggaagtcttcagacagacagtggccgaccaggtgctagtaggaagctactgtgtcttcagcaatcagggagggctggtgcatcccaagacttcaattgaagaccaggatgagctgtcctctcttcttcaagtcccccttgtggcggggactgtgaaccgaggcagtgaggtgattgctgctgggatggtggtgaatgactggtgtgccttctgtggcctggacacaaccagcacagagctgtcagtggtggagagtgtcttcaagctgaatgaagcccagcctagcaccattgccaccagcatgcgggattccctcattgacagcctcacctgagtcaccttccaagttgttccatgggctcctggctctggactgtggccaaccttctccacattccgcccaatctgtaccggatgctggcagggaggtggcagagagctcactgggactgaggggctgggcacccaacccttttccacctgtgcttatcgcctggatctatcattactgcaaaaacctgctctgttgtgctggctggcaggccctgtggctgctggctgagggttctgctgtcctgtgccaccccattaaagtgcagttccctccggg

SEQ ID NO: 378849 - DNA, 1066 bp, Homo sapiens
gacggccagtactcctacggtttaaggtacgaggctgggtggcggaaacctttttagggagtccaaggtacagtcgccgcgtgcggagcttgttactggttacttggcctcatggcggtccgagcttcgttcgagaacaactgtgagatcggctgctttgccaagctcaccaacacctactgtctggtagcgatcggaggctcagagaacttctacagtgtgttcgagggcgagctctccgataccatccccgtggtgcacgcgtctatcgccggctgccgcatcatcgggcgcatgtgtgtggggaacaggcacggtctcctggtacccaacaataccaccgaccaggagctgcaacacattcgcaacagcctcccagacacagtgcagattaggcgggtggaggagcggctctcagccttgggcaatgtcaccacctgcaatgactacgtggccttggtccacccagacttgagtggccgaccaggtgctagtaggaagctactgtgtcttcagcaatcagggagggctggtgcatcccaagacttcaattgaagaccaggatgagctgtcctctcttcttcaagtcccccttgtggcggggactgtgaaccgaggcagtgaggtgattgctgctgggatggtggtgaatgactggtgtgccttctgtggcctggacacaaccagcacagagctgtcagtggtggagagtgtcttcaagctgaatgaagcccagcctagcaccattgccaccagcatgcgggattccctcattgacagcctcacctgagtcaccttccaagttgttccatgggctcctggctctggactgtggccaaccttctccacattccgcccaatctgtaccggatgctggcagggaggtggcagagagctcactgggactgaggggctgggcacccaacccttttccacctgtgcttatcgcctggatctatcattactgcaaaaacctgctctgttgtgctggctggcaggccctgtggctgctggctgagggttctgctgtcctgtgccaccccattaaagtgcagttccctccggg

SEQ ID NO: 378850 - DNA, 1032 bp, Homo sapiens
gacggccagtactcctacggtttaaggtacgaggctgggtggcggaaacctttttagggagtccaaggtacagtcgccgcgtgcggagcttgttactggttacttggcctcatggcggtccgagcttcgttcgagaacaactgtgagatcggctgctttgccaagctcaccaacacctactgtctggtagcgatcggaggctcagagaacttctacagtgtgttcgagggcgagctctccgataccatccccgtggtgcacgcgtctatcgccggctgccgcatcatcgggcgcatgtgtgtggggaacaggcacggtctcctggtacccaacaataccaccgaccaggagctgcaacacattcgcaacagcctcccagacgacagggagacagaagaaattctggcagatgtgctcaaggtggaagtcttcagacagacagtggccgaccaggtgctagtaggaagctactgtgtcttcagcaatcagggagggctggtgcatcccaagacttcaattgaagaccaggatgagctgtcctctcttcttcaagtcccccttgtggcggggactgtgaaccgaggcagtgaggtgattgctgctgggatggtggtgaatgactggtgtgccttctgtggcctggacacaaccagcacagagctgtcagtggtggagagtgtcttcaagctgaatgaagcccagcctagcaccattgccaccagcatgcgggattccctcattgacagcctcacctgagtcaccttccaagttgttccatgggctcctggctctggactgtggccaaccttctccacattccgcccaatctgtaccggatgctggcagggaggtggcagagagctcactgggactgaggggctgggcacccaacccttttccacctgtgcttatcgcctggatctatcattactgcaaaaacctgctctgttgtgctggctggcaggccctgtggctgctggctgagggttctgctgtcctgtgccaccccattaaagtgcagttccctccggg

SEQ ID NO: 378851 - DNA, 1033 bp, Homo sapiens
gtcgatgacagctcctaaaaagctcctgaatgaataatgaatgaatgaacgcgagcaggctaggcgtggggccaggcggggtcgcgcccagaccgctcgcgaccatagagtccgccggaggccggaggtagaggggctggatgcgtggcggggagcgccgggctctcccggaagtctccctggacggaagtggaaacggaaacctttttagggagtccaaggtacagtcgccgcgtgcggagcttgttactggttacttggcctcatggcggtccgagcttcgttcgagaacaactgtgagatcggctgctttgccaagctcaccaacacctactgtctggtagcgatcggaggctcagagaacttctacagtgtgttcgagggcgagctctccgataccatccccgtggtgcacgcgtctatcgccggctgccgcatcatcgggcgcatgtgtgtggggaacaggcacggtctcctggtacccaacaataccaccgaccaggagctgcaacacattcgcaacagcctcccagacacagtgcagattaggcgggtggaggagcggctctcagccttgggcaatgtcaccacctgcaatgactacgtggccttggtccacccagacttggacagggagacagaagaaattctggcagatgtgctcaaggtggaagtcttcagacagacagtggccgaccaggtgctagtaggaagctactgtgtcttcagcaatcagggagggctggtgcatcccaagacttcaattgaagaccaggatgagctgtcctctcttcttcaagtcccccttgtggcggggactgtgaaccgaggcagtgaggtgattgctgctgggatggtggtgaatgactggtgtgaggggctgggcacccaacccttttccacctgtgcttatcgcctggatctatcattactgcaaaaacctgctctgttgtgctggctggcaggccctgtggctgctggctgagggttctgctgtcctgtgccaccccattaaagtgcagttccctccggg

SEQ ID NO: 378852 - DNA, 1077 bp, Homo sapiens
tggctagtagaggctggcggtgaaatcggcaccgaggctcgtgccgggatcctgggagggcctcatggcggtccgagcttcgttcgagaacaactgtgagatcggctgctttgccaagctcaccaacacctactgtctggtagcgatcggaggctcagagaacttctacagtgtgttcgagggcgagctctccgataccatccccgtggtgcacgcgtctatcgccggctgccgcatcatcgggcgcatgtgtgtggggaacaggcacggtctcctggtacccaacaataccaccgaccaggagctgcaacacattcgcaacagcctcccagacacagtgcagattaggcgggtggaggagcggctctcagccttgggcaatgtcaccacctgcaatgactacgtggccttggtccacccagacttggacagggagacagaagaaattctggcagatgtgctcaaggtggaagtcttcagacagacagtggccgaccaggtgctagtaggaagctactgtgtcttcagcaatcagggagggctggtgcatcccaagacttcaattgaagaccaggatgagctgtcctctcttcttcaagtcccccttgtggcggggactgtgaaccgaggcagtgaggtgattgctgctgggatggtggtgaatgactggtgtgccttctgtggcctggacacaaccagcacagagctgtcagtggtggagagtgtcttcaagctgaatgaagcccagcctagcaccattgccaccagcatgcgggattccctcattgacagcctcacctgagtcaccttccaagttgttccatgggctcctggctctggactgtgggcaaaccttctccaattccggccaaatctgtaccggatgctggcagggaggtggcagagagctcactgggactgaggggctgggcacccaacccttttccacctgtgcttatcgcctggatctatcattactgcaaaaacctgctctgttgtgctggctggcaggccctgtggctgctggctgagggttctgctgtcctgtggcaccccattaaagtgcagttcctccgg

SEQ ID NO: 378853 - DNA, 1169 bp, Homo sapiens
gacggccagtactcctacggtttaaggtacgaggctgggtggcggaaacctttttagggagtccaaggtacagtcgccgcgtgcggagcttgttactggttacttggcctcatggcggtccgagcttcgttcgagaacaactgtgagatcggctgctttgccaagctcaccaacacctactgtctggtagcgatcggaggctcagagaacttctacagtgtgttcgagggcgagctctccgataccatccccgtggtgcacgcgtctatcgccggctgccgcatcatcgggcgcatgtgtgtggggaacaggcacggtctcctggtacccaacaataccaccgaccaggagctgcaacacattcgcaacagcctcccagacgacagggagacagaagaaattctggcagatgtgctcaaggtggaagtcttcagacagacagtggccgaccaggtgctagtaggaagctactgtgtcttcagcaatcagggagggctggtgcatcccaagacttcaattgaagaccaggatgagctgtcctctcttcttcaagtcccccttgtggcggggactgtgaaccgaggcagtgaggtgattgctgctgggatggtggtgaatgactggtgtgccttctgtggcctggacacaaccagcacagagctgtcagtggtggagagtgtcttcaagctgaatgaagcccagcctagcaccattgccaccagcatgcgggattccctcattgacagcctcacctgagtcaccttccaagttgttccatgggctcctggctctggactgtgggcaaaccttctccaattccggccaaatctgtaccggatgctggcagggaggtggcagagagctcactgggactgaggggctgggcacccaacccttttccacctgtgcttatcgcctggatctatcattactgcaaaaacctgctctgttgtgctggctggcaggccctgtggctgctggctgagggttctgctgtcctgtggcaccccattaaagtgcagttcctccggaaaaaaaaaaaaaaaaaaactgggttttgggggggaaaggggtaaagggggtagtttcggcgcctttgtgaagggacgggccatggggtatcgaggaggtgtggaggagggaaaaaaaaaggaaagagatagggacgg

SEQ ID NO: 378854 - DNA, 455 bp, Homo sapiens
gacggccagtactcctacggtttaaggtacgaggctgggtggcggaaacctttttagggagtccaaggtacagtcgccgcgtgcggagcttgttactggttacttggcctcatggcggtccgagcttcgttcgagaacaactgtgagatcggctgctttgccaagctcaccaacacctactgtctggtagcgatcggaggctcagagaacttctacagtgtgttcgagggcgagctctccgataccatccccgtggtgcacgcgtctatcgccggctgccgcatcatcgggcgcatgtgtgtggggaacaggcacggtctcctggtacccaacaataccaccgaccaggagctgcaacacattcgcaacagcctcccagacacagtgcagattaggcgggtggaggagcgctccttgtcgtgcgattggggatcctaaagagcgaccccagcaac

SEQ ID NO: 378855 - DNA, 587 bp, Homo sapiens
gacggccagtactcctacggtttaaggtacgaggctgggtggcggaaacctttttagggagtccaaggtacagtcgccgcgtgcggagcttgttactggttacttggcctcatggcggtccgagcttcgttcgagaacaactgtgagatcggctgctttgccaagctcaccaacacctactgtctggtagcgatcggaggctcagagaacttctacagtgtgttcgagggcgagctctccgataccatccccgtggtgcacgcgtctatcgccggctgccgcatcatcgggcgcatgtgtgtggggaacaggcacggtctcctggtacccaacaataccaccgaccaggagctgcaacacattcgcaacagcctcccagacaatctgtaccggatgctggcagggaggtggcagagagctcactgggactgaggggctgggcacccaacccttttccacctgtgcttatcgcctggatctatcattactgcaaaaacctgctctgttgtgctggctggcaggccctgtggctgctggctgagggttctgctgtcctgtggcaccccattaaagtgcagttcctccgg

SEQ ID NO: 378856 - DNA, 242 bp, Homo sapiens
aaccatatacattttaaaaattgtgataatctcctataggaacagattgttttaactacatgaattattttaaaaagtcgaggtggcaaaaaagtacttcaacgaggaataatctctttgggaaaaaaacacaagaaaaacatatgacagatgatgtgccaatcagctcaatatgttaagagttcatacaaattaagaacttgacagaaacaagggcaaaggataccaactgtttattaaaa

SEQ ID NO: 378857 - DNA, 333 bp, Homo sapiens
agctggatgtggtggcaggtacctgtaatcccagctacttgggaggctgaggcacgagaattgcttcaacccaggaggcagaggttgcaatgagctgagattgcctcactgcactccagcctgagtgacagggcaagactccacctcaaacaaaccaaccaaaaaaacccacaaatctgtaaagaaggattacagtcagttttccactttatacctgatttaattctataatgcttgagtatttaacaaaaaatggttattacttttataatctagaataaatttttcaattttgcaaattaaaaatattgtaaatgatcatgtagagctaca

SEQ ID NO: 378858 - DNA, 509 bp, Homo sapiens
gcaaaaataaattcacattagaaaagatgcagctaatgatattaaaaaacaagtatttctccagtgtctggagttgaactgaaaagaatacatgtatatctataatacatcctgaaagtattcctttaaagtcttatataaacaggttcttcaaacaaaatattatcttaatgccaatagaacagatactttgtttccatgatgcatgatgagatagctcaaataagctaaaatgtatacaaaataaggttaatttatttttatttattttttaaaatttatggaatgcttcacaaatttgcatgtcatctttgtgtaggggccatgctaatcttctctgtatcattccaattttagtgtaagtgctgccaaagcgagcacaaaataagctgaactgataaactagtaaagatattttcctcttaaacagcagccaagagggcaaatgcatcaggagactgaaataaggcgatttttttaagtccaacttttactttaattgttttctt

SEQ ID NO: 378859 - DNA, 212 bp, Homo sapiens
atcgcttgaacccaggaggcagagggtgcagtggaggttcaagaatcgcttgaacccaggaggtggagattgcaccactgcactccagcctgggcaacagaacaagactccatctcaaaaaaaaaaaaaaaaaaaaaaaaaggactttctagcctacaacttcacccccaaagtgcacatgggggcaacaaccgaagccactggccaacgag

SEQ ID NO: 378860 - DNA, 383 bp, Homo sapiens
gtgcttcttccttctgggaggtttctagacttctggaatgagaggtcccctgagggtgcattgccagacatttctctgcatctttaaaaccagagtttttatttgttatgtttttttcttgagtgcctagaggatctaagagtttagccagtatcatataacctctcaactcttctgatgttggaccttttctctgaaacaaactcaaagacaagcaagcaaattagatgactacagcatacaaaacataaaggctggacctaaatgggtcaatagcaccatctcttggccatgtgtgagtactgcatctaccagttttcaactagtgaaagtacaaaacacacctgtggatttgcggttaactaaagcagagtaaaaatatc

SEQ ID NO: 378861 - DNA, 1263 bp, Homo sapiens
  misc_feature (3)..(3): n is a, c, g, or t
  misc_feature (86)..(86): n is a, c, g, or t
  misc_feature (262)..(263): n is a, c, g, or t
atnccattctctgtctcatggggcgtcctcctgctggcaggcctgtgctgcctggtccccagctccctggttgaggatccccaggnagatgctgcccaaaagacggatacatcccaccatgatcaaggggactgggaggaccttgcttgccagaagatctcctataacgtcaccgacctcgcctttgatttgtacaagagctggctgatctatcacaaccagcatgtcttagtcaccccaacaagcgtggctatggcctttnnaatgctctccctggggaccaaggctgacactcgcacagagatcctggaaggcctgaatgtcaacctcacagagacgcctgaggccaagatccacgaatgcttccagcaagttctccaagccctcagcaggccagacacccggctccagctgaccaccggcagtagcctgtttgttaacaagagtatgaagctagtggacacgtttttggaggataccaagaagctgtaccactcagaagcctcttccatcaacttcagggacaccgaggaggccaaagagcagatcaacaattatgtggagaaaagaactggaagaaaagtagtggatttggtcaaacacctgaaaaaagacacaagtcttgccctggtggattacatttcctttcacggcaagtggaaagataaattcaaggctgagcgcattatggtagagggcttccatgtggatgataagaccatcatcagagtgcctatgataaaccacctgggtagatttgacatccaccgggacagggagttatccagctgggtgctggcacagcactatgtggggaacgccactgccttcttcatcctgcccgatccaaagaagatgtggcagttggaagaaaaattgacctacagccaccttgaaaatatccagagagcctttgacataaggtctatcaatctacattttcccaaactgtccatttctggaacctacaaactcaagagagtccctaggaatctgggcatcaccaagatcttcagcaacgaggccgacctctctggagtcagtcaggaggcacccctgaagctctccaaggctgtgcatgtggctgtgctcaccattgatgagaaagggaccgaagccaccggagccccccatctggaggagaaggcctggtctaagtatcagacagtcatgttcaaccgacccttcctggtcatcatcaaggagtacatcaccaactttccgctcttcattggaaaagtggtgaatcccacccaaaaataa

SEQ ID NO: 378862 - DNA, 679 bp, Homo sapiens
cccacgcgtccgctccctctctccctccctcccagctcctgcaccaggaaacggcccggatcccggcagcggcctgacccggctccacgctggccaggaggatgaaaggccccagctgggggctccttgccaccagtgctgtgtcttaagagctgccatcccggctggccgcccggatggcgaccccagcctcggccccagacacacgggctctggtggcagactttgtaggttataagctgaggcagaagggttatgtctgtggagctggccccggggagggcccagcagctgacccgctgcaccaagccatgcgggcagctggagatgagttcgagacccgcttccggcgcaccttctctgatctggcggctcagctgcatgtgaccccaggctcagcccaacaacgcttcacccaggtctccgatgaactttttcaagggggccccaactggggccgccttgtagccttctttgtctttggggctgcactgtgtgctgagagtgtcaacaaggagatggaaccactggtgggacaagtgcaggagtggatggtggcctacctggagacgcggctggctgactggatccacagcagtgggggctgggagctggaagctatcaaagctcgagtcagggagatggaggaagaagctgagaagctaaaggagctacagaa

SEQ ID NO: 378863 - DNA, 2395 bp, Homo sapiens
cccacgcgtccgctccctctctccctccctcccagctcctgcaccaggaaacggcccggatcccggcagcggcctgacccggctccacgctggccaggaggatgaaaggccccagctgggggctccttgccaccagtgctgtgtcttaagagctgccatcccggctggccgcccggatggcgaccccagcctcggccccagacacacgggctctggtggcagactttgtaggttataagctgaggcagaagggttatgtctgtggagctggccccggggagggcccagcagctgacccgctgcaccaagccatgcgggcagctggagatgagttcgagacccgcttccggcgcaccttctctgatctggcggctcagctgcatgtgaccccaggctcagcccaacaacgcttcacccaggtctccgatgaactttttcaagggggccccaactggggccgccttgtagccttctttgtctttggggctgcactgtgtgctgagagttgtttccaatctctgggacctctgtacccaaactgaaactctaaattggggccctaactaattttccttttgaggttgtgggcataagtgctgatctagaatacagtctgggtcccacactgtgtctcagtgagactgttgatgccttgagatgaccatttcagatctgaatcccatgggtgtgagggtgatgggtactccaggactggcctatgctgtgttgtgggctttggttcggctttatcaggggccaggcatatgggttctagagtacctaccatgacctagaagcatttatgatttatttgaagccacactgtttgcatgggtgttacttgtctgtacctcagagtctgaggatgttaactttggaactcgcagtcctctagaacagcttcagattatggctttttcttttgaggaagaaattattcactccagatgcatgccctgagccagacctcactgctgcactttccaaggtgctaagattgctgctctccaatgctaactttctgacacagtgctctagaaccctgcctgtggtcctgagcactgatcagcttagctagaccatggttgactcttcttggagattttcacttggtcctagaatgtggcaacgtagttgtgctcgccagaacgtgggaccaaattggcctcaggtgttgagtccagacttctgcttttgagagagggctgcactttttcatggtatttctaggggaggtggtaggctgcatgtgccacttggtcttgttgtgagtatgctgacaccagaaactcagagccagcttgtggcaagcagttggggtggggggtctctgacttgctcaggacaaactaggccagtggttttcaaactgcttggcagagccctgaagtttcctaggggttgcctcaggagtccttggggagatgaagggggtggggagctgagcaggctgggcaatttgccctcaaacagaacagctccccttgtagctgtcttacatattggggttcagggtaagattttatttgcattaaggggtttgctgctgaaaaaaagttggaaaaccactgactagaccatcggctccaaattggagtctgtgcttccttccccaggtatggagcacactcttcaccctaccctctaccacaggacacatatccctgttagcattccccgggacctttagccaagaggagctgcagggaccatggccaggttaccaaaatgccctgctctgaagccttgacacctgggtggaaagagaggctgttttctgaaagggtaaagggcttggtctggattcccagaagcatagcttagatgggaccacagtgggcaattttgacctgtcctgcccttcttagcttgaagggaaaccccagagactcttctgtcagggaaaactagggactctcttctagagccatatagttccttgggattagctcttggccaagaaggctgagtatggttcccaatttttaaatccatttcattttttaaaaaataagggaaataaatgtaattgccatttttcaaagattaagtaggaggagaggggtttcttgctctccagagcccaaagggacaaatagggactttgtttaggccaaggaaggagcggaagtagggcaactcggtcctgcgattattaatcccactccccacttattctagggcacacaaacactattttacttttttaaaatcataaaacggcagaacagatttggttagtttagaagaaaagaaagctctataaatataaatctatattcctgtatttttatttaataatttataaataccaagttcatttgacttttatttttgtgtaatatgtaatgatcgtattaaaaacaataaataaagcccagaagtttaatgagaa

SEQ ID NO: 378864 - DNA, 1601 bp, Homo sapiens
tgctgcatagttgaatgcctgcgtggatgccctttcacgagactgtgagtttttgtgtttctcgcagccagactatgaaatagtactgtgagtttcagtgtcctgtgttcttttcccatcactccttgtatttggtagaaacaggtattttgtgtatattctcagaggcaagtgatagaatggccttggggcgtacggggatccccgtacgcccaaatgctaactttctgacacagtgctctagaaccctgcctgtggtcctgagcactgatcagcttagctagaccatggttgactcttcttggagattttcacttggtcctagaatgtggcaacgtagttgtgctcgccagaacgtgggaccaaattggcctcaggtgttgagtccagacttctgcttttgagagagggctgcactttttcatggtatttctaggggaggtggtaggctgcatgtgccacttggtcttgttgtgagtatgctgacaccagaaactcagagccagcttgtggcaagcagttggggtggggggtctctgacttgctcaggacaaactaggccagtggttttcaaactgcttggcagagccctgaagtttcctaggggttgcctcaggagtccttggggagatgaagggggtggggagctgagcaggctgggcaatttgccctcaaacagaacagctccccttgtagctgtcttacatattggggttcagggtaagattttatttgcattaaggggtttgctgctgaaaaaaagttggaaaaccactgactagaccatcggctccaaattggagtctgtgcttccttccccaggtatggagcacactcttcaccctaccctctaccacaggacacatatccctgttagcattccccgggacctttagccaagaggagctgcagggaccatggccaggttaccaaaatgccctgctctgaagccttgacacctgggtggaaagagaggctgttttctgaaagggtaaagggcttggtctggattcccagaagcatagcttagatgggaccacagtgggcaattttgacctgtcctgcccttcttagcttgaagggaaaccccagagactcttctgtcagggaaaactagggactctcttctagagccatatagttccttgggattagctcttggccaagaaggctgagtatggttcccaatttttaaatccatttcattttttaaaaaataagggaaataaatgtaattgccatttttcaaagattaagtaggaggagaggggtttcttgctctccagagcccaaagggacaaatagggactttgtttaggccaaggaaggagcggaagtagggcaactcggtcctgcgattattaatcccactccccacttattctagggcacacaaacactattttacttttttaaaatcataaaacggcagaacagatttggttagtttagaagaaaagaaagctctataaatataaatctatattcctgtatttttatttaataatttataaataccaagttcatttgacttttatttttgtgtaatatgtaatgatcgtattaaaaacaataaataaagcccagaagtttaatgagaa

SEQ ID NO: 378865 - DNA, 220 bp, Homo sapiens
aataaagcccagaagtttaatgagaaggactgaacagggtttgtgacttctacactgtatagcctggggtcaggacatttccttgatccaatcatctcttcatgaccttgttaaaggcaagaattagaataacagggatttgagaaagtgttgggatcattaagaaaaaaagagtctttcccccatcctcaccccactcctataccagccaaatggtcaa

SEQ ID NO: 378866 - DNA, 308 bp, Homo sapiens
aggagtggatggtggcctacctggagacgcggctggctgactggatccacagcagtgggggctgggtaagaagcttctcaattgccgctctgcacatccttctgcaaagctggtctccagggggaagatgggggctctgattggaggctgaggcagctatgttgggaatgaggtacggggctgagtctccccgtctggatggaattagattgagagatgcctggactctgcactccagggctgccatgcagtcaacactggatgggctcatggtcccaagcagaggacagaatacacacccaaggagt

SEQ ID NO: 378867 - DNA, 3544 bp, Homo sapiens
cccacgcgtccgctccctctctccctccctcccagctcctgcaccaggaaacggcccggatcccggcagcggcctgacccggctccacgctggccaggaggatgaaaggccccagctgggggctccttgccaccagtgctgtgtcttaagagctgccatcccggctggccgcccggatggcgaccccagcctcggccccagacacacgggctctggtggcagactttgtaggttataagctgaggcagaagggttatgtctgtggagctggccccggggagggcccagcagctgacccgctgcaccaagccatgcgggcagctggagatgagttcgagacccgcttccggcgcaccttctctgatctggcggctcagctgcatgtgaccccaggctcagcccaacaacgcttcacccaggtctccgatgaactttttcaagggggccccaactggggccgccttgtagccttctttgtctttggggctgcactgtgtgctgagagtgtcaacaaggagatggaaccactggtgggacaagtgcaggagtggatggtggcctacctggagacgcggctggctgactggatccacagcagtgggggctgggcggagttcacagctctatacggggacggggccctggaggaggcgcggcgtctgcgggaggggaactgggcatcagtgaggacagtgctgacgggggccgtggcactgggggccctggtaactgtaggggccttttttgctagcaagtgaaagtccagggccaggtggggctaggtgtggctgggggccaggagagcaggaacagaacagagaaatgcccttggaagaagtggagttggtggatgggtgggcatggaacaggatgggcagagaaagggtagtgtgtgagggagctgagtaggccaggtaggcgattggaagagtgagcaggacacagaggggaggggaatgttttggcaagtttaggggcacaggagatgtagtcgttccagggctgggggaggtgggagggatcacgcctataggtgtgggcacatgaaacgacctggaacttgcttcacagccctgaggaaggtggacttacataagcagctgtattccattagatgagtgggatttagggaacgcagaaggcacatccctttggaatggaagcttaggggttctcaggtgatagggagaggtggctgttaacagtgggctgcttggacacgcgtgtgcatgtgcacgcatgctggtgtgcatgctgggctgcctggcaaatctggtggtggtgggattcctcaaggagaaaacattccctcttgcaatggcaagaactaggggcagttctctgtccctcctcccaacccctcctttcccctgcccttgtcctgatgcctcaaggcttagagagaaacattgtatccagaccgagggctctgctgcttctttccagaaagtgattggcaaggctttggagagaagagcagttctgcagctggccttgttccttcatcatcccccttccttgtgcattatgcacttgctgctgcctcctgggctctgatagaagggcagggctgttgagcctggatgggtggaggcttaggtagccggacctgcctgccaccctcctctcccactcaggcacaatggtgcctaaagtgtttccaatctctgggacctctgtacccaaactgaaactctaaattggggccctaactaattttccttttgaggttgtgggcataagtgctgatctagaatacagtctgggtcccacactgtgtctcagtgagactgttgatgccttgagatgaccatttcagatctgaatcccatgggtgtgagggtgatgggtactccaggactggcctatgctgtgttgtgggctttggttcggctttatcaggggccaggcatatgggttctagagtacctaccatgacctagaagcatttatgatttatttgaagccacactgtttgcatgggtgttacttgtctgtacctcagagtctgaggatgttaactttggaactcgcagtcctctagaacagcttcagattatggctttttcttttgaggaagaaattattcactccagatgcatgccctgagccagacctcactgctgcactttccaaggtgctaagattgctgctctccaatgctaactttctgacacagtgctctagaaccctgcctgtggtcctgagcactgatcagcttagctagaccatggttgactcttcttggagattttcacttggtcctagaatgtggcaacgtagttgtgctcgccagaacgtgggaccaaattggcctcaggtgttgagtccagacttctgcttttgagagagggctgcactttttcatggtatttctaggggaggtggtaggctgcatgtgccacttggtcttgttgtgagtatgctgacaccagaaactcagagccagcttgtggcaagcagttggggtggggggtctctgacttgctcaggacaaactaggccagtggttttcaaactgcttggcagagccctgaagtttcctaggggttgcctcaggagtccttggggagatgaagggggtggggagctgagcaggctgggcaatttgccctcaaacagaacagctccccttgtagctgtcttacatattggggttcagggtaagattttatttgcattaaggggtttgctgctgaaaaaaagttggaaaaccactgactagaccatcggctccaaattggagtctgtgcttccttccccaggtatggagcacactcttcaccctaccctctaccacaggacacatatccctgttagcattccccgggacctttagccaagaggagctgcagggaccatggccaggttaccaaaatgccctgctctgaagccttgacacctgggtggaaagagaggctgttttctgaaagggtaaagggcttggtctggattcccagaagcatagcttagatgggaccacagtgggcaattttgacctgtcctgcccttcttagcttgaagggaaaccccagagactcttctgtcagggaaaactagggactctcttctagagccatatagttccttgggattagctcttggccaagaaggctgagtatggttcccaatttttaaatccatttcattttttaaaaaataagggaaataaatgtaattgccatttttcaaagattaagtaggaggagaggggtttcttgctctccagagcccaaagggacaaatagggactttgtttaggccaaggaaggagcggaagtagggcaactcggtcctgcgattattaatcccactccccacttattctagggcacacaaacactattttacttttttaaaatcataaaacggcagaacagatttggttagtttagaagaaaagaaagctctataaatataaatctatattcctgtatttttatttaataatttataaataccaagttcatttgacttttatttttgtgtaatatgtaatgatcgtattaaaaacaataaataaagcccagaagtttaatgagaa

SEQ ID NO: 378868 - DNA, 3516 bp, Homo sapiens
cccgcctgacccggctccacgctggctttcatcctcctggcagcgtggagccggctccacgctggccaggaggatgaaaggccccagctgggggctccttgccaccagtgctgtgtcttaagagctgccatcccggctggccgcccggatggcgaccccagcctcggccccagacacacgggctctggtggcagactttgtaggttataagctgaggcagaagggttatgtctgtggagctggccccggggagggcccagcagctgacccgctgcaccaagccatgcgggcagctggagatgagttcgagacccgcttccggcgcaccttctctgatctggcggctcagctgcatgtgaccccaggctcagcccaacaacgcttcacccaggtctccgatgaactttttcaagggggccccaactggggccgccttgtagccttctttgtctttggggctgcactgtgtgctgagagtgtcaacaaggagatggaaccactggtgggacaagtgcaggagtggatggtggcctacctggagacgcggctggctgactggatccacagcagtgggggctgggcggagttcacagctctatacggggacggggccctggaggaggcgcggcgtctgcgggaggggaactgggcatcagtgaggacagtgctgacgggggccgtggcactgggggccctggtaactgtaggggccttttttgctagcaagtgaaagtccagggccaggtggggctaggtgtggctgggggccaggagagcaggaacagaacagagaaatgcccttggaagaagtggagttggtggatgggtgggcatggaacaggatgggcagagaaagggtagtgtgtgagggagctgagtaggccaggtaggcgattggaagagtgagcaggacacagaggggaggggaatgttttggcaagtttaggggcacaggagatgtagtcgttccagggctgggggaggtgggagggatcacgcctataggtgtgggcacatgaaacgacctggaacttgcttcacagccctgaggaaggtggacttacataagcagctgtattccattagatgagtgggatttagggaacgcagaaggcacatccctttggaatggaagcttaggggttctcaggtgatagggagaggtggctgttaacagtgggctgcttggacacgcgtgtgcatgtgcacgcatgctggtgtgcatgctgggctgcctggcaaatctggtggtggtgggattcctcaaggagaaaacattccctcttgcaatggcaagaactaggggcagttctctgtccctcctcccaacccctcctttcccctgcccttgtcctgatgcctcaaggcttagagagaaacattgtatccagaccgagggctctgctgcttctttccagaaagtgattggcaaggctttggagagaagagcagttctgcagctggccttgttccttcatcatcccccttccttgtgcattatgcacttgctgctgcctcctgggctctgatagaagggcagggctgttgagcctggatgggtggaggcttaggtagccggacctgcctgccaccctcctctcccactcaggcacaatggtgcctaaagtgtttccaatctctgggacctctgtacccaaactgaaactctaaattggggccctaactaattttccttttgaggttgtgggcataagtgctgatctagaatacagtctgggtcccacactgtgtctcagtgagactgttgatgccttgagatgaccatttcagatctgaatcccatgggtgtgagggtgatgggtactccaggactggcctatgctgtgttgtgggctttggttcggctttatcaggggccaggcatatgggttctagagtacctaccatgacctagaagcatttatgatttatttgaagccacactgtttgcatgggtgttacttgtctgtacctcagagtctgaggatgttaactttggaactcgcagtcctctagaacagcttcagattatggctttttcttttgaggaagaaattattcactccagatgcatgccctgagccagacctcactgctgcactttccaaggtgctaagattgctgctctccaatgctaactttctgacacagtgctctagaaccctgcctgtggtcctgagcactgatcagcttagctagaccatggttgactcttcttggagattttcacttggtcctagaatgtggcaacgtagttgtgctcgccagaacgtgggaccaaattggcctcaggtgttgagtccagacttctgcttttgagagagggctgcactttttcatggtatttctaggggaggtggtaggctgcatgtgccacttggtcttgttgtgagtatgctgacaccagaaactcagagccagcttgtggcaagcagttggggtggggggtctctgacttgctcaggacaaactaggccagtggttttcaaactgcttggcagagccctgaagtttcctaggggttgcctcaggagtccttggggagatgaagggggtggggagctgagcaggctgggcaatttgccctcaaacagaacagctccccttgtagctgtcttacatattggggttcagggtaagattttatttgcattaaggggtttgctgctgaaaaaaagttggaaaaccactgactagaccatcggctccaaattggagtctgtgcttccttccccaggtatggagcacactcttcaccctaccctctaccacaggacacatatccctgttagcattccccgggacctttagccaagaggagctgcagggaccatggccaggttaccaaaatgccctgctctgaagccttgacacctgggtggaaagagaggctgttttctgaaagggtaaagggcttggtctggattcccagaagcatagcttagatgggaccacagtgggcaattttgacctgtcctgcccttcttagcttgaagggaaaccccagagactcttctgtcagggaaaactagggactctcttctagagccatatagttccttgggattagctcttggccaagaaggctgagtatggttcccaatttttaaatccatttcattttttaaaaaataagggaaataaatgtaattgccatttttcaaagattaagtaggaggagaggggtttcttgctctccagagcccaaagggacaaatagggactttgtttaggccaaggaaggagcggaagtagggcaactcggtcctgcgattattaatcccactccccacttattctagggcacacaaacactattttacttttttaaaatcataaaacggcagaacagatttggttagtttagaagaaaagaaagctctataaatataaatctatattcctgtatttttatttaataatttataaataccaagttcatttgacttttatttttgtgtaatatgtaatgatcgtattaaaaacaataaataaagcccagaagtttaatgagaa

SEQ ID NO: 378869 - DNA, 2855 bp, Homo sapiens
cccacgcgtccgctccctctctccctccctcccagctcctgcaccaggaaacggcccggatcccggcagcggcctgacccggctccacgctggccaggaggatgaaaggccccagctgggggctccttgccaccagtgctgtgtcttaagagctgccatcccggctggccgcccggatggcgaccccagcctcggccccagacacacgggctctggtggcagactttgtaggttataagctgaggcagaagggttatgtctgtggagctggccccggggagggcccagcagctgacccgctgcaccaagccatgcgggcagctggagatgagttcgagacccgcttccggcgcaccttctctgatctggcggctcagctgcatgtgaccccaggctcagcccaacaacgcttcacccaggtctccgatgaactttttcaagggggccccaactggggccgccttgtagccttctttgtctttggggctgcactgtgtgctgagagtgtcaacaaggagatggaaccactggtgggacaagtgcaggagtggatggtggcctacctggagacgcggctggctgactggatccacagcagtgggggctgggcggagttcacagctctatacggggacggggccctggaggaggcgcggcgtctgcgggaggggaactgggcatcagtgaggacagtgctgacgggggccgtggcactgggggccctggtaactgtaggggccttttttgctagcaagtgaaagtccagggccaggtggggctaggtgtggctgggggccaggagagcaggaacagaacagagaaatgcccttggaagaagtggagttggtggatgggtgggcatggaacaggatgggcagagaaagggtagtgtgtgagggagctgagtaggccaggtaggcgattggaagagtgagcaggacacagaggggaggggaatgttttggcaagtttaggggcacaggagatgtagtcgttccagggctgggggaggtgggagggatcacgcctataggtgtgggcacatgaaacgacctggaacttgcttcacagccctgaggaaggtggacttacataagcagctgtattccattagatgagtgggatttagggaacgcagaaggcacatccctttggaatggaagcttaggggttctcaggtgatagggagaggtggctgttaacagtgggctgcttggacacgcgtgtgcatgtgcacgcatgctggtgtgcatgctgggctgcctggcaaatctggtggtggtgggattcctcaaggagaaaacattccctcttgcaatggcaagaactaggggcagttctctgtccctcctcccaacccctcctttcccctgcccttgtcctgatgcctcaaggcttagagagaaacattgtatccagaccgagggctctgctgcttctttccagaaagtgattggcaaggctttggagagaagagcagttctgcagctggccttgttccttcatcatcccccttccttgtgcattatgcacttgctgctgcctcctgggctctgatagaagggcagggctgttgagcctggatgggtggaggcttaggtagccggacctgcctgccaccctcctctcccactcaggcacaatggtgcctaaagtgtttccaatctctgggacctctgtacccaaactgaaactctaaattggggccctaactaattttccttttgaggttgtgggcataagtgctgatctagaatacagtctgggtcccacactgtgtctcagtgagactgttgatgccttgagatgaccatttcagatctgaatcccatgggtgtgagggtgatgggtactccaggactggcctatgctgtgttgtgggctttggttcggctttatcaggggccaggcatatgggttctagagtacctaccatgacctagaagcatttatgatttatttgaagccacactgtttgcatgggtgttacttgtctgtacctcagagtctgaggatgttaactttggaactcgcagtcctctagaacagcttcagattatggctttttcttttgaggaagaaattattcactccagatgcatgccctgagccagacctcactgctgcactttccaaggtgctaagattgctgctctccaatgctaactttctgacacagtgctctagaaccctgcctgtggtcctgagcactgatcagcttagctagaccatggttgactcttcttggagattttcacttggtcctagaatgtggcaacgtagttgtgctcgccagaacgtgggaccaaattggcctcaggtgttgagtccagacttctgcttttgagagagggctgcactttttcatggtatttctaggggaggtggtaggctgcatgtgccacttggtcttgttgtgagtatgctgacaccagaaactcagagccagcttgtggcaagcagttggggtggggggtctctgacttgctcaggacaaactaggccagtggttttcaaactgcttggcagagccctgaagtttcctaggggttgcctcaggagtccttggggagatgaagggggtggggagctgagcaggctgggcaatttgccctcaaacagaacagctccccttgtagctgtcttacatattggggttcagggtaagattttatttgcattaaggggtttgctgctgaaaaaaagttggaaaaccactgactagaccatcggctccaaattggagtctgtgcttccttccccaggtatggagcacactcttcaccctaccctctaccacaggacacttgcatccagaggacacttggcatccagaggacactttgcatccagag

SEQ ID NO: 378870 - DNA, 957 bp, Homo sapiens
actctgaggatcccccgatccgtgcgcgcaccctctcccctcgtccaccgctgccgcctccttcttctgccgctcctggtgctgcttgtgtgctcgtttggtgcggacctggtacctcttttgtgaagcggcagctgaggagactccggcgctcgccatggccgacgaaaagcccaaggaaggagtcaagactgagaacaacgatcatattaatttgaaggtggcggggcaggatggttctgtggtgcagtttaagattaagaggcatacaccacttagtaaactaatgaaagcctattgtgaacgacagggattgtcaatgaggcagatcagattccgatttgacgggcaaccaatcaatgaaacagacacacctgcacagttggaaatggaggatgaagatacaattgatgtgttccaacagcagacgggaggtgtctactgaaaagggaacctgcttctttactccagaactctgttctttaaagaccaagattacattctcaattagaaaactgcaatttggttccaccacatcctgactactaccgtatagttttctctattctttcatttcccccttccccattcctttattgtacataaagtaactggtatatgtgcacaagcatattgcattttttttttttttaactaaacagccaatggtatgttttgattgacatcaagtggagacgggatggggaaaaatactgattctgtgaaaataccccctttctccattagtggcatgctcattcagctcttatctttatattccagtaagttattttgctctcactgttttaacaccagacataagacagcgacgttaaactcttggaatccggtcacatgcaaacattagtctgtcattaccctgatcaccccggcagttttacttctgaccaggcccttgggacacgctcagaggaaattcccacacagacccatatt

SEQ ID NO: 378871 - DNA, 1064 bp, Homo sapiens
cgcgcacgcagggtggggggagggagcgcacgacgtgcgcgcaccctctcccctcgtccaccgctgccgcctccttcttctgccgctcctggtgctgcttgtgtgctcgtttggtgcggacctggtacctcttttgtgaagcggcagctgaggagactccggcgctcgccatggccgacgaaaagcccaaggaaggagtcaagactgagaacaacgatcatattaatttgaaggtggcggggcaggatggttctgtggtgcagtttaagattaagaggcatacaccacttagtaaactaatgaaagcctattgtgaacgacagggattgtcaatgaggcagatcagattccgatttgacgggcaaccaatcaatgaaacagacacacctgcacagttggaaatggaggatgaagatacaattgatgtgttccaacagcagacgggaggtgtctactgaaaagggaacctgcttctttactccagaactctgttctttaaagaccaagattacattctcaattagaaaactgcaatttggttccaccacatcctgactactaccgtatagttttctctattctttcatttcccccttccccattcctttattgtacataaagtaactggtatatgtgcacaagcatattgcattttttttttttttaactaaacagccaatggtatgttttgattgacatcaagtggagacgggatggggaaaaatactgattctgtgaaaataccccctttctccattagtggcatgctcattcagctcttatctttatattccagtaagttattttgctctcactgttttaacaaaaaaaaaaaacaacaacataaaaatccttgcataccttgttcaattggagaattttaatgtttttcatttatcattgtaaaaccaaggacaattttataacttttttgtacgtagctgttacatgtagggcaatctgtctttaagtagggataaattactctaaaacaaaaaagaatcctagatagttttcccttcaagtcaagcgtcttgttgtttaaataaacttcttgtttaaaa

SEQ ID NO: 378872 - DNA, 1095 bp, Homo sapiens
tccccagagacacgccatacgatcggagacactcccggacgcctagcacgcacaggggccagttcgtgcgcgcaccctctcccctcgtccaccgctgccgcctccttcttctgccgctcctggtgctgcttgtgtgctcgtttggtgcggacctggtacctcttttgtgaagcggcagctgaggagactccggcgctcgccatggccgacgaaaagcccaaggaaggagtcaagactgagaacaacgatcatattaatttgaaggtggcggggcaggatggttctgtggtgcagtttaagattaagaggcatacaccacttagtaaactaatgaaagcctattgtgaacgacagggattgtcaatgaggcagatcagattccgatttgacgggcaaccaatcaatgaaacagacacacctgcacagttggaaatggaggatgaagatacaattgatgtgttccaacagcagacgggaggtgtctactgaaaagggaacctgcttctttactccagaactctgttctttaaagaccaagattacattctcaattagaaaactgcaatttggttccaccacatcctgactactaccgtatagttttctctattctttcatttcccccttccccattcctttattgtacataaagtaactggtatatgtgcacaagcatattgcattttttttttttttaactaaacagccaatggtatgttttgattgacatcaagtggagacgggatggggaaaaatactgattctgtgaaaataccccctttctccattagtggcatgctcattcagctcttatctttatattccagtaagttattttgctctcactgttttaacaaaaaaaaaaaacaacaacataaaaatccttgcataccttgttcaattggagaattttaatgtttttcatttatcattgtaaaaccaaggacaattttataacttttttgtacgtagctgttacatgtagggcaatctgtctttaagtagggataaattactctaaaacaaaaaagaatcctagatagttttcccttcaagtcaagcgtcttgttgtttaaataaacttcttgtttaaaa

SEQ ID NO: 378873 - DNA, 1117 bp, Homo sapiens
  misc_feature (1093)..(1093): n is a, c, g, or t
  misc_feature (1100)..(1100): n is a, c, g, or t
cgcgcacgcagggtggggggagggagcgcacgacgtgcgcgcaccctctcccctcgtccaccgctgccgcctccttcttctgccgctcctggtgctgcttgtgtgctcgtttggtgcggacctggtacctcttttgtgaagcggcagctgaggagactccggcgctcgccatggccgacgaaaagcccaaggaaggagtcaagactgagaacaacgatcatattaatttgaaggtggcggggcaggatggttctgtggtgcagtttaagattaagaggcatacaccacttagtaaactaatgaaagcctattgtgaacgacagggattgtcaatgaggcagatcagattccgatttgacgggcaaccaatcaatgaaacagacacacctgcacagttggaaatggaggatgaagatacaattgatgtgttccaacagcagacgggaggtgtctactgaaaagggaacctgcttctttactccagaactctgttctttaaagaccaagattacattctcaattagaaaactgcaatttggttccaccacatcctgactactaccgtatagttttctctattctttcatttcccccttccccattcctttattgtacataaagtaactggtatatgtgcacaagcatattgcattttttttttttttaactaaacagccaatggtatgttttgattgacatcaagtggagacgggatggggaaaaatactgattctgtgaaaataccccctttctccattagtggcatgctcattcagctcttatctttatattccagtaagttattttgctctcactgttttaacaaaaaaaaaaaacaacaacataaaaatccttgcataccttgttcaattggagaattttaatgtttttcatttatcattgtaaaaccaaggacaattttataacttttttgtacgtagctgttacatgtagggcaatctgtctttaagtagggataaattactctaaaacaaaaaagaatcctagatagttttcccttcaagtcaagcgtcttgttgtttaaataaacttcttgtttaaaaaaaactggcgcgtttacacgcgtgactgncctgggntcccactttcgcttgag

SEQ ID NO: 378874 - DNA, 970 bp, Homo sapiens
cgcgcacgcagggtggggggagggagcgcacgacgtgcgcgcaccctctcccctcgtccaccgctgccgcctccttcttctgccgctcctggtgctgcttgtgtgctcgtttggtgcggacctggtacctcttttgtgaagcggcagctgaggagactccggcgctcgccatggccgacgaaaagcccaaggaaggagtcaagactgagaacaacgatcatattaatttgaaggtggcggggcaggatggttctgtggtgcagtttaagattaagaggcatacaccacttagtaaactaatgaaagcctattgtgaacgacagggattgtcaatgaggcagatcagattccgatttgacgggcaaccaatcaatgaaacagacacacctgcacagttggaaatggaggatgaagatacaattgatgtgttccaacagcagacgggaggtgtctactgaaaagggaacctgcttctttactccagaactctgttctttaaagaccaagattacattctcaattagaaaactgcaatttggttccaccacatcctgactactaccgtatagttttctctattctttcatttcccccttccccattcctttattgtacataaagtaactggtatatgtgcacaagcatattgcattttttttttttttaactaaacagccaatggtatgttttgattgacatcaagtggagacgggatggggaaaaatactgattctgtgaaaataccccctttctccattagtggcatgctcattcagctcttatctttatattccagtaagttattttgctctcactgttttaacaccagacataagacagcgacgttaaactcttggaatccggtcacatgcaaacattagtctgtcattaccctgatcaccccggcagttttacttctgaccaggcccttgggacacgctcagaggaaattcccacacagacccatatt

SEQ ID NO: 378875 - DNA, 908 bp, Homo sapiens
  misc_feature (892)..(892): n is a, c, g, or t
cgcgcacgcagggtggggggagggagcgcacgacgtgcgcgcaccctctcccctcgtccaccgctgccgcctccttcttctgccgctcctggtgctgcttgtgtgctcgtttggtgcggacctggtacctcttttgtgaagcggcagctgaggagactccggcgctcgccatggccgacgaaaagcccaaggaaggagtcaagactgagaacaacgatcatattaatttgaaggtggcggggcaggatggttctgtggtgcagtttaagattaagaggcatacaccacttagtaaactaatgaaagcctattgtgaacgacagggattgtcaatgaggcagatcagattccgatttgacgggcaaccaatcaatgaaacagacacacctgcacagttggaaatggaggatgaagatacaattgatgtgttccaacagcagacgggaggtgtctactgaaaagggaacctgcttctttactccagaactctgttctttaaagaccaagattacattctcaattagaaaactgcaatttggttccaccacatcctgactactaccgtatagttttctctattctttcatttcccccttccccattcctttattgtacataaagtaactggtatatgtgcacaagcatattgcattttttttttttttaactaaacagccaatggtatgttttgattgacatcaagtggagacgggatggggaaaaatactgattctgtgaaaataccccctttctccattagtggcatgctcattcagctcttatctttatattccagtaagttattttgctctcactgttttaactttgttctcaattattacttgtaaaccaaggcctcttatttatcttttttgaccgaaggtctcactgntaggcaaaccgtacct

SEQ ID NO: 378876 - DNA, 1054 bp, Homo sapiens
tatgaatcgacggttctcaccaagaagtatgtgttctggtggctaagataatgatttctgtcctggcttctgccgctcctggtgctgcttgtgtgctcgtttggtgcggacctggtacctcttttgtgaagcggcagctgaggagactccggcgctcgccatggccgacgaaaagcccaaggaaggagtcaagactgagaacaacgatcatattaatttgaaggtggcggggcaggatggttctgtggtgcagtttaagattaagaggcatacaccacttagtaaactaatgaaagcctattgtgaacgacagggattgtcaatgaggcagatcagattccgatttgacgggcaaccaatcaatgaaacagacacacctgcacagttggaaatggaggatgaagatacaattgatgtgttccaacagcagacgggaggtgtctactgaaaagggaacctgcttctttactccagaactctgttctttaaagaccaagattacattctcaattagaaaactgcaatttggttccaccacatcctgactactaccgtatagttttctctattctttcatttcccccttccccattcctttattgtacataaagtaactggtatatgtgcacaagcatattgcattttttttttttttaactaaacagccaatggtatgttttgattgacatcaagtggagacgggatggggaaaaatactgattctgtgaaaataccccctttctccattagtggcatgctcattcagctcttatctttatattccagtaagttattttgctctcactgttttaacaaaaaaaaaaaacaacaacataaaaatccttgcataccttgttcaattggagaattttaatgtttttcatttatcattgtaaaaccaaggacaattttataacttttttgtacgtagctgttacatgtagggcaatctgtctttaagtagggataaattactctaaaacaaaaaagaatcctagatagttttcccttcaagtcaagcgtcttgttgtttaaataaacttcttgtttaaaa

SEQ ID NO: 378877 - DNA, 977 bp, Homo sapiens
  misc_feature (665)..(665): n is a, c, g, or t
cgcgcacgcagggtggggggagggagcgcacgacgtgcgcgcaccctctcccctcgtccaccgctgccgcctccttcttctgccgctcctggtgctgcttgtgtgctcgtttggtgcggacctggtacctcttttgtgaagcggcagctgaggagactccggcgctcgccatggccgacgaaaagcccaaggaaggagtcaagactgagaacaacgatcatattaatttgaaggtggcggggcaggatggttctgtggtgcagtttaagattaagaggcatacaccacttagtaaactaatgaaagcctattgtgaacgacagggattgtcaatgaggcagatcagattccgatttgacgggcaaccaatcaatgaaacagacacacctgcacagttggaaatggaggatgaagatacaattgatgtgttccaacagcagacgggaggtgtctactgaaaagggaacctgcttctttactccagaactctgttctttaaagaccaagattacattctcaattagaaaactgcaatttggttccaccacatcctgactactaccgtatagttttctctattctttcatttcccccttccccattcctttattgtacataaagtaactggtatatgtgcacaagcatattgcattttttttttactnaggcctggtatgtttgggtggcctccagtggcgcgcggtgcggacacatcctgttctgtgagagattccccttgtccatagtgctggcctcagtcttttttttccccgacgtattggctcctgtttccagaccagcaccccttaattctgctccttgcctcggcgactccgtcgctctctttgtgaccggcagcttacttggcgcgcaggggggtgtgcgggcgtcccaccatgtccttccggctcttggttgcgcaaaaaagcgtgcttctcggctgggtcgtttcccgctgtcgcctggtacgtcgcgta

SEQ ID NO: 378878 - DNA, 892 bp, Homo sapiens
  misc_feature (664)..(664): n is a, c, g, or t
cgcgcacgcagggtggggggagggagcgcacgacgtgcgcgcaccctctcccctcgtccaccgctgccgcctccttcttctgccgctcctggtgctgcttgtgtgctcgtttggtgcggacctggtacctcttttgtgaagcggcagctgaggagactccggcgctcgccatggccgacgaaaagcccaaggaaggagtcaagactgagaacaacgatcatattaatttgaaggtggcggggcaggatggttctgtggtgcagtttaagattaagaggcatacaccacttagtaaactaatgaaagcctattgtgaacgacagggattgtcaatgaggcagatcagattccgatttgacgggcaaccaatcaatgaaacagacacacctgcacagttggaaatggaggatgaagatacaattgatgtgttccaacagcagacgggaggtgtctactgaaaagggaacctgcttctttactccagaactctgttctttaaagaccaagattacattctcaattagaaaactgcaatttggttccaccacatcctgactactaccgtatagttttctctattctttcatttcccccttccccattcctttattgtacataaagtaactggtatatgtgcacaagcatattgcattttttttttggnggggagacagtttggctcttgtctcccgggtgggagtgcgggggaatgatctcaattctcaactcatggaaacctcggcctccgggatattcttgcctcagcctcgggggtagctggaataaaaagcaccaaaccacgcccagttattttgggtatctcgggaagagaggggagtacaccatgtgggccaggctagtctcgaattcatgacctcaattgatccgccca

SEQ ID NO: 378879 - DNA, 1028 bp, Homo sapiens
cgacccagaacgcttcagttctgctctgcaaggatatataataactgattggtgtgcccgtttaataaaagaatatggaaactgaacagccagaagaaaccttccctaacactgaaaccaatggtgaatttggtaaacgccctgcagaagatatggaaggagtcaagactgagaacaacgatcatattaatttgaaggtggcggggcaggatggttctgtggtgcagtttaagattaagaggcatacaccacttagtaaactaatgaaagcctattgtgaacgacagggattgtcaatgaggcagatcagattccgatttgacgggcaaccaatcaatgaaacagacacacctgcacagttggaaatggaggatgaagatacaattgatgtgttccaacagcagacgggaggtgtctactgaaaagggaacctgcttctttactccagaactctgttctttaaagaccaagattacattctcaattagaaaactgcaatttggttccaccacatcctgactactaccgtatagttttctctattctttcatttcccccttccccattcctttattgtacataaagtaactggtatatgtgcacaagcatattgcattttttttttttttaactaaacagccaatggtatgttttgattgacatcaagtggagacgggatggggaaaaatactgattctgtgaaaataccccctttctccattagtggcatgctcattcagctcttatctttatattccagtaagttattttgctctcactgttttaacaaaaaaaaaaaacaacaacataaaaatccttgcataccttgttcaattggagaattttaatgtttttcatttatcattgtaaaaccaaggacaattttataacttttttgtacgtagctgttacatgtagggcaatctgtctttaagtagggataaattactctaaaacaaaaaagaatcctagatagttttcccttcaagtcaagcgtcttgttgtttaaataaacttcttgtttaaaa

SEQ ID NO: 378880 - DNA, 1022 bp, Homo sapiens
cgcgcacgcagggtggggggagggagcgcacgacgtgcgcgcaccctctcccctcgtccaccgctgccgcctccttcttctgccgctcctggtgctgcttgtgtgctcgtttggtgcggacctggtacctcttttgtgaagcggcagctgaggagactccggcgctcgccatggccgacgaaaagcccaaggtggcggggcaggatggttctgtggtgcagtttaagattaagaggcatacaccacttagtaaactaatgaaagcctattgtgaacgacagggattgtcaatgaggcagatcagattccgatttgacgggcaaccaatcaatgaaacagacacacctgcacagttggaaatggaggatgaagatacaattgatgtgttccaacagcagacgggaggtgtctactgaaaagggaacctgcttctttactccagaactctgttctttaaagaccaagattacattctcaattagaaaactgcaatttggttccaccacatcctgactactaccgtatagttttctctattctttcatttcccccttccccattcctttattgtacataaagtaactggtatatgtgcacaagcatattgcattttttttttttttaactaaacagccaatggtatgttttgattgacatcaagtggagacgggatggggaaaaatactgattctgtgaaaataccccctttctccattagtggcatgctcattcagctcttatctttatattccagtaagttattttgctctcactgttttaacaaaaaaaaaaaacaacaacataaaaatccttgcataccttgttcaattggagaattttaatgtttttcatttatcattgtaaaaccaaggacaattttataacttttttgtacgtagctgttacatgtagggcaatctgtctttaagtagggataaattactctaaaacaaaaaagaatcctagatagttttcccttcaagtcaagcgtcttgttgtttaaataaacttcttgtttaaaa

SEQ ID NO: 378881 - DNA, 1009 bp, Homo sapiens
cgcgcacgcagggtggggggagggagcgcacgacgtgcgcgcaccctctcccctcgtccaccgctgccgcctccttcttctgccgctcctggtgctgcttgtgtgctcgtttggtgcggacctggtacctcttttgtgaagcggcagctgaggagactccggcgctcgccatggccgacgaaaagcccaaggaaggagtcaagactgagaacaacgatcatattaatttgaaggtggcggggcaggatggttctgtggtgcagtttaagattaagaggcatacaccacttagtaaactaatgaaagcctattgtgaacgacagggattgtcaatgaggcagatcagattccgatttgacgggcaaccaatcaatgaaacagacacacctgcacagttggaaatggaggatgaagatacaattgatgtgttccaacagcagacgggaggtgtctactgaaaagggaacctgcttctttactccagaactctgttctttaaagaccaagattacattctcaattagtctttcatttcccccttccccattcctttattgtacataaagtaactggtatatgtgcacaagcatattgcattttttttttttttaactaaacagccaatggtatgttttgattgacatcaagtggagacgggatggggaaaaatactgattctgtgaaaataccccctttctccattagtggcatgctcattcagctcttatctttatattccagtaagttattttgctctcactgttttaacaaaaaaaaaaaacaacaacataaaaatccttgcataccttgttcaattggagaattttaatgtttttcatttatcattgtaaaaccaaggacaattttataacttttttgtacgtagctgttacatgtagggcaatctgtctttaagtagggataaattactctaaaacaaaaaagaatcctagatagttttcccttcaagtcaagcgtcttgttgtttaaataaacttcttgtttaaaa

SEQ ID NO: 378882 - DNA, 742 bp, Homo sapiens
tgtgcaagccgggcgagtcgcgacgtgtatcctccatttccaaccaatcaatgaaacagacacacctgcagagttggaaatggaggatgaagatacaattgatgtgttccaacagcagacgggaggtgtctactgaaaagggaacctgcttctttactccagaactctgttctttaaagaccaagattacattctcaattagaaaactgcaatttggttccaccacatcctgactactaccgtatagttttctctattctttcatttcccccttccccattcctttattgtacataaagtaactggtatatgtgcacaagcatattgcattttttttttttttaactaaacagccaatggtatgttttgattgacatcaagtggagacgggatggggaaaaatactgattctgtgaaaataccccctttctccattagtggcatgctcattcagctcttatctttatattccagtaagttattttgctctcactgttttaacaaaaaaaaaaaacaacaacataaaaatccttgcataccttgttcaattggagaattttaatgtttttcatttatcattgtaaaaccaaggacaattttataacttttttgtacgtagctgttacatgtagggcaatctgtctttaagtagggataaattactctaaaacaaaaaagaatcctagatagttttcccttcaagtcaagcgtcttgttgtttaaataaacttcttgtttaaaa

SEQ ID NO: 378883 - DNA, 1051 bp, Homo sapiens
actctgaggatcccccgatccgtgcgcgcaccctctcccctcgtccaccgctgccgcctccttcttctgccgctcctggtgctgcttgtgtgctcgtttggtgcggacctggtacctcttttgtgaagcggcagctgaggagactccggcgctcgccatggccgacgaaaagcccaaggaaggagtcaagactgagaacaacgatcatattaatttgaaggtggcggggcaggatggttctgtggtgcagtttaagattaagaggcatacaccacttagtaaactaatgaaagcctattgtgaacgacagggattgtcaatgaggcagatcagattccgatttgacgggcaaccaatcaatgaaacagacacacctgcacagttggaaatggaggatgaagatacaattgatgtgttccaacagcagacgggaggtgtctactgaaaagggaacctgcttctttactccagaactctgttctttaaagaccaagattacattctcaattagaaaactgcaatttggttccaccacatcctgactactaccgtatagttttctctattctttcatttcccccttccccattcctttattgtacataaagtaactggtatatgtgcacaagcatattgcattttttttttttttaactaaacagccaatggtatgttttgattgacatcaagtggagacgggatggggaaaaatactgattctgtgaaaataccccctttctccattagtggcatgctcattcagctcttatctttatattccagtaagttattttgctctcactgttttaacaaaaaaaaaaaacaacaacataaaaatccttgcataccttgttcaattggagaattttaatgtttttcatttatcattgtaaaaccaaggacaattttataacttttttgtacgtagctgttacatgtagggcaatctgtctttaagtagggataaattactctaaaacaaaaaagaatcctagatagttttcccttcaagtcaagcgtcttgttgtttaaataaacttcttgtttaaaa

SEQ ID NO: 378884 - DNA, 1488 bp, Homo sapiens
cgcgcacgcagggtggggggagggagcgcacgacgtgcgcgcaccctctcccctcgtccaccgctgccgcctccttcttctgccgctcctggtgctgcttgtgtgctcgtttggtgcggacctggtacctcttttgtgaagcggcagctgaggagactccggcgctcgccatggccgacgaaaagcccaaggaaggagtcaagactgagaacaacgatcatattaatttgaaggtggcggggcaggatggttctgtggtgcagtttaagattaagaggcatacaccacttagtaaactaatgaaagcctattgtgaacgacagggattgtcaatgaggcagatcagattccgatttgacgggcaaccaatcaatgaaacagacacacctgcacagttggaaatggaggatgaagatacaattgatgtgttccaacagcagacgggaggtgtctactgaaaagggaacctgcttctttactccagaactctgttctttaaagaccaagattacattctcaattagaaaactgcaatttggttccaccacatcctgactactaccgtatagttttctctattctttcatttcccccttccccattcctttattgtacataaagtaactggtatatgtgcacaagcatattgcattttttttttttttaactaaacagccaatggtatgttttgattgacatcaagtggagacgggatggggaaaaatactgattctgtgaaaataccccctttctccattagtggcatgctcattcagctcttatctttatattccagtaagttattttgctctcactgttttaacaaaaaaaaaaaacaacaacataaaaatccttgcataccttgttcaattggagaattttaatgtttttcatttatcattgtaaaaccaaggacaattttataacttttttgtacgtagctgttacatgtagggcaatctgtctttaagtagggataaattactctaaaacaaaaaagaatcctagatagttttcccttcaagtcaagcgtcttgttgtttaaataaacttcttgtttaaaaaaaatgagctgttttctttattctgagaaatattaaatagaaaattgaggcttagaaaaaacataaataggcctgcttagaagtaacatttcaagaaggaaataaagctacttggtgtttctgacagactgatactgatgccaaacaaagaataacagttttataaatatcaccttgttccaaaagtttctctaggtcccatgttaatatgcaagtatactagcagaaaaattgggccatagtatcgtggatttccaggtattttctgtatattaagtgaggcacggagcatagggtatagggtagcacatgtggcaaggaaaaagttctgattttgcctttgttgctgataaaacactgaaccattctagcctgcacttatcataagtaaatactccctaacctaaaataaagttttcgttcc

SEQ ID NO: 378885 - DNA, 992 bp, Homo sapiens
cgcgcacgcagggtggggggagggagcgcacgacgtgcgcgcaccctctcccctcgtccaccgctgccgcctccttcttctgccgctcctggtgctgcttgtgtgctcgtttggtgcggacctggtacctcttttgtgaagcggcagctgaggagactccggcgctcgccatggccgacgaaaagcccaaggaaggagtcaagactgagaacaacgatcatattaatttgaaggtggcggggcaggatggttctgtggtgcagtttaagattaagaggcatacaccacttagtaaactaatgaaagcctattgtgaacgacagttggaaatggaggatgaagatacaattgatgtgttccaacagcagacgggaggtgtctactgaaaagggaacctgcttctttactccagaactctgttctttaaagaccaagattacattctcaattagaaaactgcaatttggttccaccacatcctgactactaccgtatagttttctctattctttcatttcccccttccccattcctttattgtacataaagtaactggtatatgtgcacaagcatattgcattttttttttttttaactaaacagccaatggtatgttttgattgacatcaagtggagacgggatggggaaaaatactgattctgtgaaaataccccctttctccattagtggcatgctcattcagctcttatctttatattccagtaagttattttgctctcactgttttaacaaaaaaaaaaaacaacaacataaaaatccttgcataccttgttcaattggagaattttaatgtttttcatttatcattgtaaaaccaaggacaattttataacttttttgtacgtagctgttacatgtagggcaatctgtctttaagtagggataaattactctaaaacaaaaaagaatcctagatagttttcccttcaagtcaagcgtcttgttgtttaaataaacttcttgtttaaaa

SEQ ID NO: 378886 - DNA, 907 bp, Homo sapiens
gtgtccaatcttttggcttccctggtctactttggaagaattgtcttgggccacctataaaatacactaacactaaaggtagcggatgcgctaaaaaaaacgaatcacaaaaaaaatctcataatgttataagaaagtgtacaaatttgggttgggctgcattcaaagccgtcctgccacatgcagcccatgggccgcgggttggatgagcttgctgtagattaaagagaaaataagaagtgctgaagcagagaagtcatagagtagatgctagtcatttagggcgaagttagtagttgaagtttatttgttggctcatgtcagtagtggagaagaagagaaagaaagacttaaggaatggcataatggatggagcaaggcctaggacagtctatcaaattgttttactggttgtcacacactgttagatttaatccttctaaagatcatgtgagctaagtatccatagtttacagatgagataactgagactcatgaaaggtttagtaacttgccatggccacgcaagagagtaaagtggtagaactgagattcaaactgcacagtatttataccacactgtacgtcatatactttattgacagactagattttaaagaaaaaattagcttgaagtggtagattgacacatagaactgatagctgttttgaagaactgcaagttttggtaaagttaaagagcttgtagagtgtaagtgggaaaaatggaaagacaaagagattttgatcatagaacaatggctccagagtgatgacatgtgagggaagattaaagtagaaacagggatgaaggttattggagaagccaggatctgctaaaatgttttttttaaaaaagagtgaacagtatggatgtttggatagctagggtggtatcaggagttga

SEQ ID NO: 378887 - DNA, 342 bp, Homo sapiens
ccaaagtgctgggattacaggtgtgagtcattgtgtctggcctaaaaaagacatttttatcatcgtgcctcacctaaaaaagccattcttattagtgctaattttatctccctcaacatatttgtagaatcttagaaacagaaacagtgtcttctattttttggtgtccctatggcacctaaaatatttacatatcttcattgcaaaatgacttaatagcaaaataaagacatacatgctattatatatgcaaatatacattagtataaataaaagtcatggactcctaattttgagacagattaacatagctaaactgaaaagttcattatgcattttcag

SEQ ID NO: 378888 - DNA, 449 bp, Homo sapiens
agattttctcacttgtattacttttatatctctcttagctttgaaagtctatggggaaggcaactttactctccatttaagttggacacagtaaacaatggagggatataaagaatttaaatggaggaggatgggttgcctgagaagtcagacttgtgtatggaattgcaactgactgacaggcatggaagtgaggtgtggcagtggcatgagctctttttggagatttataaggattctgctgtagcatcttcctccgtggatgggatctatttctatgtcctttgatagcagcactagcttggacattcagagggagatgtactagagaatatggagatcacatatgagattccttcatcatcagcctcttgcctctgtcctttgctctgcaagtgtttccttcctgtagtctgaggaataccggtaatgtagggagaaaaaaaaaa

SEQ ID NO: 378889 - DNA, 5200 bp, Homo sapiens
  misc_feature (1930)..(1930): n is a, c, g, or t
  misc_feature (2667)..(2667): n is a, c, g, or t
  misc_feature (4032)..(4032): n is a, c, g, or t
  misc_feature (4246)..(4246): n is a, c, g, or t
  misc_feature (4652)..(4652): n is a, c, g, or t
  misc_feature (4881)..(4881): n is a, c, g, or t
gcctccgacccgggccgactatggcggcgctgcggctcctggcgtcagtgctcgggcgcggggtccccgccggcggctcagggctcgcgctgtcccagggctgcgcccgctgctttgccaccagtccccggccccgtgccaagttctacgcggacccggtggagatggtgaaggacatctctgacggggcgaccgtcatgatcgggggcttcgggctctgcgggatccccgagaacctgatcgccgcgctgctcaggacccgcgtgaaagacctgcaggtggtcagcagcaacgtgggcgtggaggacttcggcctgggcctcctgctggccgccaggcaggtccgtcgcatcgtctgttcctacgtgggcgagaacaccctgtgcgagagccagtacctggcaggagagctggagctggagctcacgccccagggcaccctggccgagcgcatccgcgcggggggcgccggggtgcccgccttctacacccccacgggctacgggaccctggtccaggaagggggcgcccccatccgctacaccccggacggccacctggcgctcatgagccagccccgagaggtgagggagttcaacggcgaccacttccttttggagcgcgccatccgggcagacttcgccctggtgaaagggtggaaggccgaccgggcaggaaacgtggtcttcaggagaagcgcccgcaatttcaacgtgcccatgtgcaaagctgcagacgtcacggcggtggaggtgggggcttccccccagaagacatccacgttcctaacatttatgtaggtcgcgtgataaaggggcagaaatacgagaaacgaattgagcgcttaacgatccggaaagaggaagatggagacgctggaaaggaagaggacgccaggacgcgcatcatcagacgcgcagctctggaatttgaggacggcatgtacgccaatctgggcataggcatccccctgctggccagcaacttcatcagtcccagcatgactgtccatcttcacagtgagaacgggatcctgggcctgggcccgtttcccacggaagatgaggtggatgccgacctcatcaatgcaggcaagcagacggtcacggtgcttcccgggggctgcttcttcgccagcgacgactccttcgccatgatccgagggggacacatccaactaaccatgcttggagccatgcaggtttccaaatacggcgacctggcgaactggatgatccctggcaagaaggtgaaaggcatgggcggtgccatggacttggtgtccagtcagaagaccagagtggtggtcaccatgcagcactgcacaaaggacaacacccccaagatcatggagaaatgcaccatgccgctgaccgggaagcggtgcgtggaccgcatcatcaccgagaaggccgtgtttgacgtgcacaggaagaaagggctgacgctgagggagctctgggagggcctgacggtggacgacatcaaaaagagcacggggtgtgcctttgctgtgtccccgaacctcaggcccatgcagcaggtggcaccctgacgggacctggatctgggcggggtggtgcgctcctcagggcggatgccaccgggttccccaggggaatacatgtccccagctctgggaggggtttgctactggcctcctactttcctccctaggtggacagtgctcctctagagagctgcgactttaattaaaaacaacaggaaaacagatcagttcctcactgtgtttctcgagcactgcaaggcgcaggtctgcagtggtgaggaatggatgtccgctttgctctgtgatgtttacacagagcgtgcacagctcagcgcattcacagcaagatttgattcaagcgcctccctcgtacttgaaccatgaaatggagataaaaactgacgagggagaaaatcactnaacccagagtacacctgaagggacattttactactgcagtgagaaataggcgagcaaagatgtgagtttgtgattggaagacatgctatcttcatgagcttgttttttctttttccttctctttcttttttctttttttttgaggcagggtctggctctgtcactcaggctggaatgcaatggaatgcagtgatctcactgcaacctctgcctcctgggctcaagcaatcctaactcagcctcctgagtagctgggactacaggcgcacatcacaatgcctgcttatttttttttattttttaaatttatttatagaaatggagtttcaccatgttgcccaggctggtcttgaacacttgagctcaagcgatccacttgcctcagcctcccaaagtgctgggattacagacatgagccactgagttgggccaattaaccttagcttactgtaatttttttttcttttttagacagaatctcactctgttatctaggctagagtacagtggtccagtctcagctcactgcaacccctgcttcctgggttcaagcaattctcatgtctcagcctctcaagtagctgggattacaggcatgtgccaccatgcctagctaatttttgtatatatatttttaacagtagagatagggtttctccatattggccaggctggtctcaaactctgggcctcaggtgatccacctgccttggcctcccaaagtacaggcttgagcnattgcacccggccttcttgaacgtttttatccgttatctggtatttcttctggggcctttgttgttaaattttgtttccctgaagcctcccctcctcctcccacatctctcctcctgggacctatgagatgttaagcttctagatgtccgtagaaggaaagcaggaccatctccaagggaagggaccgggtgatgggagagactgagaggggagaggctgccggtcctgaaatccaccaggaagcttcctctatctgtgtgtggccaaaggctacagcctaggacaggaggagttctagaaccctaaccaagggactagatgagttttctcagcttcatttgaattgttcctgcatcattcacaccagacacttaggccctcctctctgggatggaggcccaaactggccacttgtgtgatggtccgttgtaacccaagaggctgcgaggcatttcctcctgaatctatagtctcaaaaactaaaattaagattgtgtgtgtgtgtgtgtgcgcatgcacgcgtgcacacgtgctgttgacagccaagcctggcctggtgcatgcactgcataagtgtagctctgggggttcccaggccattgggggcatgtggtcagagtagtaagttctcactggtcaaggacagactttccaggggcccattggagcctcaccctgcaggaaaggccagatcctgggaaggagagcagggcagggagagttggcgctcatggagggcacagactgggggtgtggaaaaggggccagggactatggctggggttgggggcttgaaatgaaatgtcatctagtgggcagtggggtgccttttggggctcctggagaggggcacctgatttgccctgggcgtcagtttcccaggagcagtgtggaaaaggctgaggtatctagaagcggacaagtgaccctctgggcctccaactccacctttctggaaggggcctgcccacagctgggcagcctgagagccccccaccttgactgcttggccttccctgcagccagctggagccagggagtcctgcctaagaatgggtgggtaagaagcagagctgatggagaagggaggctctgggctctggaaggagagggctggggatgggggagcttctccaggcctgccagatgcagggctctgaacccagacccactgttagtccccttcaccaccccccatcttgcccagccacatccagctgggccctgcagtttgctggaaaagtatatgacaatcctggctccgacccaccttgctctgggaccttggacagttgctgctctctctgggccttagtttctgcttctgtaaaatgggaacctgggattagctgcttccaaggttncaaggctcgcctggcctgtgagacctacagaggggttcccagcacccaagccaggcctggctcagaggggctctgtgagggtctgtggtgtaactgatctaatgcgacattctatcctgtgtctgggagaccccccataagacccttgaacacagctgcacagaagcaaatagtgaggaaagcctgcaggactgatggcctctcaggccccatngcaggcagggctccccagggagtcacaggacagagctgcaagtggagccaggagggctgccctgggccccaggctgtccccatgggtcagccagtctgcagagtgacactccagtgcccgggctggtgaccaccaccaccccactcaggctgctctgttctctctccgttgtgacctcacttgtcttttcctctgtgccccagctctgttccttgtatttctgctgcttccccataaccttgactcaccgtgactcaagccctgcccagtggattctctctgggcctccttcccatgttagcatctgcagctcacagcctccctgtctcagcagctcttgtccatgctcgtgagagggagggagcctctcctgccagtgcatttgtttgtggcggatgatgtcacnggtcaaaggttggtctctggattcactggttgttcagtcaagtggccaagggacaccagggctgaggcacagctgcttaagggctgacctttgagtgggactgagggtggggcaggcagtgtccttgacctgtagggtgtactggagaactacgtaggaataaatacatctgtgtgtgtgatgtctgtctgagcgtatgtgcatctgtgtgtttatgcaaacatatgcntgtgtgtacatacgtgtgtacatctgtgcttataacatggaggtgaaatgtactttcgtgtaaactgaacaactggcactgtttaaagagacatgaaaatgagctggtaatcatgcttctgcaattcagtatcaggaaatttcacccatgcacggagtgaagaggctccattgcactcccatctttatcatgaaagccgggaaataacctacatgtctatgatgagccaatatcaagtcaattacggtatactgctccaagggattttataaatttgaaatgtttattgtggagacttatttaaacaaccagaaaaagt

SEQ ID NO: 378890 - DNA, 291 bp, Homo sapiens
gatcctcctgccttggcctcccaaagtgctgggattaccggcaggagccactgtgcctggccagttcttgttcagctacaatttattttcctattgctttttggaatgtaatttaaactttacacttcagttatcccacttgtcaaatgcatacatgatttcgtggccaataacctgtacgtggacacagtaaagttaaaacaataaagatgcacggaattttgatgctgataggtatcataaaataatgtgatccaaactaaggagatatctgagctcagagacagtaaa

SEQ ID NO: 378891 - DNA, 182 bp, Homo sapiens
tttccagatgcatacagtgatcctcaaagttatgtagagcctcatcagtatgtggtttgcaaagagcagtcacggtttctaccatttccttatacttagtgggatttgtgggctttgaatggtcacaataatcaaatgaagttcttaactgccagaaagaaagcatacgggtccagaaaatt

SEQ ID NO: 378892 - DNA, 366 bp, Homo sapiens
gcgcctgtatcccagctacttgggaggctgacgaaagagaattgcttgaacccaggaggcggaggttgcagcgagcctagatcgcaccactgcattccagcctgggcgacagagctagactctttctctaaataaataaataaataaatacataagtaagtaaataaataaagctttaaagtgctatgtttaaagcatatatattttttttaagtcactgagctgttgaaaaactaaataatcctcagagccaacaagcaagagagagctggacccacagaggaaggtgaaagtcaaaaacggcctccaccccatggctggaccagaaagaggccctgtctgttttcttccacctgtgttattgga

SEQ ID NO: 378893 - DNA, 1153 bp, Homo sapiens
cgcggacggcggaaggtggactcgcgaatgttaggcctgtgggtgccatagcgaccgggaggttgggctggccagattcagctgccgggaccggaccaggtgcttaggagaacatgcagtagaacttttcatcaaacaaatggaacacgtcacagaattttgctaacatggacaactctgcacagaaaaatgaacgcactggcaaacatcccagacgtgccagtgaagtacagaaaggccaaggagcagtgaggacgcttcctctgtcctgaccgcgcctcgtccaggctgctcccagaatagttttgctgtctccttcctgcctggcaagaatgtctttactatcatctccttccttttctccgggacagcctgtttaaggttttactgctgcatatccaacacaatcctccattccttttaaatctcaagcttcagtaatcccagaatcagaaaaaaaaggattcaatagtcaagccaagagatttcctcataagaagaatgatatcccaggacctgggttctacaatgttattcaccagtcaccggtgtccaacagtgtctcattgtccaagaaaggaacttgcatgtttccctcaatgtgcgcccgattggacaccatcatttctaaataccctgcagcgaatgcatacactatcccatcggattttatttccaagagagactttagtaattcgtgttccagcatgttccagttgccaagctttatgaaagctctcaagtttgaaactcctgcaccaaactattacaatgtaagaactctgcctatgcttgctaaatacagatcgaattaatggtttactaaaataaaaggaagaggggatcttggggacatcgtattttaatgcagttgtcaagccagttagcatttgttgactacccaatgggtgcctaaggctgtacaagactcttacagggaatttgcagaccccagagatcaggatgggcaacatggaggccagtatcaagctgtggggaggccactgccctgagaaacacatattctaattactcttgtcctgtaacctttctgggacgtagttttctcatctgtaacaatgggtgtattatttaccacttcgtctgcagccactaatgatttactttttaagttcttctagggaaaataaac

SEQ ID NO: 378894 - DNA, 756 bp, Homo sapiens
attttcccgctgcgaatcaaatgttgcggagggatttgaatatgaggcgcgcagctttatgttttactgctgcatatccaacacaatcctccattccttttaaatctcaagcttcagtaatcccagaatcagaaaaaaaaggattcaatagtcaagccaagagatttcctcataagaaggtaatgacgttgtctcaggggttctttcgttttagtctggattttagccttgcgggacaggcacgttctgtctggctgctgtgtctttctgtggacagtggagggcagtgtgctcccaggagccgcggcaccagctccactgaggggcaccgactggactaactgtaagaacgagcctgaaaaatgggacatccagggaaaaacaactgtgtctggatttatggcgccaaaaatattgaactggaccaaaactattttaagaaaacaatatattttaaaaatcatcataaagctaaaaaattgcaaaaattcccaagtgttatcaattaagtaaaagattaaaaaaaaatcttccccatccttgtgagaggaaatcacatgacttcaaataacacaagaggaaaagaagagtcgaatacatctagaattacctttggagggccgggcacggtggcttatgcctgtaatcccagcactttgggaagctgaggtgggagaattaattgcttgagccaggagtttcagatcagcccaggcaacatagcaaaacccaatctctacaagaaaagaaaagaaa

SEQ ID NO: 378895 - DNA, 2979 bp, Homo sapiens
tcaccaagtattcaaatccaaaacgtccttgaagacccagcgctccccagagccctcgcgagacttgggaccaaacatatctctcctttcctgccctcctggaacacctgtcggataccaagcctcccagcaatactgaaggtcctgaaacgagcccagcgcttggttaatgtttctataatgtacataattatcacggccatgataattaacatgcgcatggagttttacagatgacaagcttctcatcgctcacacgttgtcatatacacgcatttgctttcagatcgtcacagccatgagtgagacttgaagcccgttttacgtatgaagaaatgtcatttgggcctagacatcaacaatgagaaagaggcagttctagtctcagatcgtggggcagagaaagctccttgggaacatgggagaggaacgagttggtgcattgtagaaactgcccgaaggccagcagggctggtgcttaggagaacatgcagtagaacttttcatcaaacaaatggaacacgtcacagaattttgctaacatggacaactctgcacagaaaaatgaacgcactggcaaacatcccagacgtgccagtgaagtacagaaagaatgatatcccaggacctgggttctacaatgttattcaccagtcaccggtgtccaacagtgtctcattgtccaagaaaggaacttgcatgtttccctcaatgtgcgcccgattggacaccatcatttctaaataccctgcagcgaatgcatacactatcccatcggattttatttccaagagagactttagtaattcgtgttccagcatgttccagttgccaagctttatgaaagctctcaagtttgaaactcctgcaccaaactattacaatgcctctgtctcttgctgcaagcagagaaacaacgtctgtactcgagccgggtttatgtcaaaaacccaaagaggatctttcgcttttgctgataaaggacctcccccagggcattatgatatcaacgaatcccttgtgaagcagtcgccaaatacattaatgtcttgttttaaatcaaaaaccaaccgtggattaaaactgacgtcaacaggcccgggacctggttattacaaccccagtgattgcacaaaagttccaaaaaagactcttttcccgaaaaaccccatcctgaacttctctgctcagccttcgcctctgcctccgaagccacctttcccaggtcctggtcagtatgagatcgtggactacttaggcccccgcaagcatttcatctctagtgcatcattcgtgtccaataccagccggtggacagcggcgccgcctcagccaggcctgcctggcccagctacgtacaagccagagcttccaggaaagcagtccttcctctacaacgaggacaagaaatggatcccggttctgtagggatgtcacacaaggtcaaggagaactccagccaccagcccaccctgcccagcgtccccaggacattcctcaggaggagaccgatcatgagtgtggcagctgacaacttggggggtggctctaccactctggcctggcatcctagccggactgctgccattgcctttgtcttgagctggagacattgctccctggagacttcaccccagccccacagactccagtggcttcctgagcagaagggaggagtggacagagccccctggctgcttccccacgcacccatccaggctgccttccggcacgactccctgccgcagactgaagggactcctgaagcgcagacttcaaggaggatcagtccaccctgaaggtggccaagcctggaagccccacccttccctgtttcattccttcattcatttacacattcattcattccctcactcctgcctttctcatttgtccctttctgacctcactcacttacggtatgtctactgggcgaaagctacctgcaggcaggtgatgctttttccaccagtccacagcttcctttctaaagtgaccacctgtttggaaagacctctctttactccttttagacctttttctctttggagtgggagatcatcttggaatggcagtggccgggcccgggggctgcgcttttccctgactttctctgctggcgggactgaattttctcaaggcttacaggcccttccatggagtccacatggcctgtctaggcctgatagctttcgtctctctatgtggagggaaaaagaaatgtgccctagtggttttggtggaggctgcacagattcgcggtgggtggggagctgccaggctccttttctgatctcccagcaggctttgactgacgctgtttagtctttctgtacattaaccccgccagataccgagaggttacaaagcctccaaggcctgtacaactgtggcctctccagagaagtggttctcagccttgactgcacactgtaatcacctggggactttaaaaagtactgaggcctggggcccacccacaaatgctgatttaactcctccagggtggggtctgggcagtggggaggcaggagccacccaggtgattccaatgataggtgtaggttgagaagcgccaccttccagcttcctaactggctctgggaggggagctgggtgggaagttcaggaggtgggaactttgtacacgcagagcacctggagcacctacagcatggctgtggttccacactcctctgtcatttaaccttcacacatcacctcgttctgacatcaagggtgcgtcacagccacagtgaggcctcgcctgggcagagcaactctgggtgccccactgggtccctcccacaggggcaggcaagcctaatgggaacccgaggcaaaaggaaacatcagtaatacgaatcctgtctttaaaactgtgatgttttgttcaccatggattttttttttgggggggggggccttaattttaaaaatattgcattaaacttatttatcttgcttattgaaaaaaaa

SEQ ID NO: 378896 - DNA, 3098 bp, Homo sapiens
tcaccaagtattcaaatccaaaacgtccttgaagacccagcgctccccagagccctcgcgagacttgggaccaaacatatctctcctttcctgccctcctggaacacctgtcggataccaagcctcccagcaatactgaaggtcctgaaacgagcccagcgcttggttaatgtttctataatgtacataattatcacggccatgataattaacatgcgcatggagttttacagatgacaagcttctcatcgctcacacgttgtcatatacacgcatttgctttcagatcgtcacagccatgagtgagacttgaagcccgttttacgtatgaagaaatgtcatttgggcctagacatcaacaatgagaaagaggcagttctagtctcagatcgtggggcagagaaagctccttgggaacatgggagaggaacgagttggtgcattgtagaaactgcccgaaggccagcagggctggtgcttaggagaacatgcagtagaacttttcatcaaacaaatggaacacgtcacagaattttgctaacatggacaactctgcacagaaaaatgaacgcactggcaaacatcccagacgtgccagtgaagtacagaaaggttttactgctgcatatccaacacaatcctccattccttttaaatctcaagcttcagtaatcccagaatcagaaaaaaaaggattcaatagtcaagccaagagatttcctcataagaagaatgatatcccaggacctgggttctacaatgttattcaccagtcaccggtgtccaacagtgtctcattgtccaagaaaggaacttgcatgtttccctcaatgtgcgcccgattggacaccatcatttctaaataccctgcagcgaatgcatacactatcccatcggattttatttccaagagagactttagtaattcgtgttccagcatgttccagttgccaagctttatgaaagctctcaagtttgaaactcctgcaccaaactattacaatgcctctgtctcttgctgcaagcagagaaacaacgtctgtactcgagccgggtttatgtcaaaaacccaaagaggatctttcgcttttgctgataaaggacctcccccagggcattatgatatcaacgaatcccttgtgaagcagtcgccaaatacattaatgtcttgttttaaatcaaaaaccaaccgtggattaaaactgacgtcaacaggcccgggacctggttattacaaccccagtgattgcacaaaagttccaaaaaagactcttttcccgaaaaaccccatcctgaacttctctgctcagccttcgcctctgcctccgaagccacctttcccaggtcctggtcagtatgagatcgtggactacttaggcccccgcaagcatttcatctctagtgcatcattcgtgtccaataccagccggtggacagcggcgccgcctcagccaggcctgcctggcccagctacgtacaagccagagcttccaggaaagcagtccttcctctacaacgaggacaagaaatggatcccggttctgtagggatgtcacacaaggtcaaggagaactccagccaccagcccaccctgcccagcgtccccaggacattcctcaggaggagaccgatcatgagtgtggcagctgacaacttggggggtggctctaccactctggcctggcatcctagccggactgctgccattgcctttgtcttgagctggagacattgctccctggagacttcaccccagccccacagactccagtggcttcctgagcagaagggaggagtggacagagccccctggctgcttccccacgcacccatccaggctgccttccggcacgactccctgccgcagactgaagggactcctgaagcgcagacttcaaggaggatcagtccaccctgaaggtggccaagcctggaagccccacccttccctgtttcattccttcattcatttacacattcattcattccctcactcctgcctttctcatttgtccctttctgacctcactcacttacggtatgtctactgggcgaaagctacctgcaggcaggtgatgctttttccaccagtccacagcttcctttctaaagtgaccacctgtttggaaagacctctctttactccttttagacctttttctctttggagtgggagatcatcttggaatggcagtggccgggcccgggggctgcgcttttccctgactttctctgctggcgggactgaattttctcaaggcttacaggcccttccatggagtccacatggcctgtctaggcctgatagctttcgtctctctatgtggagggaaaaagaaatgtgccctagtggttttggtggaggctgcacagattcgcggtgggtggggagctgccaggctccttttctgatctcccagcaggctttgactgacgctgtttagtctttctgtacattaaccccgccagataccgagaggttacaaagcctccaaggcctgtacaactgtggcctctccagagaagtggttctcagccttgactgcacactgtaatcacctggggactttaaaaagtactgaggcctggggcccacccacaaatgctgatttaactcctccagggtggggtctgggcagtggggaggcaggagccacccaggtgattccaatgataggtgtaggttgagaagcgccaccttccagcttcctaactggctctgggaggggagctgggtgggaagttcaggaggtgggaactttgtacacgcagagcacctggagcacctacagcatggctgtggttccacactcctctgtcatttaaccttcacacatcacctcgttctgacatcaagggtgcgtcacagccacagtgaggcctcgcctgggcagagcaactctgggtgccccactgggtccctcccacaggggcaggcaagcctaatgggaacccgaggcaaaaggaaacatcagtaatacgaatcctgtctttaaaactgtgatgttttgttcaccatggattttttttttgggggggggggccttaattttaaaaatattgcattaaacttatttatcttgcttattgaaaaaaaa

SEQ ID NO: 378897 - DNA, 2867 bp, Homo sapiens
cgcggacggcggaaggtggactcgcgaatgttaggcctgtgggtgccatagcgaccgggaggttgggctggccagattcagctgccgggaccggaccaggtgcttaggagaacatgcagtagaacttttcatcaaacaaatggaacacgtcacagaattttgctaacatggacaactctgcacagaaaaatgaacgcactggcaaacatcccagacgtgccagtgaagtacagaaaggccaaggagcagtgaggacgcttcctctgtcctgaccgcgcctcgtccaggctgctcccagaatagttttgctgtctccttcctgcctggcaagaatgtctttactatcatctccttccttttctccgggacagcctgtttaaggttttactgctgcatatccaacacaatcctccattccttttaaatctcaagcttcagtaatcccagaatcagaaaaaaaaggattcaatagtcaagccaagagatttcctcataagaagaatgatatcccaggacctgggttctacaatgttattcaccagtcaccggtgtccaacagtgtctcattgtccaagaaaggaacttgcatgtttccctcaatgtgcgcccgattggacaccatcatttctaaataccctgcagcgaatgcatacactatcccatcggattttatttccaagagagactttagtaattcgtgttccagcatgttccagttgccaagctttatgaaagctctcaagtttgaaactcctgcaccaaactattacaatgcctctgtctcttgctgcaagcagagaaacaacgtctgtactcgagccgggtttatgtcaaaaacccaaagaggatctttcgcttttgctgataaaggacctcccccagggcattatgatatcaacgaatcccttgtgaagcagtcgccaaatacattaatgtcttgttttaaatcaaaaaccaaccgtggattaaaactgacgtcaacaggcccgggacctggttattacaaccccagtgattgcacaaaagttccaaaaaagactcttttcccgaaaaaccccatcctgaacttctctgctcagccttcgcctctgcctccgaagccacctttcccaggtcctggtcagtatgagatcgtggactacttaggcccccgcaagcatttcatctctagtgcatcattcgtgtccaataccagccggtggacagcggcgccgcctcagccaggcctgcctggcccagctacgtacaagccagagcttccaggaaagcagtccttcctctacaacgaggacaagaaatggatcccggttctgtagggatgtcacacaaggtcaaggagaactccagccaccagcccaccctgcccagcgtccccaggacattcctcaggaggagaccgatcatgagtgtggcagctgacaacttggggggtggctctaccactctggcctggcatcctagccggactgctgccattgcctttgtcttgagctggagacattgctccctggagacttcaccccagccccacagactccagtggcttcctgagcagaagggaggagtggacagagccccctggctgcttccccacgcacccatccaggctgccttccggcacgactccctgccgcagactgaagggactcctgaagcgcagacttcaaggaggatcagtccaccctgaaggtggccaagcctggaagccccacccttccctgtttcattccttcattcatttacacattcattcattccctcactcctgcctttctcatttgtccctttctgacctcactcacttacggtatgtctactgggcgaaagctacctgcaggcaggtgatgctttttccaccagtccacagcttcctttctaaagtgaccacctgtttggaaagacctctctttactccttttagacctttttctctttggagtgggagatcatcttggaatggcagtggccgggcccgggggctgcgcttttccctgactttctctgctggcgggactgaattttctcaaggcttacaggcccttccatggagtccacatggcctgtctaggcctgatagctttcgtctctctatgtggagggaaaaagaaatgtgccctagtggttttggtggaggctgcacagattcgcggtgggtggggagctgccaggctccttttctgatctcccagcaggctttgactgacgctgtttagtctttctgtacattaaccccgccagataccgagaggttacaaagcctccaaggcctgtacaactgtggcctctccagagaagtggttctcagccttgactgcacactgtaatcacctggggactttaaaaagtactgaggcctggggcccacccacaaatgctgatttaactcctccagggtggggtctgggcagtggggaggcaggagccacccaggtgattccaatgataggtgtaggttgagaagcgccaccttccagcttcctaactggctctgggaggggagctgggtgggaagttcaggaggtgggaactttgtacacgcagagcacctggagcacctacagcatggctgtggttccacactcctctgtcatttaaccttcacacatcacctcgttctgacatcaagggtgcgtcacagccacagtgaggcctcgcctgggcagagcaactctgggtgccccactgggtccctcccacaggggcaggcaagcctaatgggaacccgaggcaaaaggaaacatcagtaatacgaatcctgtctttaaaactgtgatgttttgttcaccatggattttttttttgggggggggggccttaattttaaaaatattgcattaaacttatttatcttgcttattgaaaaaaaa

SEQ ID NO: 378898 - DNA, 2301 bp, Homo sapiens
  misc_feature (2140)..(2140): n is a, c, g, or t
accaatgtggaagagaaatgagacttactttgagttggttccaagggtgggaattaggacggatagaaaaagaaaaaaagagagagagaatcagctttgatacaggaaggaactttctagcaattagaactgtccaacagtgaacttcccccaggagtttttaaactgtgttctgatgaaacctagcattctgtgaatattcaagagagtcaaatatttgcccccacccagccatcccttatttgctttatattttgaaaactatatgcaatattgtaacttcagaaacccaaccaggtaaggcacggtggctcactgtaatcccagtgctttgggaagctgaggtgagaagatcacttgaggctaggatttcgagaccatcctgggcagcatagattctaggtccatgccatcctgtcatggacagttatacaggtggaccagtgaggcacacctgggcagtgctctgttcacatctgtcctgcacctgctctcatcctgccttcacaggtgcttaggagaacatgcagtagaacttttcatcaaacaaatggaacacgtcacagaattttgctaacatggacaactctgcacagaaaaatgaacgcactggcaaacatcccagacgtgccagtgaagtacagaaaggttttactgctgcatatccaacacaatcctccattccttttaaatctcaagcttcagtaatcccagaatcagaaaaaaaaggattcaatagtcaagccaagagatttcctcataagaagaatgatatcccaggacctgggttctacaatgttattcaccagtcaccggtgtccaacagtgtctcattgtccaagaaaggaacttgcatgtttccctcaatggtgagaaccacttctcttgagtaaagcattaactgtgcgcccgattggacaccatcatttctaaataccctgcagcgaatgcatacactatcccatcggattttatttccaagagagactttagtaattcgtgttccagcatgttccagttgccaagctttatgaaagctctcaagtttgaaactcctgcaccaaactattacaatgcctctgtctcttgctgcaagcagagaaacaacgtctgtactcgagccgggtttatgtcaaaaacccaaagaggatctttcgcttttgctgataaaggacctcccccagggcattatgatatcaacgaatcccttgtgaagcagtcgccaaatacattaatgtcttgttttaaatcaaaaaccaaccgtggattaaaactgacgtcaacaggcccgggacctggttattacaaccccagtgattgcacaaaagttccaaaaaagactcttttcccgtgagtcccaatcattctggtctttcttttgaaaggtggttgtggggaagaagcccaacatagagaaaaggatggggtgtcactgcttggcagagcacagtgccgggccactctcttcaggggcccttagtcacacataatgatgctcagtaaatgcctgttgaatgcctgatacttattgagcaaccactgtgtgccaggaacttaaaattgtattcaattattattataatcctgttgtaagaattgttactcttaccccatagaggaggaagcaaggcttcggatttggcgggacatttgcccaagtccacacagccaacttgaggagccacagggaattggctcaggactaagtctttcctcattccctgtgatgctggattcccctggtgctgacattgttctatttttgtaacataaaatcttcgctggagtggcaggacattcagaagcagtcaagctctcatagctttataccgatggaagtttaagccctgactttcgagttggtgatacctgctggatttgtacttcagctctgctgtttttatgctctgtgaccttgggcagagttctaacctctctgagcctccatgccctcatctgtaaggtgggaataattcctgcctcgtaggattttgctttcagaattaaaaatacatgtttggctgggcgcagcagcttgcgcctgtaatcccagcactttgggaggccgaggtgggcgaatcacttgagatcaggtgttcgagaccagtctggccaacatggtgaaaccctgtctctactnaaaatacaaaaattatccaggcatgatggtgcacgcctgtaatcctagctactcgggaggctgaggcaggagaatcacttggacctgtgaggcccagattgtggtgagccgagattgcgccactgcactccagcctgggtgacagagtgagaccctgtctc

SEQ ID NO: 378899 - DNA, 1131 bp, Homo sapiens
cgcggacggcggaaggtggactcgcgaatgttaggcctgtgggtgccatagcgaccgggaggttgggctggccagattcagctgccgggaccggaccaggtgcttaggagaacatgcagtagaacttttcatcaaacaaatggaacacgtcacagaattttgctaacatggacaactctgcacagaaaaatgaacgcactggcaaacatcccagacgtgccagtgaagtacagaaaggttttactgctgcatatccaacacaatcctccattccttttaaatctcaagcttcagtaatcccagaatcagaaaaaaaaggattcaatagtcaagccaagagatttcctcataagaagaatgatatcccaggacctgggttctacaatgttattcaccagtcaccggtgtccaacagtgtctcattgtccaagaaaggaacttgcatgtttccctcaatgtgcgcccgattggacaccatcatttctaaataccctgcagcgaatgcatacactatcccatcggattttatttccaagagagactttagtaattcgtgttccagcatgttccagttgccaagctttatgaaagctctcaagtttgaaactcctgcaccaaactattacaatgcctctgtctcttgctgcaagcagagaaacaacgtctgtactcgagccgggtttatgtcaaaaacccaaagaggatctttcgcttttgctgataaaggacctcccccagggcattatgatatcaacgaatcccttgtgaagcagtcgccaaatacattaatgtcttgttttaaatcaaaaaccaaccgtggattaaaactgacgtcaacaggcccgggacctggttattacaaccccagtgattgcacaaaagttccaaaaaagactcttttcccgaaaaaccccatcctgaacttctctgctcagccttcgcctctgcctccgaagccacctttcccaggtcctggtcagtatgagatcgtggactacttaggcccccgcaagcatttcatctctagtgcatcattcgtgtccaataccagccggtggacagcggcgccgcctcagccaggcctgcctggcccaggtcagaggattgttttaaatgattgtaaaaaccaaa

SEQ ID NO: 378900 - DNA, 1452 bp, Homo sapiens
tcaccaagtattcaaatccaaaacgtccttgaagacccagcgctccccagagccctcgcgagacttgggaccaaacatatctctcctttcctgccctcctggaacacctgtcggataccaagcctcccagcaatactgaaggtcctgaaacgagcccagcgcttggttaatgtttctataatgtacataattatcacggccatgataattaacatgcgcatggagttttacagatgacaagcttctcatcgctcacacgttgtcatatacacgcatttgctttcagatcgtcacagccatgagtgagacttgaagcccgttttacgtatgaagaaatgtcatttgggcctagacatcaacaatgagaaagaggcagttctagtctcagatcgtggggcagagaaagctccttgggaacatgggagaggaacgagttggtgcattgtagaaactgcccgaaggccagcagggctggtgcttaggagaacatgcagtagaacttttcatcaaacaaatggaacacgtcacagaattttgctaacatggacaactctgcacagaaaaatgaacgcactggcaaacatcccagacgtgccagtgaagtacagaaaggccaaggagcagtgaggacgcttcctctgtcctgaccgcgcctcgtccaggctgctcccagaatagttttgctgtctccttcctgcctggcaagaatgtctttactatcatctccttccttttctccgggacagcctgtttaaggttttactgctgcatatccaacacaatcctccattccttttaaatctcaagcttcagtaatcccagaatcagaaaaaaaaggattcaatagtcaagccaagagatttcctcataagaaggtaatgacgttgtctcaggggttctttcgttttagtctggattttagccttgcgggacaggcacgttctgtctggctgctgtgtctttctgtggacagtggagggcagtgtgctcccaggagccgcggcaccagctccactgaggggcaccgactggactaactgtaagaacgagcctgaaaaatgggacatccagggaaaaacaactgtgtctggatttatggcgccaaaaatattgaactggaccaaaactattttaagaaaacaatatattttaaaaatcatcataaagctaaaaaattgcaaaaattcccaagtgttatcaattaagtaaaagattaaaaaaaaatcttccccatccttgtgagaggaaatcacatgacttcaaataacacaagaggaaaagaagagtcgaatacatctagaattacctttggagggccgggcacggtggcttatgcctgtaatcccagcactttgggaagctgaggtgggagaattaattgcttgagccaggagtttcagatcagcccaggcaacatagcaaaacccaatctctacaagaaaagaaaagaaa

SEQ ID NO: 378901 - DNA, 895 bp, Homo sapiens
accaatgtggaagagaaatgagacttactttgagttggttccaagggtgggaattaggacggatagaaaaagaaaaaaagagagagagaatcagctttgatacaggaaggaactttctagcaattagaactgtccaacagtgaacttcccccaggagtttttaaactgtgttctgatgaaacctagcattctgtgaatattcaagagagtcaaatatttgcccccacccagccatcccttatttgctttatattttgaaaactatatgcaatattgtaacttcagaaacccaaccaggtaaggcacggtggctcactgtaatcccagtgctttgggaagctgaggtgagaagatcacttgaggctaggatttcgagaccatcctgggcagcatagattctaggtccatgccatcctgtcatggacagttatacaggtggaccagtgaggcacacctgggcagtgctctgttcacatctgtcctgcacctgctctcatcctgccttcacaggtgcttaggagaacatgcagtagaacttttcatcaaacaaatggaacacgtcacagaattttgctaacatggacaactctgcacagaaaaatgaacgcactggcaaacatcccagacgtgccagtgaagtacagaaaggtacatgtgtctttgcagggaggagatagctcctgacatatgcttattttagtacataagagcaaatttggggggaatagtaagtcctgggttatatccacagggccatccttacaggcataccaaataggtggctttaggccctactgtttcaagtgtgacgattgggaagaaactgagaagaaaggatgagagaagaaggaggaagtctgttaaaaaataaaaaactaataaacaaaacccagac

SEQ ID NO: 378902 - DNA, 985 bp, Homo sapiens
ccatgtcacttcctggtttggtagagcctggcatcacctttagtaaggtagcccatgcccccgctcctcttggcctcgatgcaaaactggaaagaacattccaaggcaacgggacccaggttggcgaggctggtgacagtaagaaggaagggtgcttaggagaacatgcagtagaacttttcatcaaacaaatggaacacgtcacagaattttgctaacatggacaactctgcacagaaaaatgaacgcactggcaaacatcccagacgtgccagtgaagtacagaaaggttttactgctgcatatccaacacaatcctccattccttttaaatctcaagcttcagtaatcccagaatcagaaaaaaaaggattcaatagtcaagccaagagatttcctcataagaaggtaatgacgttgtctcaggggttctttcgttttagtctggattttagccttgcgggacaggcacgttctgtctggctgctgtgtctttctgtggacagtggagggcagtgtgctcccaggagccgcggcaccagctccactgaggggcaccgactggactaactgtaagaacgagcctgaaaaatgggacatccagggaaaaacaactgtgtctggatttatggcgccaaaaatattgaactggaccaaaactattttaagaaaacaatatattttaaaaatcatcataaagctaaaaaattgcaaaaattcccaagtgttatcaattaagtaaaagattaaaaaaaaatcttccccatccttgtgagaggaaatcacatgacttcaaataacacaagaggaaaagaagagtcgaatacatctagaattacctttggagggccgggcacggtggcttatgcctgtaatcccagcactttgggaagctgaggtgggagaattaattgcttgagccaggagtttcagatcagcccaggcaacatagcaaaacccaatctctacaagaaaagaaaagaaa

SEQ ID NO: 378903 - DNA, 2723 bp, Homo sapiens
cgcggacggcggaaggtggactcgcgaatgttaggcctgtgggtgccatagcgaccgggaggttgggctggccagattcagctgccgggaccggaccaggtgcttaggagaacatgcagtagaacttttcatcaaacaaatggaacacgtcacagaattttgctaacatggacaactctgcacagaaaaatgaacgcactggcaaacatcccagacgtgccagtgaagtacagaaaggttttactgctgcatatccaacacaatcctccattccttttaaatctcaagcttcagtaatcccagaatcagaaaaaaaaggattcaatagtcaagccaagagatttcctcataagaagaatgatatcccaggacctgggttctacaatgttattcaccagtcaccggtgtccaacagtgtctcattgtccaagaaaggaacttgcatgtttccctcaatgtgcgcccgattggacaccatcatttctaaataccctgcagcgaatgcatacactatcccatcggattttatttccaagagagactttagtaattcgtgttccagcatgttccagttgccaagctttatgaaagctctcaagtttgaaactcctgcaccaaactattacaatgcctctgtctcttgctgcaagcagagaaacaacgtctgtactcgagccgggtttatgtcaaaaacccaaagaggatctttcgcttttgctgataaaggacctcccccagggcattatgatatcaacgaatcccttgtgaagcagtcgccaaatacattaatgtcttgttttaaatcaaaaaccaaccgtggattaaaactgacgtcaacaggcccgggacctggttattacaaccccagtgattgcacaaaagttccaaaaaagactcttttcccgaaaaaccccatcctgaacttctctgctcagccttcgcctctgcctccgaagccacctttcccaggtcctggtcagtatgagatcgtggactacttaggcccccgcaagcatttcatctctagtgcatcattcgtgtccaataccagccggtggacagcggcgccgcctcagccaggcctgcctggcccagctacgtacaagccagagcttccaggaaagcagtccttcctctacaacgaggacaagaaatggatcccggttctgtagggatgtcacacaaggtcaaggagaactccagccaccagcccaccctgcccagcgtccccaggacattcctcaggaggagaccgatcatgagtgtggcagctgacaacttggggggtggctctaccactctggcctggcatcctagccggactgctgccattgcctttgtcttgagctggagacattgctccctggagacttcaccccagccccacagactccagtggcttcctgagcagaagggaggagtggacagagccccctggctgcttccccacgcacccatccaggctgccttccggcacgactccctgccgcagactgaagggactcctgaagcgcagacttcaaggaggatcagtccaccctgaaggtggccaagcctggaagccccacccttccctgtttcattccttcattcatttacacattcattcattccctcactcctgcctttctcatttgtccctttctgacctcactcacttacggtatgtctactgggcgaaagctacctgcaggcaggtgatgctttttccaccagtccacagcttcctttctaaagtgaccacctgtttggaaagacctctctttactccttttagacctttttctctttggagtgggagatcatcttggaatggcagtggccgggcccgggggctgcgcttttccctgactttctctgctggcgggactgaattttctcaaggcttacaggcccttccatggagtccacatggcctgtctaggcctgatagctttcgtctctctatgtggagggaaaaagaaatgtgccctagtggttttggtggaggctgcacagattcgcggtgggtggggagctgccaggctccttttctgatctcccagcaggctttgactgacgctgtttagtctttctgtacattaaccccgccagataccgagaggttacaaagcctccaaggcctgtacaactgtggcctctccagagaagtggttctcagccttgactgcacactgtaatcacctggggactttaaaaagtactgaggcctggggcccacccacaaatgctgatttaactcctccagggtggggtctgggcagtggggaggcaggagccacccaggtgattccaatgataggtgtaggttgagaagcgccaccttccagcttcctaactggctctgggaggggagctgggtgggaagttcaggaggtgggaactttgtacacgcagagcacctggagcacctacagcatggctgtggttccacactcctctgtcatttaaccttcacacatcacctcgttctgacatcaagggtgcgtcacagccacagtgaggcctcgcctgggcagagcaactctgggtgccccactgggtccctcccacaggggcaggcaagcctaatgggaacccgaggcaaaaggaaacatcagtaatacgaatcctgtctttaaaactgtgatgttttgttcaccatggattttttttttgggggggggggccttaattttaaaaatattgcattaaacttatttatcttgcttattgaaaaaaaa

SEQ ID NO: 378904 - DNA, 2604 bp, Homo sapiens
cgcggacggcggaaggtggactcgcgaatgttaggcctgtgggtgccatagcgaccgggaggttgggctggccagattcagctgccgggaccggaccaggtgcttaggagaacatgcagtagaacttttcatcaaacaaatggaacacgtcacagaattttgctaacatggacaactctgcacagaaaaatgaacgcactggcaaacatcccagacgtgccagtgaagtacagaaagaatgatatcccaggacctgggttctacaatgttattcaccagtcaccggtgtccaacagtgtctcattgtccaagaaaggaacttgcatgtttccctcaatgtgcgcccgattggacaccatcatttctaaataccctgcagcgaatgcatacactatcccatcggattttatttccaagagagactttagtaattcgtgttccagcatgttccagttgccaagctttatgaaagctctcaagtttgaaactcctgcaccaaactattacaatgcctctgtctcttgctgcaagcagagaaacaacgtctgtactcgagccgggtttatgtcaaaaacccaaagaggatctttcgcttttgctgataaaggacctcccccagggcattatgatatcaacgaatcccttgtgaagcagtcgccaaatacattaatgtcttgttttaaatcaaaaaccaaccgtggattaaaactgacgtcaacaggcccgggacctggttattacaaccccagtgattgcacaaaagttccaaaaaagactcttttcccgaaaaaccccatcctgaacttctctgctcagccttcgcctctgcctccgaagccacctttcccaggtcctggtcagtatgagatcgtggactacttaggcccccgcaagcatttcatctctagtgcatcattcgtgtccaataccagccggtggacagcggcgccgcctcagccaggcctgcctggcccagctacgtacaagccagagcttccaggaaagcagtccttcctctacaacgaggacaagaaatggatcccggttctgtagggatgtcacacaaggtcaaggagaactccagccaccagcccaccctgcccagcgtccccaggacattcctcaggaggagaccgatcatgagtgtggcagctgacaacttggggggtggctctaccactctggcctggcatcctagccggactgctgccattgcctttgtcttgagctggagacattgctccctggagacttcaccccagccccacagactccagtggcttcctgagcagaagggaggagtggacagagccccctggctgcttccccacgcacccatccaggctgccttccggcacgactccctgccgcagactgaagggactcctgaagcgcagacttcaaggaggatcagtccaccctgaaggtggccaagcctggaagccccacccttccctgtttcattccttcattcatttacacattcattcattccctcactcctgcctttctcatttgtccctttctgacctcactcacttacggtatgtctactgggcgaaagctacctgcaggcaggtgatgctttttccaccagtccacagcttcctttctaaagtgaccacctgtttggaaagacctctctttactccttttagacctttttctctttggagtgggagatcatcttggaatggcagtggccgggcccgggggctgcgcttttccctgactttctctgctggcgggactgaattttctcaaggcttacaggcccttccatggagtccacatggcctgtctaggcctgatagctttcgtctctctatgtggagggaaaaagaaatgtgccctagtggttttggtggaggctgcacagattcgcggtgggtggggagctgccaggctccttttctgatctcccagcaggctttgactgacgctgtttagtctttctgtacattaaccccgccagataccgagaggttacaaagcctccaaggcctgtacaactgtggcctctccagagaagtggttctcagccttgactgcacactgtaatcacctggggactttaaaaagtactgaggcctggggcccacccacaaatgctgatttaactcctccagggtggggtctgggcagtggggaggcaggagccacccaggtgattccaatgataggtgtaggttgagaagcgccaccttccagcttcctaactggctctgggaggggagctgggtgggaagttcaggaggtgggaactttgtacacgcagagcacctggagcacctacagcatggctgtggttccacactcctctgtcatttaaccttcacacatcacctcgttctgacatcaagggtgcgtcacagccacagtgaggcctcgcctgggcagagcaactctgggtgccccactgggtccctcccacaggggcaggcaagcctaatgggaacccgaggcaaaaggaaacatcagtaatacgaatcctgtctttaaaactgtgatgttttgttcaccatggattttttttttgggggggggggccttaattttaaaaatattgcattaaacttatttatcttgcttattgaaaaaaaa

SEQ ID NO: 378905 - DNA, 3134 bp, Homo sapiens
accaatgtggaagagaaatgagacttactttgagttggttccaagggtgggaattaggacggatagaaaaagaaaaaaagagagagagaatcagctttgatacaggaaggaactttctagcaattagaactgtccaacagtgaacttcccccaggagtttttaaactgtgttctgatgaaacctagcattctgtgaatattcaagagagtcaaatatttgcccccacccagccatcccttatttgctttatattttgaaaactatatgcaatattgtaacttcagaaacccaaccaggtaaggcacggtggctcactgtaatcccagtgctttgggaagctgaggtgagaagatcacttgaggctaggatttcgagaccatcctgggcagcatagattctaggtccatgccatcctgtcatggacagttatacaggtggaccagtgaggcacacctgggcagtgctctgttcacatctgtcctgcacctgctctcatcctgccttcacaggtgcttaggagaacatgcagtagaacttttcatcaaacaaatggaacacgtcacagaattttgctaacatggacaactctgcacagaaaaatgaacgcactggcaaacatcccagacgtgccagtgaagtacagaaaggttttactgctgcatatccaacacaatcctccattccttttaaatctcaagcttcagtaatcccagaatcagaaaaaaaaggattcaatagtcaagccaagagatttcctcataagaagaatgatatcccaggacctgggttctacaatgttattcaccagtcaccggtgtccaacagtgtctcattgtccaagaaaggaacttgcatgtttccctcaatgtgcgcccgattggacaccatcatttctaaataccctgcagcgaatgcatacactatcccatcggattttatttccaagagagactttagtaattcgtgttccagcatgttccagttgccaagctttatgaaagctctcaagtttgaaactcctgcaccaaactattacaatgcctctgtctcttgctgcaagcagagaaacaacgtctgtactcgagccgggtttatgtcaaaaacccaaagaggatctttcgcttttgctgataaaggacctcccccagggcattatgatatcaacgaatcccttgtgaagcagtcgccaaatacattaatgtcttgttttaaatcaaaaaccaaccgtggattaaaactgacgtcaacaggcccgggacctggttattacaaccccagtgattgcacaaaagttccaaaaaagactcttttcccgaaaaaccccatcctgaacttctctgctcagccttcgcctctgcctccgaagccacctttcccaggtcctggtcagtatgagatcgtggactacttaggcccccgcaagcatttcatctctagtgcatcattcgtgtccaataccagccggtggacagcggcgccgcctcagccaggcctgcctggcccagctacgtacaagccagagcttccaggaaagcagtccttcctctacaacgaggacaagaaatggatcccggttctgtagggatgtcacacaaggtcaaggagaactccagccaccagcccaccctgcccagcgtccccaggacattcctcaggaggagaccgatcatgagtgtggcagctgacaacttggggggtggctctaccactctggcctggcatcctagccggactgctgccattgcctttgtcttgagctggagacattgctccctggagacttcaccccagccccacagactccagtggcttcctgagcagaagggaggagtggacagagccccctggctgcttccccacgcacccatccaggctgccttccggcacgactccctgccgcagactgaagggactcctgaagcgcagacttcaaggaggatcagtccaccctgaaggtggccaagcctggaagccccacccttccctgtttcattccttcattcatttacacattcattcattccctcactcctgcctttctcatttgtccctttctgacctcactcacttacggtatgtctactgggcgaaagctacctgcaggcaggtgatgctttttccaccagtccacagcttcctttctaaagtgaccacctgtttggaaagacctctctttactccttttagacctttttctctttggagtgggagatcatcttggaatggcagtggccgggcccgggggctgcgcttttccctgactttctctgctggcgggactgaattttctcaaggcttacaggcccttccatggagtccacatggcctgtctaggcctgatagctttcgtctctctatgtggagggaaaaagaaatgtgccctagtggttttggtggaggctgcacagattcgcggtgggtggggagctgccaggctccttttctgatctcccagcaggctttgactgacgctgtttagtctttctgtacattaaccccgccagataccgagaggttacaaagcctccaaggcctgtacaactgtggcctctccagagaagtggttctcagccttgactgcacactgtaatcacctggggactttaaaaagtactgaggcctggggcccacccacaaatgctgatttaactcctccagggtggggtctgggcagtggggaggcaggagccacccaggtgattccaatgataggtgtaggttgagaagcgccaccttccagcttcctaactggctctgggaggggagctgggtgggaagttcaggaggtgggaactttgtacacgcagagcacctggagcacctacagcatggctgtggttccacactcctctgtcatttaaccttcacacatcacctcgttctgacatcaagggtgcgtcacagccacagtgaggcctcgcctgggcagagcaactctgggtgccccactgggtccctcccacaggggcaggcaagcctaatgggaacccgaggcaaaaggaaacatcagtaatacgaatcctgtctttaaaactgtgatgttttgttcaccatggattttttttttgggggggggggccttaattttaaaaatattgcattaaacttatttatcttgcttattgaaaaaaaa

SEQ ID NO: 378906 - DNA, 1470 bp, Homo sapiens
  misc_feature (1309)..(1309): n is a, c, g, or t
cgcggacggcggaaggtggactcgcgaatgttaggcctgtgggtgccatagcgaccgggaggttgggctggccagattcagctgccgggaccggaccaggtgcttaggagaacatgcagtagaacttttcatcaaacaaatggaacacgtcacagaattttgctaacatggacaactctgcacagaaaaatgaacgcactggcaaacatcccagacgtgccagtgaagtacagaaagaatgatatcccaggacctgggttctacaatgttattcaccagtcaccggtgtccaacagtgtctcattgtccaagaaaggaacttgcatgtttccctcaatgtgcgcccgattggacaccatcatttctaaataccctgcagcgaatgcatacactatcccatcggattttatttccaagagagactttagtaattcgtgttccagcatgttccagttgccaagctttatgaaagctctcaagtttgaaactcctgcaccaaactattacaatgcctctgtctcttgctgcaagcagagaaacaacgtctgtactcgagccgggtttatgtcaaaaacccaaagaggatctttcgcttttgctgataaaggacctcccccagggcattatgatatcaacgaatcccttgtgaagcagtcgccaaatacattaatgtcttgttttaaatcaaaaaccaaccgtggattaaaactgacgtcaacaggcccgggacctggttattacaaccccagtgattgcacaaaagttccaaaaaagactcttttcccaggaggaagcaaggcttcggatttggcgggacatttgcccaagtccacacagccaacttgaggagccacagggaattggctcaggactaagtctttcctcattccctgtgatgctggattcccctggtgctgacattgttctatttttgtaacataaaatcttcgctggagtggcaggacattcagaagcagtcaagctctcatagctttataccgatggaagtttaagccctgactttcgagttggtgatacctgctggatttgtacttcagctctgctgtttttatgctctgtgaccttgggcagagttctaacctctctgagcctccatgccctcatctgtaaggtgggaataattcctgcctcgtaggattttgctttcagaattaaaaatacatgtttggctgggcgcagcagcttgcgcctgtaatcccagcactttgggaggccgaggtgggcgaatcacttgagatcaggtgttcgagaccagtctggccaacatggtgaaaccctgtctctactnaaaatacaaaaattatccaggcatgatggtgcacgcctgtaatcctagctactcgggaggctgaggcaggagaatcacttggacctgtgaggcccagattgtggtgagccgagattgcgccactgcactccagcctgggtgacagagtgagaccctgtctc

SEQ ID NO: 378907 - DNA, 1260 bp, Homo sapiens
tcaccaagtattcaaatccaaaacgtccttgaagacccagcgctccccagagccctcgcgagacttgggaccaaacatatctctcctttcctgccctcctggaacacctgtcggataccaagcctcccagcaatactgaaggtcctgaaacgagcccagcgcttggttaatgtttctataatgtacataattatcacggccatgataattaacatgcgcatggagttttacagatgacaagcttctcatcgctcacacgttgtcatatacacgcatttgctttcagatcgtcacagccatgagtgagacttgaagcccgttttacgtatgaagaaatgtcatttgggcctagacatcaacaatgagaaagaggcagttctagtctcagatcgtggggcagagaaagctccttgggaacatgggagaggaacgagttggtgcattgtagaaactgcccgaaggccagcagggctggtgcttaggagaacatgcagtagaacttttcatcaaacaaatggaacacgtcacagaattttgctaacatggacaactctgcacagaaaaatgaacgcactggcaaacatcccagacgtgccagtgaagtacagaaaggttttactgctgcatatccaacacaatcctccattccttttaaatctcaagcttcagtaatcccagaatcagaaaaaaaaggattcaatagtcaagccaagagatttcctcataagaagaatgatatcccaggacctgggttctacaatgttattcaccagtcaccggtgtccaacagtgtctcattgtccaagaaaggaacttgcatgtttccctcaatgtgcgcccgattggacaccatcatttctaaataccctgcagcgaatgcatacactatcccatcggattttatttccaagagagactttagtaattcgtgttccagcatgttccagttgccaagctttatgaaagctctcaagtttgaaactcctgcaccaaactattacaatgcctctgtctcttgctgcaagcagagaaacaacgtctgtactcgagccgggtttatgtcaaaaacccaaagaggatctttcgcttttgctgataaaggacctcccccagggtgtggtggtacatacctgtagtctcagctactcgggagactgagatgggaggatcactgagcccagcaggtcaaggctacagtgagctgtgattgtgattgtgccactgcattccagcctggacaagagagcaagaccctatctc

SEQ ID NO: 378908 - DNA, 633 bp, Homo sapiens
ccccttggcagagctccccttcgagagctccccttgtcgagctccccttgcgagctccccttggcctcccaaagtgctgggattacaggcatgagccaccacgcccaggctttttaaaaaatcatttgtttctaagtgtttcattattttttctgcctctgtctcttgactgactaggacgacagatatttgccaccacatctggctaattttaaatttttttgaagagaaaaaaattttgctcaggctggcctctaactcctggccttaagcaatcctcccaccttggcctcccaaagtactggaattacaggcatgggacactgcatccagcctgagttttaacaaatgtatgcacccatgtagatgctaccacagtcaagatatatttcagtcacccccccaaaggtttccttgtgcccctttgcaggaacctgggactgactgcactgggtggttctgcctcagtgtctctcatgaggttgcagtcaagcttttgcctgggactgtgcagtctctgaagacttgactagaactgaaggatctgcctgttggtaggtggcttcacttcctagtcatgcttctccatagagagaaaaagagtgaagccaccatgccttttatttatttatt

SEQ ID NO: 378909 - DNA, 308 bp, Homo sapiens
ctctgagagaaggcagcatccatgtcttgaggacactcaggcagcctgggacaggcttggggagtgaggagctgggaccccagccaacagtcatgctggacttgctccaggacacatcaccttggggtttgctcttcccaggtcagtaggcatccagcgctggggcagctgcttcaggacatcgccgaggacaagtctcctccccattctggttccaccatctgtagcctgtggctttcatcctcaagggctccatgcgaccgctgcacatccaggctggctgctggcgggatggacacgaatgttca

SEQ ID NO: 378910 - DNA, 2316 bp, Homo sapiens
tagagggcgggcctgagtgataacagggactctgggactctgggacttgtgggactgtggccgttttcgcaatttgggctggacgaaaaagacggtcttgctttcccggtcgccgctgtcgggaagggctgcagggtgtccgcgagacccgcggcccggcgagctgaccccgcctcgcctttcctgcctagccctcattccacggagccggtcgcgcccggtccttgcgcgacgcttcccggcccaggccgcctggtctggcgctggaggccggagtcccgcggcctgtgctggatccgcgcacacccagtggcggcggatgggcggccggggcggccggggcggccggtcctgagcgcggcccgggctgtcagggctggctgctggcgggatggacaccctggaggaggtgacttgggccaatgggagcacagcgctacccccacccctggcaccaaacatcagtgtgcctcatcgctgcctgctgctgctctacgaagacattggcacctccagggtccggtactgggacctcttgctgctcatccccaatgtgctcttcctcatcttcctgctctggaagcttccatctgctcgggcgaagatccgcatcacctccagccccatttttatcaccttctacatcctggtgtttgtggtggcgctggtgggcattgcccgggccgtggtatccatgacggtgagcacctcgaacgctgcaactgttgctgataagatcctgtgggagatcacccgcttcttcctgctggccatcgagctgagtgtgatcatcctgggcctggcctttggccacctggagagtaagtccagcatcaagcgggtgctggccatcaccacagtgctgtccctggcctactctgtcacccaggggaccctggagatcctgtaccctgatgcccatctctcagctgaggactttaatatctatggccatgggggccgccagttctggctggtcagctcctgcttcttcttcctggtctactctctggtggtcatccttcccaagaccccgctgaaggagcgcatctccctgccttctcggaggagcttctacgtgtatgcgggcatcctggcactgctcaacctactgcaggggctggggagtgtgctgctgtgcttcgacatcatcgaggggctctgctgtgtagatgccacaaccttcctgtacttcagcttcttcgctccgctcatctacgtggctttcctccggggcttcttcgggtgagtctgtggccgccggcgcccccgcgtggctgccggcggaactgcgccttcttccagcatgggtgtgaggattgaagctgagaggctgtgtatgcatacagtgcgcatgcgcacgcacatacatacatgcacttgggcacacacatacagatacacatgcacatgcacacagatatacgcacacccacccacatgtgcatggacacgtgcacatgcacacacggatgcacaagcatgcacacatgcacatgcacacacaaacacgcacatacggatacacacgggcatatgcacacaaacatgcacgtgcacacccacatgcatgcatacacacatgaacacgtgctcaacatatacatacatgtagatatatgcacatatccacatatacatacatatatatgcacattgtatgtacagtacacacagacatactctccccacgagagagagagtgactatgcacggtgttctacattgctggtttttatttaataatatattaactcattcattcgcaagcattcattgagcacctactgtgtgccagacactgctagagccagaagatgcgaggcccacagcggatgcaaatcctgtcctcacaaagcttgtaccctgttgggggaagacttaagtggggagcaggtttggggtgggaagtcagttggattctctgggggtgagtacactgctgtgcacatgtgcatctgcagaagcgtctgtgagatgggatgctgaagacatgggattgggggtcccactccagaccttaatgtggtcggaatgtgggtgttttgtcccccctttctcacctgccaggtcttgtggggaggggatcagcctcccacctgggtgaagctgggagagggccagactggtccatggccccagcttggatctttgcacacaatttctcccctgagcctcaggctcctttttgtaaattgggtgtagtgtgtcccccttggagagttgccctgagggccgagggacgaggtcagagtggagtgggtggtaacatgagcagcaggggtcacaggagtgggggcggaggccacagccaat

SEQ ID NO: 378911 - DNA, 2315 bp, Homo sapiens
ctacgccgacggccatgcggctcggcccgcacattccgtgacaccgaaaggggccccagcatatttcgcaatttgggctggacgaaaaagacggtcttgctttcccggtcgccgctgtcgggaagggctgcagggtgtccgcgagacccgcggcccggcgagctgaccccgcctcgcctttcctgcctagccctcattccacggagccggtcgcgcccggtccttgcgcgacgcttcccggcccaggccgcctggtctggcgctggaggccggagtcccgcggcctgtgctggatccgcgcacacccagtggcggcggatgggcggccggggcggccggggcggccggtcctgagcgcggcccgggctgtcagggctggctgctggcgggatggacaccctggaggaggtgacttgggccaatgggagcacagcgctacccccacccctggcaccaaacatcagtgtgcctcatcgctgcctgctgctgctctacgaagacattggcacctccagggtccggtactgggacctcttgctgctcatccccaatgtgctcttcctcatcttcctgctctggaagcttccatctgctcgggcgaagatccgcatcacctccagccccatttttatcaccttctacatcctggtgtttgtggtggcgctggtgggcattgcccgggccgtggtatccatgacggtgagcacctcgaacgctgcaactgttgctgataagatcctgtgggagatcacccgcttcttcctgctggccatcgagctgagtgtgatcatcctgggcctggcctttggccacctggagagtaagtccagcatcaagcgggtgctggccatcaccacagtgctgtccctggcctactctgtcacccaggggaccctggagatcctgtaccctgatgcccatctctcagctgaggactttaatatctatggccatgggggccgccagttctggctggtcagctcctgcttcttcttcctggtctactctctggtggtcatccttcccaagaccccgctgaaggagcgcatctccctgccttctcggaggagcttctacgtgtatgcgggcatcctggcactgctcaacctactgcaggggctggggagtgtgctgctgtgcttcgacatcatcgaggggctctgctgtgtagatgccacaaccttcctgtacttcagcttcttcgctccgctcatctacgtggctttcctccggggcttcttcgggtgagtctgtggccgccggcgcccccgcgtggctgccggcggaactgcgccttcttccagcatgggtgtgaggattgaagctgagaggctgtgtatgcatacagtgcgcatgcgcacgcacatacatacatgcacttgggcacacacatacagatacacatgcacatgcacacagatatacgcacacccacccacatgtgcatggacacgtgcacatgcacacacggatgcacaagcatgcacacatgcacatgcacacacaaacacgcacatacggatacacacgggcatatgcacacaaacatgcacgtgcacacccacatgcatgcatacacacatgaacacgtgctcaacatatacatacatgtagatatatgcacatatccacatatacatacatatatatgcacattgtatgtacagtacacacagacatactctccccacgagagagagagtgactatgcacggtgttctacattgctggtttttatttaataatatattaactcattcattcgcaagcattcattgagcacctactgtgtgccagacactgctagagccagaagatgcgaggcccacagcggatgcaaatcctgtcctcacaaagcttgtaccctgttgggggaagacttaagtggggagcaggtttggggtgggaagtcagttggattctctgggggtgagtacactgctgtgcacatgtgcatctgcagaagcgtctgtgagatgggatgctgaagacatgggattgggggtcccactccagaccttaatgtggtcggaatgtgggtgttttgtcccccctttctcacctgccaggtcttgtggggaggggatcagcctcccacctgggtgaagctgggagagggccagactggtccatggccccagcttggatctttgcacacaatttctcccctgagcctcaggctcctttttgtaaattgggtgtagtgtgtcccccttggagagttgccctgagggccgagggacgaggtcagagtggagtgggtggtaacatgagcagcaggggtcacaggagtgggggcggaggccacagccaat

SEQ ID NO: 378912 - DNA, 2229 bp, Homo sapiens
ggctggtacggcccgggagttagggatgctgtcgggaagggctgcagggtgtccgcgagacccgcggcccggcgagctgaccccgcctcgcctttcctgcctagccctcattccacggagccggtcgcgcccggtccttgcgcgacgcttcccggcccaggccgcctggtctggcgctggaggccggagtcccgcggcctgtgctggatccgcgcacacccagtggcggcggatgggcggccggggcggccggggcggccggtcctgagcgcggcccgggctgtcagggctggctgctggcgggatggacaccctggaggaggtgacttgggccaatgggagcacagcgctacccccacccctggcaccaaacatcagtgtgcctcatcgctgcctgctgctgctctacgaagacattggcacctccagggtccggtactgggacctcttgctgctcatccccaatgtgctcttcctcatcttcctgctctggaagcttccatctgctcgggcgaagatccgcatcacctccagccccatttttatcaccttctacatcctggtgtttgtggtggcgctggtgggcattgcccgggccgtggtatccatgacggtgagcacctcgaacgctgcaactgttgctgataagatcctgtgggagatcacccgcttcttcctgctggccatcgagctgagtgtgatcatcctgggcctggcctttggccacctggagagtaagtccagcatcaagcgggtgctggccatcaccacagtgctgtccctggcctactctgtcacccaggggaccctggagatcctgtaccctgatgcccatctctcagctgaggactttaatatctatggccatgggggccgccagttctggctggtcagctcctgcttcttcttcctggtctactctctggtggtcatccttcccaagaccccgctgaaggagcgcatctccctgccttctcggaggagcttctacgtgtatgcgggcatcctggcactgctcaacctactgcaggggctggggagtgtgctgctgtgcttcgacatcatcgaggggctctgctgtgtagatgccacaaccttcctgtacttcagcttcttcgctccgctcatctacgtggctttcctccggggcttcttcgggtgagtctgtggccgccggcgcccccgcgtggctgccggcggaactgcgccttcttccagcatgggtgtgaggattgaagctgagaggctgtgtatgcatacagtgcgcatgcgcacgcacatacatacatgcacttgggcacacacatacagatacacatgcacatgcacacagatatacgcacacccacccacatgtgcatggacacgtgcacatgcacacacggatgcacaagcatgcacacatgcacatgcacacacaaacacgcacatacggatacacacgggcatatgcacacaaacatgcacgtgcacacccacatgcatgcatacacacatgaacacgtgctcaacatatacatacatgtagatatatgcacatatccacatatacatacatatatatgcacattgtatgtacagtacacacagacatactctccccacgagagagagagtgactatgcacggtgttctacattgctggtttttatttaataatatattaactcattcattcgcaagcattcattgagcacctactgtgtgccagacactgctagagccagaagatgcgaggcccacagcggatgcaaatcctgtcctcacaaagcttgtaccctgttgggggaagacttaagtggggagcaggtttggggtgggaagtcagttggattctctgggggtgagtacactgctgtgcacatgtgcatctgcagaagcgtctgtgagatgggatgctgaagacatgggattgggggtcccactccagaccttaatgtggtcggaatgtgggtgttttgtcccccctttctcacctgccaggtcttgtggggaggggatcagcctcccacctgggtgaagctgggagagggccagactggtccatggccccagcttggatctttgcacacaatttctcccctgagcctcaggctcctttttgtaaattgggtgtagtgtgtcccccttggagagttgccctgagggccgagggacgaggtcagagtggagtgggtggtaacatgagcagcaggggtcacaggagtgggggcggaggccacagccaat

SEQ ID NO: 378913 - DNA, 2166 bp, Homo sapiens
agcggggccgcggcccaggccgggaggtggagcgcggctgccgccagctggtccactgacaactgctgccagctggaaggcgcgtagggcgagaggtggcgcgtcctcagctttccagtcttcgattccgcccgctttccgagtgagaaacgcaggcctctctcttccgtgaagcagcgtcttgtctctgcacctcctctgtgctgtctctttaagagtgtcagggctggctgctggcgggatggacaccctggaggaggtgacttgggccaatgggagcacagcgctacccccacccctggcaccaaacatcagtgtgcctcatcgctgcctgctgctgctctacgaagacattggcacctccagggtccggtactgggacctcttgctgctcatccccaatgtgctcttcctcatcttcctgctctggaagcttccatctgctcgggcgaagatccgcatcacctccagccccatttttatcaccttctacatcctggtgtttgtggtggcgctggtgggcattgcccgggccgtggtatccatgacggtgagcacctcgaacgctgcaactgttgctgataagatcctgtgggagatcacccgcttcttcctgctggccatcgagctgagtgtgatcatcctgggcctggcctttggccacctggagagtaagtccagcatcaagcgggtgctggccatcaccacagtgctgtccctggcctactctgtcacccaggggaccctggagatcctgtaccctgatgcccatctctcagctgaggactttaatatctatggccatgggggccgccagttctggctggtcagctcctgcttcttcttcctggtctactctctggtggtcatccttcccaagaccccgctgaaggagcgcatctccctgccttctcggaggagcttctacgtgtatgcgggcatcctggcactgctcaacctactgcaggggctggggagtgtgctgctgtgcttcgacatcatcgaggggctctgctgtgtagatgccacaaccttcctgtacttcagcttcttcgctccgctcatctacgtggctttcctccggggcttcttcgggtgagtctgtggccgccggcgcccccgcgtggctgccggcggaactgcgccttcttccagcatgggtgtgaggattgaagctgagaggctgtgtatgcatacagtgcgcatgcgcacgcacatacatacatgcacttgggcacacacatacagatacacatgcacatgcacacagatatacgcacacccacccacatgtgcatggacacgtgcacatgcacacacggatgcacaagcatgcacacatgcacatgcacacacaaacacgcacatacggatacacacgggcatatgcacacaaacatgcacgtgcacacccacatgcatgcatacacacatgaacacgtgctcaacatatacatacatgtagatatatgcacatatccacatatacatacatatatatgcacattgtatgtacagtacacacagacatactctccccacgagagagagagtgactatgcacggtgttctacattgctggtttttatttaataatatattaactcattcattcgcaagcattcattgagcacctactgtgtgccagacactgctagagccagaagatgcgaggcccacagcggatgcaaatcctgtcctcacaaagcttgtaccctgttgggggaagacttaagtggggagcaggtttggggtgggaagtcagttggattctctgggggtgagtacactgctgtgcacatgtgcatctgcagaagcgtctgtgagatgggatgctgaagacatgggattgggggtcccactccagaccttaatgtggtcggaatgtgggtgttttgtcccccctttctcacctgccaggtcttgtggggaggggatcagcctcccacctgggtgaagctgggagagggccagactggtccatggccccagcttggatctttgcacacaatttctcccctgagcctcaggctcctttttgtaaattgggtgtagtgtgtcccccttggagagttgccctgagggccgagggacgaggtcagagtggagtgggtggtaacatgagcagcaggggtcacaggagtgggggcggaggccacagccaat

SEQ ID NO: 378914 - DNA, 2208 bp, Homo sapiens
ccaggggacccgacgacacttgctggctgcgtgacctcggtcacaccagggccattttgctgacaagacaacagaggccgggcgcggtggctcacgcctgtaatcccagcactttgggaagccgaggtcagtaggcatccagcgctggggcagctgcttcaggacatcgccgaggacaagtctcctccccattctggttccaccatctgtagcctgtggctttcatcctcaagggctccatgcgaccgctgcacatccagtgtcagggctggctgctggcgggatggacaccctggaggaggtgacttgggccaatgggagcacagcgctacccccacccctggcaccaaacatcagtgtgcctcatcgctgcctgctgctgctctacgaagacattggcacctccagggtccggtactgggacctcttgctgctcatccccaatgtgctcttcctcatcttcctgctctggaagcttccatctgctcgggcgaagatccgcatcacctccagccccatttttatcaccttctacatcctggtgtttgtggtggcgctggtgggcattgcccgggccgtggtatccatgacggtgagcacctcgaacgctgcaactgttgctgataagatcctgtgggagatcacccgcttcttcctgctggccatcgagctgagtgtgatcatcctgggcctggcctttggccacctggagagtaagtccagcatcaagcgggtgctggccatcaccacagtgctgtccctggcctactctgtcacccaggggaccctggagatcctgtaccctgatgcccatctctcagctgaggactttaatatctatggccatgggggccgccagttctggctggtcagctcctgcttcttcttcctggtctactctctggtggtcatccttcccaagaccccgctgaaggagcgcatctccctgccttctcggaggagcttctacgtgtatgcgggcatcctggcactgctcaacctactgcaggggctggggagtgtgctgctgtgcttcgacatcatcgaggggctctgctgtgtagatgccacaaccttcctgtacttcagcttcttcgctccgctcatctacgtggctttcctccggggcttcttcgggtgagtctgtggccgccggcgcccccgcgtggctgccggcggaactgcgccttcttccagcatgggtgtgaggattgaagctgagaggctgtgtatgcatacagtgcgcatgcgcacgcacatacatacatgcacttgggcacacacatacagatacacatgcacatgcacacagatatacgcacacccacccacatgtgcatggacacgtgcacatgcacacacggatgcacaagcatgcacacatgcacatgcacacacaaacacgcacatacggatacacacgggcatatgcacacaaacatgcacgtgcacacccacatgcatgcatacacacatgaacacgtgctcaacatatacatacatgtagatatatgcacatatccacatatacatacatatatatgcacattgtatgtacagtacacacagacatactctccccacgagagagagagtgactatgcacggtgttctacattgctggtttttatttaataatatattaactcattcattcgcaagcattcattgagcacctactgtgtgccagacactgctagagccagaagatgcgaggcccacagcggatgcaaatcctgtcctcacaaagcttgtaccctgttgggggaagacttaagtggggagcaggtttggggtgggaagtcagttggattctctgggggtgagtacactgctgtgcacatgtgcatctgcagaagcgtctgtgagatgggatgctgaagacatgggattgggggtcccactccagaccttaatgtggtcggaatgtgggtgttttgtcccccctttctcacctgccaggtcttgtggggaggggatcagcctcccacctgggtgaagctgggagagggccagactggtccatggccccagcttggatctttgcacacaatttctcccctgagcctcaggctcctttttgtaaattgggtgtagtgtgtcccccttggagagttgccctgagggccgagggacgaggtcagagtggagtgggtggtaacatgagcagcaggggtcacaggagtgggggcggaggccacagccaat

SEQ ID NO: 378915 - DNA, 308 bp, Homo sapiens
ctaggaggccccgcgctgacccgccttctccgcagctgtgtagatgccacaaccttcctgtacttcagcttcttcgctccgctcatctacgtggctttcctccggggcttcttcgggtgagtctgtggccgccggcgcccccgcgtggctgccggcggaactgcgccttcttccagcatgggtgtgaggattgaagctgagaggctgtgtatgcatacagtgcgcatgcgcacgcacatacatacatgcacttgggcacacacatacagatacacatgcacatgcacacagatatacgcacacccacc

SEQ ID NO: 378916 - DNA, 497 bp, Homo sapiens
gttgaagcctcatgatttatgtccattcttcctccacacggtgtccacacacccatttcaccatgaggaagcaggcacagatgccccccgcctgagctcacacagccagggggaggagggctggggtttccaaaacaagtctagatgggctctggggtccagctcacaggcccactcagagtgggtgtcaggcgactgttggtcaattccttccttatctggtggccccatcagcctggagaggaaggctcttcctgaatcactcagtgaggcttccatgcccctcttttccttttatcagctcggagcccaagatcctcttctcctacaaatgccaagtggacgagacagaggagccagatgtacacctaccccagccctacgctgtggcccggcgggagggcctggaggctgcaggggctgctggggcctcagctgccagctactcgagcacgcatctcgactctgccggcggggtggcctacctggatgacatc

SEQ ID NO: 378917 - DNA, 1441 bp, Homo sapiens
tagagggcgggcctgagtgataacagggactctgggactctgggacttgtgggactgtggccgttttcgcaatttgggctggacgaaaaagacggtcttgctttcccggtcgccgctgtcgggaagggctgcagggtgtccgcgagacccgcggcccggcgagctgaccccgcctcgcctttcctgcctagccctcattccacggagccggtcgcgcccggtccttgcgcgacgcttcccggcccaggccgcctggtctggcgctggaggccggagtcccgcggcctgtgctggatccgcgcacacccagtggcggcggatgggcggccggggcggccggggcggccggtcctgagcgcggcccgggctgtcagggctggctgctggcgggatggacaccctggaggaggtgacttgggccaatgggagcacagcgctacccccacccctggcaccaaacatcagtgtgcctcatcgctgcctgctgctgctctacgaagacattggcacctccagggtccggtactgggacctcttgctgctcatccccaatgtgctcttcctcatcttcctgctctggaagcttccatctgctcgggcgaagatccgcatcacctccagccccatttttatcaccttctacatcctggtgtttgtggtggcgctggtgggcattgcccgggccgtggtatccatgacggtgagcacctcgaacgctgcaactgttgctgataagatcctgtgggagatcacccgcttcttcctgctggccatcgagctgagtgtgatcatcctgggcctggcctttggccacctggagagtaagtccagcatcaagcgggtgctggccatcaccacagtgctgtccctggcctactctgtcacccaggggaccctggagatcctgtaccctgatgcccatctctcagctgaggactttaatatctatggccatgggggccgccagttctggctggtcagctcctgcttcttcttcctggtctactctctggtggtcatccttcccaagaccccgctgaaggagcgcatctccctgccttctcggaggagcttctacgtgtatgcgggcatcctggcactgctcaacctactgcaggggctggggagtgtgctgctgtgcttcgacatcatcgaggggctctgctgtgtagatgccacaaccttcctgtacttcagcttcttcgctccgctcatctacgtggctttcctccggggcttcttcggctcggagcccaagatcctcttctcctacaaatgccaagtggacgagacagaggagccagatgtacacctaccccagccctacgctgtggcccggcgggagggcctggaggctgcaggggctgctggggcctcagctgccagctactcgagcacgcatctcgactctgccggcggggtggcctacctggatgacatc

SEQ ID NO: 378918 - DNA, 1311 bp, Homo sapiens
tagagggcgggcctgagtgataacagggactctgggactctgggacttgtgggactgtggccgttttcgcaatttgggctggacgaaaaagacggtcttgctttcccggtcgccgctgtcgggaagggctgcagggtgtccgcgagacccgcggcccggcgagctgaccccgcctcgcctttcctgcctagccctcattccacggagccggtcgcgcccggtccttgcgcgacgcttcccggcccaggccgcctggtctggcgctggaggccggagtcccgcggcctgtgctggatccgcgcacacccagtggcggcggatgggcggccggggcggccggggcggccggtcctgagcgcggcccgggctgtcagggctggctgctggcgggatggacaccctggaggaggtgacttgggccaatgggagcacagcgctacccccacccctggcaccaaacatcagtgtgcctcatcgctgcctgctgctgctctacgaagacattggcacctccagggtccggtactgggacctcttgctgctcatccccaatgtgctcttcctcatcttcctgctctggaagcttccatctgctcgggcgaagatccgcatcacctccagccccatttttatcaccttctacatcctggtgtttgtggtggcgctggtgggcattgcccgggccgtggtatccatgacggtgagcacctcgaacgctgcaactgttgctgataagatcctgtgggagatcacccgcttcttcctgctggccatcgagctgagtgtgatcatcctgggcctggcctttggccacctggagagtaagtccagcatcaagcgggtgctggccatcaccacagtgctgtccctggcctactctgtcacccaggggaccctggagatcctgtaccctgatgcccatctctcagctgaggactttaatatctatggccatgggggccgccagttctggctggtcagctcctgcttcttcttcctggtgaggttcaggctggggcagctggggtggctggggccttagggccaggtagggattggattcctgggtttctggctgtgggtctgggctggcgcccccagcaccttctcagccctgcctgtctctgtaggtctactctctggtggtcatccttcccaagaccccgctgaaggagcgcatctccctgccttgtgagcagctggccggcggctctgggacaggcggggatgggagggagtctaccgggccactgtagagctggtagctgggagctggagctgtagagttccaggctgggagctggagagccc

SEQ ID NO: 378919 - DNA, 2186 bp, Homo sapiens
cgttaactctagaggaccccctccggctggtactccttggtaagcgtaacaccggtcgcgcatgctcttccttgacctcattcaggagggcacctcggctcattcggaagcgcacgtggcgcgtcctcagctttccagtcttcgattccgcccgctttccgagtgagaaacgcaggcctctctcttccgtgaagcagcgtcttgtctctgcacctcctctgtgctgtctctttaagagtgtcagggctggctgctggcgggatggacaccctggaggaggtgacttgggccaatgggagcacagcgctacccccacccctggcaccaaacatcagtgtgcctcatcgctgcctgctgctgctctacgaagacattggcacctccagggtccggtactgggacctcttgctgctcatccccaatgtgctcttcctcatcttcctgctctggaagcttccatctgctcgggcgaagatccgcatcacctccagccccatttttatcaccttctacatcctggtgtttgtggtggcgctggtgggcattgcccgggccgtggtatccatgacggtgagcacctcgaacgctgcaactgttgctgataagatcctgtgggagatcacccgcttcttcctgctggccatcgagctgagtgtgatcatcctgggcctggcctttggccacctggagagtaagtccagcatcaagcgggtgctggccatcaccacagtgctgtccctggcctactctgtcacccaggggaccctggagatcctgtaccctgatgcccatctctcagctgaggactttaatatctatggccatgggggccgccagttctggctggtcagctcctgcttcttcttcctggtctactctctggtggtcatccttcccaagaccccgctgaaggagcgcatctccctgccttctcggaggagcttctacgtgtatgcgggcatcctggcactgctcaacctactgcaggggctggggagtgtgctgctgtgcttcgacatcatcgaggggctctgctgtgtagatgccacaaccttcctgtacttcagcttcttcgctccgctcatctacgtggctttcctccggggcttcttcgggtgagtctgtggccgccggcgcccccgcgtggctgccggcggaactgcgccttcttccagcatgggtgtgaggattgaagctgagaggctgtgtatgcatacagtgcgcatgcgcacgcacatacatacatgcacttgggcacacacatacagatacacatgcacatgcacacagatatacgcacacccacccacatgtgcatggacacgtgcacatgcacacacggatgcacaagcatgcacacatgcacatgcacacacaaacacgcacatacggatacacacgggcatatgcacacaaacatgcacgtgcacacccacatgcatgcatacacacatgaacacgtgctcaacatatacatacatgtagatatatgcacatatccacatatacatacatatatatgcacattgtatgtacagtacacacagacatactctccccacgagagagagagtgactatgcacggtgttctacattgctggtttttatttaataatatattaactcattcattcgcaagcattcattgagcacctactgtgtgccagacactgctagagccagaagatgcgaggcccacagcggatgcaaatcctgtcctcacaaagcttgtaccctgttgggggaagacttaagtggggagcaggtttggggtgggaagtcagttggattctctgggggtgagtacactgctgtgcacatgtgcatctgcagaagcgtctgtgagatgggatgctgaagacatgggattgggggtcccactccagaccttaatgtggtcggaatgtgggtgttttgtcccccctttctcacctgccaggtcttgtggggaggggatcagcctcccacctgggtgaagctgggagagggccagactggtccatggccccagcttggatctttgcacacaatttctcccctgagcctcaggctcctttttgtaaattgggtgtagtgtgtcccccttggagagttgccctgagggccgagggacgaggtcagagtggagtgggtggtaacatgagcagcaggggtcacaggagtgggggcggaggccacagccaat

SEQ ID NO: 378920 - DNA, 2191 bp, Homo sapiens
cgctgtgcgcgtgcgctcgcctgcgctgtggtgggagctggagcggaggtcagtaggcatccagcgctggggcagctgcttcaggacatcgccgaggacaagtctcctccccattctggttccaccatctgtagcctgtggctttcatcctcaagggctccatgcgaccgctgcacatccaggacaggagcaaggagaagaatgggacccaatctcattccagcccagcggtgctgtcgcaagtgtcagggctggctgctggcgggatggacaccctggaggaggtgacttgggccaatgggagcacagcgctacccccacccctggcaccaaacatcagtgtgcctcatcgctgcctgctgctgctctacgaagacattggcacctccagggtccggtactgggacctcttgctgctcatccccaatgtgctcttcctcatcttcctgctctggaagcttccatctgctcgggcgaagatccgcatcacctccagccccatttttatcaccttctacatcctggtgtttgtggtggcgctggtgggcattgcccgggccgtggtatccatgacggtgagcacctcgaacgctgcaactgttgctgataagatcctgtgggagatcacccgcttcttcctgctggccatcgagctgagtgtgatcatcctgggcctggcctttggccacctggagagtaagtccagcatcaagcgggtgctggccatcaccacagtgctgtccctggcctactctgtcacccaggggaccctggagatcctgtaccctgatgcccatctctcagctgaggactttaatatctatggccatgggggccgccagttctggctggtcagctcctgcttcttcttcctggtctactctctggtggtcatccttcccaagaccccgctgaaggagcgcatctccctgccttctcggaggagcttctacgtgtatgcgggcatcctggcactgctcaacctactgcaggggctggggagtgtgctgctgtgcttcgacatcatcgaggggctctgctgtgtagatgccacaaccttcctgtacttcagcttcttcgctccgctcatctacgtggctttcctccggggcttcttcgggtgagtctgtggccgccggcgcccccgcgtggctgccggcggaactgcgccttcttccagcatgggtgtgaggattgaagctgagaggctgtgtatgcatacagtgcgcatgcgcacgcacatacatacatgcacttgggcacacacatacagatacacatgcacatgcacacagatatacgcacacccacccacatgtgcatggacacgtgcacatgcacacacggatgcacaagcatgcacacatgcacatgcacacacaaacacgcacatacggatacacacgggcatatgcacacaaacatgcacgtgcacacccacatgcatgcatacacacatgaacacgtgctcaacatatacatacatgtagatatatgcacatatccacatatacatacatatatatgcacattgtatgtacagtacacacagacatactctccccacgagagagagagtgactatgcacggtgttctacattgctggtttttatttaataatatattaactcattcattcgcaagcattcattgagcacctactgtgtgccagacactgctagagccagaagatgcgaggcccacagcggatgcaaatcctgtcctcacaaagcttgtaccctgttgggggaagacttaagtggggagcaggtttggggtgggaagtcagttggattctctgggggtgagtacactgctgtgcacatgtgcatctgcagaagcgtctgtgagatgggatgctgaagacatgggattgggggtcccactccagaccttaatgtggtcggaatgtgggtgttttgtcccccctttctcacctgccaggtcttgtggggaggggatcagcctcccacctgggtgaagctgggagagggccagactggtccatggccccagcttggatctttgcacacaatttctcccctgagcctcaggctcctttttgtaaattgggtgtagtgtgtcccccttggagagttgccctgagggccgagggacgaggtcagagtggagtgggtggtaacatgagcagcaggggtcacaggagtgggggcggaggccacagccaat

SEQ ID NO: 378921 - DNA, 2296 bp, Homo sapiens
agcggggccgcggcccaggccgggaggtggagcgcggctgccgccagctggtccactgacaactgctgccagctggaaggcgcgtagggcgagaggtggcgcgtcctcagctttccagtcttcgattccgcccgctttccgagtgagaaacgcaggcctctctcttccgtgaagcagcgtcttgtctctgcacctcctctgtgctgtctctttaagagtgtcagggctggctgctggcgggatggacaccctggaggaggtgacttgggccaatgggagcacagcgctacccccacccctggcaccaaacatcagtgtgcctcatcgctgcctgctgctgctctacgaagacattggcacctccagggtccggtactgggacctcttgctgctcatccccaatgtgctcttcctcatcttcctgctctggaagcttccatctgctcgggcgaagatccgcatcacctccagccccatttttatcaccttctacatcctggtgtttgtggtggcgctggtgggcattgcccgggccgtggtatccatgacggtgagcacctcgaacgctgcaactgttgctgataagatcctgtgggagatcacccgcttcttcctgctggccatcgagctgagtgtgatcatcctgggcctggcctttggccacctggagagtaagtccagcatcaagcgggtgctggccatcaccacagtgctgtccctggcctactctgtcacccaggggaccctggagatcctgtaccctgatgcccatctctcagctgaggactttaatatctatggccatgggggccgccagttctggctggtcagctcctgcttcttcttcctggtgaggttcaggctggggcagctggggtggctggggccttagggccaggtagggattggattcctgggtttctggctgtgggtctgggctggcgcccccagcaccttctcagccctgcctgtctctgtaggtctactctctggtggtcatccttcccaagaccccgctgaaggagcgcatctccctgccttctcggaggagcttctacgtgtatgcgggcatcctggcactgctcaacctactgcaggggctggggagtgtgctgctgtgcttcgacatcatcgaggggctctgctgtgtagatgccacaaccttcctgtacttcagcttcttcgctccgctcatctacgtggctttcctccggggcttcttcgggtgagtctgtggccgccggcgcccccgcgtggctgccggcggaactgcgccttcttccagcatgggtgtgaggattgaagctgagaggctgtgtatgcatacagtgcgcatgcgcacgcacatacatacatgcacttgggcacacacatacagatacacatgcacatgcacacagatatacgcacacccacccacatgtgcatggacacgtgcacatgcacacacggatgcacaagcatgcacacatgcacatgcacacacaaacacgcacatacggatacacacgggcatatgcacacaaacatgcacgtgcacacccacatgcatgcatacacacatgaacacgtgctcaacatatacatacatgtagatatatgcacatatccacatatacatacatatatatgcacattgtatgtacagtacacacagacatactctccccacgagagagagagtgactatgcacggtgttctacattgctggtttttatttaataatatattaactcattcattcgcaagcattcattgagcacctactgtgtgccagacactgctagagccagaagatgcgaggcccacagcggatgcaaatcctgtcctcacaaagcttgtaccctgttgggggaagacttaagtggggagcaggtttggggtgggaagtcagttggattctctgggggtgagtacactgctgtgcacatgtgcatctgcagaagcgtctgtgagatgggatgctgaagacatgggattgggggtcccactccagaccttaatgtggtcggaatgtgggtgttttgtcccccctttctcacctgccaggtcttgtggggaggggatcagcctcccacctgggtgaagctgggagagggccagactggtccatggccccagcttggatctttgcacacaatttctcccctgagcctcaggctcctttttgtaaattgggtgtagtgtgtcccccttggagagttgccctgagggccgagggacgaggtcagagtggagtgggtggtaacatgagcagcaggggtcacaggagtgggggcggaggccacagccaat

SEQ ID NO: 378922 - DNA, 331 bp, Homo sapiens
aattgagttacaggagaatactgtgaacaattgtacagctaaaagtaataatctaaattaaatgtacacattcctagaaacacacaaatcacaaaaactgactcaaggagaaatagaatatctcaacagacctataacaactaaagatatggaatcagtaaccaaaagccttccaacaaagaaaagcccaggaatagatgatcttcactgatggattctaccaaacatttaagaaagaattaacactaattctactcaaactcttccacaaaaaataagagaagagtagagaaaactttctaaaatatcttatgagggcagcattaccgtg

SEQ ID NO: 378923 - DNA, 462 bp, Homo sapiens
ggtattatatcatcataagccagagcaaaaggaaaataacaactgcattttaataaaattaagggtatttatgatttgattccagtaagtgctaaaaccagagtgtgtggagtagtcaagccttaaatttgttagtgcacaaaaggttgatttattacattttagttgttagagtccaaaggagataggcacaacttatctacatataaaaatatacatagagatacatacgtgtgtgtacccaatatatacacgcagacacataatacacataaaagcttattaaaaacaaccaaattctattttaatcctcttaaaaaggtaaaaagctgcatcgtcaattttgctgtgcgtttcccataatctcagttaatgcctctggggaagagagctgaattttggcaacagtatgtaacttggtaattggacacaactccaagtcatttgctaggactccaagtt

SEQ ID NO: 378924 - DNA, 268 bp, Homo sapiens
gaactgtagacatttaactcatagattagagattgtaataggaaattggagaggtatatgcccccaggtgaaacattggtcaagtctttatgagatagtattgaacctaatgcagaattttattcttctccatttttatattattgtttactatataaattaaacagccatttagttgcatctctaggtggtttttgttttcctctgacacttacttgaatgttctcctataaagtactgagcataataacttacttttaaatcacat

SEQ ID NO: 378925 - DNA, 383 bp, Homo sapiens
aaataactcccacaagtttagtattccaataatggaacactaggcataaatggattaagttgacacataaaattaaccatgacattcaattaccttattagattgtcataaagattaagtgagttaatatatgacaagcacttaaaatagtgtcacacacatagtagcaatatacgttacttgctattattaatgtcattactattattatgttagtggttttgttctcttcatttctgtatcctcattgccaaaaataatgcttggagcttagtatgtgctcacttaatatttgttgagtgaattaaaatgatttaataaatataaacttcatatgtaaaataatagaacctaaatatttctacttgcaaaatgtgtattat

SEQ ID NO: 378926 - DNA, 1168 bp, Homo sapiens
catagtttatgtgttaataggcgctaactcttacagttagcacctactattcaaactgttgaagaagtcgtggtcttttgcctacacctgattcaatgcctgttaaagagataccggattccacctaacgtctgcacaaaggataataaacacagcaacagtgatcaacagctactattgttttcctcctgtcaccagactattatgacttggcagttctgctgtctcttcgttccactgtcagttctttacttccaacagttaagagccacacaaagtaaataaataagacaggacttagtaagaatttagtgctaataagaggcaagaagtaagaaattcttctcatggttaagtctctggaactctactccctggattcaaatcccagccttgtgatttttccggtgtgtgatctttaacaagtatttaatctctctgtgcctcagtttcctcaattataaaattaagatagattttgtctattttatagggttgttgtgaggattaaattagtgaatacgtgtaaagtgctcaaaatggtgtctggtacatagtaaatactgtaaaatgctttctgctgttaccactgctgttgttactggtatcaatgtgactgtcatatcgttttcttctaatctgttgccttatttgacatagcaagccctaatagaaggcctagcatcactgggttccaaatcagaaagtccatgcattttcaaaccttataacatgaatttttttgtttaaaaaagccagcatcctggggcctaccctcattaggccttctataccactaataaatatatctttttaggcaacctaagtagtctgaagcaagttgtctatggctacattttgaaaaacagtgttctgtagaagttttacacatacatgtttttctggattcatgcttctctgccatttgaaagactgtagttgtcaatgatagactggattaagaaaatgtggcacatatacaccatggaatactacgcagccataaaaaaggatgagttcatgtcctctgtagggacatggatgaagctggaaaccatcattctcagcaaactatcgcaaggacaaaaaaccaaacaccacatgttctcactcataggtgggaaatgaacaatgagaacacatggacacaggaaggggaacatcacac

SEQ ID NO: 378927 - DNA, 1282 bp, Homo sapiens
catagtttatgtgttaataggcgctaactcttacagttagcacctactattcaaactgttgaagaagtcgtggtcttttgcctacacctgattcaatgcctgttaaagagataccggattccacctaacgtctgcacaaaggataataaacacagcaacagtgatcaacagctactattgttttcctcctgtcaccagactattatgacttggcagttctgctgtctcttcgttccactgtcagttctttacttccaacagttaagagccacacaaagtaaataaataagacaggacttagtaagaatttagtgctaataagaggcaagaagtaagaaattcttctcatggttaagtctctggaactctactccctggattcaaatcccagccttgtgatttttccggtgtgtgatctttaacaagtatttaatctctctgtgcctcagtttcctcaattataaaattaagatagattttgtctattttatagggttgttgtgaggattaaattagtgaatacgtgtaaagtgctcaaaatggtgtctggtacatagtaaatactgtaaaatgctttctgctgttaccactgctgttgttactggtatcaatgtgactgtcatatcgttttcttctaatctgttgccttatttgacatagcaagccctaatagaaggcctagcatcactgggttccaaatcagaaagtccatgcattttcaaaccttataacatgaatttttttgtttaaaaaagccagcatcctggggcctaccctcattaggccttctataccactaataaatatatctttttaggcaacctaaaaaaaaaaaaaaaaaaaaaaaaaaaaaaaaaaaaaaaaaaaaaaaaaaaaaaaaaaaaaaaaaaaaaaaaaaaaaagagaagaagaagagaggagggggggcggcgccccaaggttctctcttccatagagggggggcgacaaaaagtagcggcacgcgacaacaccacagtgtaatggtgtgtgacaagaagggggcgcgcccatatatatatggggtcggtatgatattataataagcacacgaggcgagcggggcgcggcgcgctgcggggatagaaaacacacgcggcgcgagaccgagaggcggagagaaaaaagcgcgcgagaacaacggaggcagagcgcactctctcttggagaaagaagcggacgcacctcactttctctctatctggggggggagggaaagaactagatgcgggaagacaaaataactccctaccgaacgaattgg

SEQ ID NO: 378928 - DNA, 809 bp, Homo sapiens
ggcccagaaaggggcttctataccttcactggtcctcagtagctcctgtgacctactgcccagactgatgcccacagacccagagacaaacttggattttacggagcccaaggccatgaagggttaaggccaacactgagtattatagtgtgaacctataaactgaaatccttatttggcctgcacagctttctttttggcttggtgtcctgggatgctgggagtggccatgtctttatttgctcaacccttccttgtatggaggcaggaggctggaagtgccaactttcttttccatcatggggatactgaggcatatggtacatctcagacactagatccaaagctagttccaggaagggattccagcctgcagcccctaacctccacaacgactctgctcagtcctggcccctggacattaacgaaggcagtgacaagccccacaccccccaaactggtagctgcaatatctacattttcccacggaagtctctgtgtacaaagatgcaactcccgcagctgggtgtcgtggctcacacctataatcccagcactttgagaggtcaagacaggaggatcccttggggccaggagttcaaaaccagcctaggcaacatagccagaccccaactctagaaaaattttaaaaaattagccaggtatggtggcatgtgctctagtcctagctacccaggaggctgaggctggaggtctcttgagtccaggagtttgacactgcagtgagtccatgatcgtgccatcatgctctagcctgggtgacagaacgagatcctgtccctttaaag

SEQ ID NO: 378929 - DNA, 135 bp, Homo sapiens
ttttttttgatctgataactgagggacagcaactaagtgaataaagggtaggtaacgtgtacagtgttgatatgctgaacaaagagatgattcacatcctggtcaaatggagtggaacaggacaagatttcatga

SEQ ID NO: 378930 - DNA, 316 bp, Homo sapiens
ctaaaattgccaatatgaggatgacgttttattttatttttctacaagccagtagagccctatgttatgttcttcggagagaacctcttccatgttttgtttggataaagagtgtgctgggtgtgcaaggtgggtgttacatgtcctcgggtgaggcagctattgaaaggcaatcttatggctctttctgctttagcttgctcagatcctggcatcccatcccgctacaccaaccccattcagccagggtcctgtattttctcttgtacacaacgaaatgagttgattgaaaatggggatatagggatatgggaat

SEQ ID NO: 378931 - DNA, 406 bp, Homo sapiens
agactagccagagcatgtgctgtaggccagcggttaatacattttattgggagaggtcagcatctgatcgttaaaaagttaacattgagccacacacggggacaagagtcaccaatctctgcccgagatcagctacctaaggccacactgaatttcaggaggtaatatatccctagctgagttcctgatgtgttctttctgcaatgtgtgcccctgccccatctctgttactggtagctccgtccttccatttctttaggccaaaaaccttggtgccatccttagcgattctctcacactctacatcaaatccacaagcaattccaatggtctctactttccaagcatggcccgcactgaccgttcttaccacaccaattggcacacgctggccttgccgtcgacc

SEQ ID NO: 378932 - DNA, 209 bp, Homo sapiens
agactagccagagcatgtgctgtaggccagcggttaatacattttattgggagaggtcagcatctgatcgttaaaaagttaacattgagccacacacggggacaagagtcaccaatctctgcccgagatcagctacctaaggccacactgaatttcaggaggtaatatatccattacttgacctgtcttttaaaacagagtggtagacc

SEQ ID NO: 378933 - DNA, 529 bp, Homo sapiens
gacaaagcatttttctgggtgaaggctcaaaatctcatcagatttatgtcgtggtttccgaagatagtaatgatgacatgctttgaaagctaatgttttacatttactcagaaggctttcatgaggttatgacatgggcagatgatttaataagacagttatggtttcatgtgaaactcctttgcagagagatgcccatacacactgatgggcatgctgagtccctggtctaggtgtgttaaggtaggggtaggggctttgccttcccatcttgattccctcccatggaacatgcataagcttctagctgttgcctaagcatgaggagtcccattgtctttcttaggagtccttgaagagttttaaacagccatttacatcacagatattggatctgctgttaatgaaattgtacctgcattggtatactcataatggttgttctgaaaggtattattatttaatatgtcactgaaatagtttgtattataagaaaaactgctgtctatggggtttctgtattagcatt

SEQ ID NO: 378934 - DNA, 453 bp, Homo sapiens
caaaattattttctcaacaaatatcaattacttgtttattaatccgacatgtattaaaccatctactgtgacagacagcatgctagacttcatgttgcagaaaaaaagcagacaaaatctctgaccttgaagagttcaaaagccaatagagagtcctccttacctgcaagagatacattccaagacccccagaggatgcctgaaaccacacatagtaccaaacgctatatatactagttttttggtctgataaccaagaggactaccaagtaactagtggtcaggcagcatatgctgagtagatatgctggataaagaaatgattcacgtcctgggtgggatggagcagaaaggggcaagatttcatcatgctactcagaacagtgcaaaatttaaaacttatgaattctttatttatggaattttccatttaatattttcagaccactgttg

SEQ ID NO: 378935 - DNA, 953 bp, Homo sapiens
ctccagaccctcggcatccctccagccagagtccaagtccctggctcatgcctgcaaccgcatgagtttcatgcatttttccccttctttgttctcaatgtcttagcacatgatggctccctgctactgaggtcttacaagagacccttgagaaatctatttcttattgagactattctgaaagacactaagcatgcttgcttttgaacaacttttaacaaaaagaacaggaagagtttaaataccatgagctgtggagggtgaagagaggaataaaattgcattgttctggccagaccagattctggaatggcttcttagcatcccttcgctgcatcctctgactggcgccgtgagggttaattttatgaaacttgaatgggccacaagtggtcaaatatttggtcaaacattattctggatgagtgtgtctgctttttggatgagattaacatttaaaccggtagacaaagtatagcaaatttgacttccctaatgagagtgggcctcattcaaagatctggacagaacataaaagggtgtcccccaccccgaatatgaggggatccctcctgcttgactgctttaaagctgggacattggctttttcctgcctttggactttgaactgatataaatgctcttcccaggactcgagcctgctggctttcagactgaaactcatacaatcagctctccggggtctccagcttgccacctgcagatcttgggactcaccatcctctaaccatgtaagtcaattgtttatatcaataaatctctttctggagaggtgcagtggctcatgcctataatcctagcactctgggaagccaaggcaggaggatcgcttgaagccaggagttcaagaccagcctgggcaacatagcacgaccagcccctgctcccctccgctcctgtctcttcaaaaaataaaaataattggccaggcg

SEQ ID NO: 378936 - DNA, 899 bp, Homo sapiens
ctccagaccctcggcatccctccagccagagtccaagtccctggctcatgcctgcaaccgcatgagtttcatgcatttttccccttctttgttctcaatgtcttagcacatgatggctccctgctactgaggtcttacaagagacccttgagaaatctatttcttattgagactattctgaaagacactaagcatgcttgcttttgaacaacttttaacaaaaagaacaggaagagtttaaataccatgagctgtggagggtgaagagaggaataaaattgcattgttctggccagaccagattctggaatggatgaaacttgaatgggccacaagtggtcaaatatttggtcaaacattattctggatgagtgtgtctgctttttggatgagattaacatttaaaccggtagacaaagtatagcaaatttgacttccctaatgagagtgggcctcattcaaagatctggacagaacataaaagggtgtcccccaccccgaatatgaggggatccctcctgcttgactgctttaaagctgggacattggctttttcctgcctttggactttgaactgatataaatgctcttcccaggactcgagcctgctggctttcagactgaaactcatacaatcagctctccggggtctccagcttgccacctgcagatcttgggactcaccatcctctaaccatgtaagtcaattgtttatatcaataaatctctttctggagaggtgcagtggctcatgcctataatcctagcactctgggaagccaaggcaggaggatcgcttgaagccaggagttcaagaccagcctgggcaacatagcacgaccagcccctgctcccctccgctcctgtctcttcaaaaaataaaaataattggccaggcg

SEQ ID NO: 378937 - DNA, 357 bp, Homo sapiens
tgcccttttcccttgctcaagtttatgaggtaattttaaatgtatgttctgtttcttagtgttaattacatgacattatgtgcactttaatttactaatatggggagctacatagaataaccattttaagaataaaagttgaactttttaattgcaaactaaccagtcactgctgatgaggtatttcaagcttcttcaaggagtgccaagacatataaatgcttaaagatttttgtgatttggattctaatgaagtgaatctgcagggcagagttgagaacaatgaatgagcaacataaatatttggagatacctattcagaatagaggtaaagctgtttgtagttacacttggtag

SEQ ID NO: 378938 - DNA, 682 bp, Homo sapiens
ggacctctccagaatccggattgctgaatcttccctgttgcctagaagggctccaaaccacctcttgacaatgggaaactgggtggttaaccactggttttcagttttgtttctggttgtttggttagggctgaatgttttcctgtttgtggatgccttcctgaaatatgagaaggccgacaaatactactacacaagaaaaatccttgggtcaacattggcctgtgcccgagcgtctgctctctgcttgaattttaacagcacgctgatcctgcttcctgtgtgtcgcaatctgctgtccttcctgaggggcacctgctcattttgcagccgcacactgagaaagcaattggatcacaacctcaccttccacaagctggtggcctatatgatctgcctacatacagctattcacatcattgcacacctgtttaactttgactgctatagcagaagccgacaggccacagatggctcccttgcctccattctctccagcctatctcatgatgagaaaaaggggggttcttggctaaatcccatccagtcccgaatccccatataacaccaacagtgtacatgtttactgtcacttttgatatggtcttatccagtgtgaacagcaatttattatttttgctcatcaaaaaataaaggattttcttcttcacttgaaaaatga

SEQ ID NO: 378939 - DNA, 2392 bp, Homo sapiens
ggacctctccagaatccggattgctgaatcttccctgttgcctagaagggctccaaaccacctcttgacaatgggaaactgggtggttaaccactggttttcagttttgtttctggttgtttggttagggctgaatgttttcctgtttgtggatgccttcctgaaatatgagaaggccgacaaatactactacacaagaaaaatccttgggtcaacattggcctgtgcccgagcgtctgctctctgcttgaattttaacagcacgctgatcctgcttcctgtgtgtcgcaatctgctgtccttcctgaggggcacctgctcattttgcagccgcacactgagaaagcaattggatcacaacctcaccttccacaagctggtggcctatatgatctgcctacatacagctattcacatcattgcacacctgtttaactttgactgctatagcagaagccgacaggccacagatggctcccttgcctccattctctccagcctatctcatgatgagaaaaaggggggttcttggctaaatcccatccagtcccgaaacagtggagtatgtgacattcaccagcattgctggtctcactggagtgatcatgacaatagccttgattctcatggtaacttcagctactgagttcatccggaggagttattttgaagtcttctggtatactcaccacctttttatcttctatatccttggcttagggattcacggcattggtggaattgtccggggtcaaacagaggagagcatgaatgagagtcatcctcgcaagtgtgcagagtcttttgagatgtgggatgatcgtgactcccactgtaggcgccctaagtttgaagggcatccccctgagtcttggaagtggatccttgcaccggtcattctttatatctgtgaaaggatcctccggttttaccgctcccagcagaaggttgtgattaccaaggttgttatgcacccatccaaagttttggaattgcagatgaacaagcgtggcttcagcatggaagtggggcagtatatctttgttaattgcccctcaatctctctcctggaatggcatccttttactttgacctctgctccagaggaagatttcttctccattcatatccgagcagcaggggactggacagaaaatctcataagggctttcgaacaacaatattcaccaattcccaggattgaagtggatggtccctttggcacagccagtgaggatgttttccagtatgaagtggctgtgctggttggagcaggaattggggtcaccccctttgcttctatcttgaaatccatctggtacaaattccagtgtgcagaccacaacctcaaaacaaaaaagatctatttctactggatctgcagggagacaggtgccttttcctggttcaacaacctgttgacttccctggaacaggagatggaggaattaggcaaagtgggttttctaaactaccgtctcttcctcaccggatgggacagcaatattgttggtcatgcagcattaaactttgacaaggccactgacatcgtgacaggtctgaaacagaaaacctcctttgggagaccaatgtgggacaatgagttttctacaatagctacctcccaccccaagtctgtagtgggagttttcttatgtggccctcggactttggcaaagagcctgcgcaaatgctgtcaccgatattccagtctggatcctagaaaggttcaattctacttcaacaaagaaaatttttgagttataggaataaggacggtaatctgcattttgtctctttgtatcttcagtaatttacttggtctcgtcaggtttgagcagtcactttaggataagaatgtgcctctcaagccttgactccctggtattctttttttgattgcattcaacttcgttacttgagcttcagcaacttaagaacttctgaagttcttaaagttctgaagttcttaaagcccatggatcctttctcagaaaaataactgtaaatctttctggacagccatgactgtagcaaggcttgatagcagaggtttggtggttcagagttatacaactaatcccaggtgattttatcaattccagtgttaccatctcctgagttttggtttgtaatcttttgtccctcccacccccacagaagatttctaagtagggtgactttttaaataaaaatttattgaataattaatgataaaacataataataaacataaataataaacaaaattaccgagaaccccatccccatataacaccaacagtgtacatgtttactgtcacttttgatatggtcttatccagtgtgaacagcaatttattatttttgctcatcaaaaaataaaggattttcttcttcacttgaaaaatga

SEQ ID NO: 378940 - DNA, 1834 bp, Homo sapiens
aagaggggcttggccgaaatcatcaggatgagtctatatcagaggttgcaaacaggcagcctgggccagagctagttcacagctatattttgtttggtgcacacaatgtttgtttataaagttgaattggttgccaacatttaaaaatctggatggaagctttcgtttgattttttaaaagctatttcttgcttctcttgaagaatcaggaaacctgataacactgtcatggttccatatcgcaaccactgtctggagctaagtagctgctgccctctttagagaggacttgtgtttgtagttcaccactgtcaccagccctccagcttcactcatttgctttatctgcctgtccctgtcgtcattagagtttgctttctttggtctatgtgcttcattcacaggttgttatgcacccatccaaagttttggaattgcagatgaacaagcgtggcttcagcatggaagtggggcagtatatctttgttaattgcccctcaatctctctcctggaatggcatccttttactttgacctctgctccagaggaagatttcttctccattcatatccgagcagcaggggactggacagaaaatctcataagggctttcgaacaacaatattcaccaattcccaggattgaagtggatggtccctttggcacagccagtgaggatgttttccagtatgaagtggctgtgctggttggagcaggaattggggtcaccccctttgcttctatcttgaaatccatctggtacaaattccagtgtgcagaccacaacctcaaaacaaaaaagatctatttctactggatctgcagggagacaggtgccttttcctggttcaacaacctgttgacttccctggaacaggagatggaggaattaggcaaagtgggttttctaaactaccgtctcttcctcaccggatgggacagcaatattgttggtcatgcagcattaaactttgacaaggccactgacatcgtgacaggtctgaaacagaaaacctcctttgggagaccaatgtgggacaatgagttttctacaatagctacctcccaccccaagtctgtagtgggagttttcttatgtggccctcggactttggcaaagagcctgcgcaaatgctgtcaccgatattccagtctggatcctagaaaggttcaattctacttcaacaaagaaaatttttgagttataggaataaggacggtaatctgcattttgtctctttgtatcttcagtaatttacttggtctcgtcaggtttgagcagtcactttaggataagaatgtgcctctcaagccttgactccctggtattctttttttgattgcattcaacttcgttacttgagcttcagcaacttaagaacttctgaagttcttaaagttctgaagttcttaaagcccatggatcctttctcagaaaaataactgtaaatctttctggacagccatgactgtagcaaggcttgatagcagaggtttggtggttcagagttatacaactaatcccaggtgattttatcaattccagtgttaccatctcctgagttttggtttgtaatcttttgtccctcccacccccacagaagatttctaagtagggtgactttttaaataaaaatttattgaataattaatgataaaacataataataaacataaataataaacaaaattaccgagaaccccatccccatataacaccaacagtgtacatgtttactgtcacttttgatatggtcttatccagtgtgaacagcaatttattatttttgctcatcaaaaaataaaggattttcttcttcacttgaaaaatga

SEQ ID NO: 378941 - DNA, 1370 bp, Homo sapiens
gtatgtggcgatctagaggacccccggtagattggacctctcggaagattggacctctccggaagatggacctctgctccagaggaagatttcttctccattcatatccgagcagcaggggactggacagaaaatctcataagggctttcgaacaacaatattcaccaattcccaggattgaagtggatggtccctttggcacagccagtgaggatgttttccagtatgaagtggctgtgctggttggagcaggaattggggtcaccccctttgcttctatcttgaaatccatctggtacaaattccagtgtgcagaccacaacctcaaaacaaaaaagatctatttctactggatctgcagggagacaggtgccttttcctggttcaacaacctgttgacttccctggaacaggagatggaggaattaggcaaagtgggttttctaaactaccgtctcttcctcaccggatgggacagcaatattgttggtcatgcagcattaaactttgacaaggccactgacatcgtgacaggtctgaaacagaaaacctcctttgggagaccaatgtgggacaatgagttttctacaatagctacctcccaccccaagtctgtagtgggagttttcttatgtggccctcggactttggcaaagagcctgcgcaaatgctgtcaccgatattccagtctggatcctagaaaggttcaattctacttcaacaaagaaaatttttgagttataggaataaggacggtaatctgcattttgtctctttgtatcttcagtaatttacttggtctcgtcaggtttgagcagtcactttaggataagaatgtgcctctcaagccttgactccctggtattctttttttgattgcattcaacttcgttacttgagcttcagcaacttaagaacttctgaagttcttaaagttctgaagttcttaaagcccatggatcctttctcagaaaaataactgtaaatctttctggacagccatgactgtagcaaggcttgatagcagaggtttggtggttcagagttatacaactaatcccaggtgattttatcaattccagtgttaccatctcctgagttttggtttgtaatcttttgtccctcccacccccacagaagatttctaagtagggtgactttttaaataaaaatttattgaataattaatgataaaacataataataaacataaataataaacaaaattaccgagaaccccatccccatataacaccaacagtgtacatgtttactgtcacttttgatatggtcttatccagtgtgaacagcaatttattatttttgctcatcaaaaaataaaggattttcttcttcacttgaaaaatga

SEQ ID NO: 378942 - DNA, 2245 bp, Homo sapiens
ggacctctccagaatccggattgctgaatcttccctgttgcctagaagggctccaaaccacctcttgacaatgggaaactgggtggttaaccactggttttcagttttgtttctggttgtttggttagggctgaatgttttcctgtttgtggatgccttcctgaaatatgagaaggccgacaaatactactacacaagaaaaatccttgggtcaacattggcctgtgcccgagcgtctgctctctgcttgaattttaacagcacgctgatcctgcttcctgtgtgtcgcaatctgctgtccttcctgaggggcacctgctcattttgcagccgcacactgagaaagcaattggatcacaacctcaccttccacaagctggtggcctatatgatctgcctacatacagctattcacatcattgcacacctgtttaactttgactgctatagcagaagccgacaggccacagatggctcccttgcctccattctctccagcctatctcatgatgagaaaaaggggggttcttggctaaatcccatccagtcccgaaacagtggagtatgtgacattcaccagcattgctggtctcactggagtgatcatgacaatagccttgattctcatggtaacttcagctactgagttcatccggaggagttattttgaagtcttctggtatactcaccacctttttatcttctatatccttggcttagggattcacggcattggtggaattgtccggggtcaaacagaggagagcatgaatgagagtcatcctcgcaagtgtgcagagtcttttgagatgtgggatgatcgtgactcccactgtaggcgccctaagtttgaagggcatccccctgagtcttggaagtggatccttgcaccggtcattctttatatctgtgaaaggatcctccggttttaccgctcccagcagaaggttgtgattaccaaggttgttatgcacccatccaaagttttggaattgcagatgaacaagcgtggcttcagcatggaagtggggcagtatatctttgttaattgcccctcaatctctctcctggaatggcatccttttactttgacctctgctccagaggaagatttcttctccattcatatccgagcagcaggggactggacagaaaatctcataagggctttcgaacaacaatattcaccaattcccaggattgaagtggatggtccctttggcacagccagtgaggatgttttccagtatgaagtggctgtgctggttggagcaggaattggggtcaccccctttgcttctatcttgaaatccatctggtacaaattccagtgtgcagaccacaacctcaaaacaaaaaaggttggtcatgcagcattaaactttgacaaggccactgacatcgtgacaggtctgaaacagaaaacctcctttgggagaccaatgtgggacaatgagttttctacaatagctacctcccaccccaagtctgtagtgggagttttcttatgtggccctcggactttggcaaagagcctgcgcaaatgctgtcaccgatattccagtctggatcctagaaaggttcaattctacttcaacaaagaaaatttttgagttataggaataaggacggtaatctgcattttgtctctttgtatcttcagtaatttacttggtctcgtcaggtttgagcagtcactttaggataagaatgtgcctctcaagccttgactccctggtattctttttttgattgcattcaacttcgttacttgagcttcagcaacttaagaacttctgaagttcttaaagttctgaagttcttaaagcccatggatcctttctcagaaaaataactgtaaatctttctggacagccatgactgtagcaaggcttgatagcagaggtttggtggttcagagttatacaactaatcccaggtgattttatcaattccagtgttaccatctcctgagttttggtttgtaatcttttgtccctcccacccccacagaagatttctaagtagggtgactttttaaataaaaatttattgaataattaatgataaaacataataataaacataaataataaacaaaattaccgagaaccccatccccatataacaccaacagtgtacatgtttactgtcacttttgatatggtcttatccagtgtgaacagcaatttattatttttgctcatcaaaaaataaaggattttcttcttcacttgaaaaatga

SEQ ID NO: 378943 - DNA, 2019 bp, Homo sapiens
ggacctctccagaatccggattgctgaatcttccctgttgcctagaagggctccaaaccacctcttgacaatgggaaactgggtggttaaccactggttttcagttttgtttctggttgtttggttagggctgaatgttttcctgtttgtggatgccttcctgaaatatgagaaggccgacaaatactactacacaagaaaaatccttgggtcaacattggcctgtgcccgagcgtctgctctctgcttgaattttaacagcacgctgatcctgcttcctgtgtgtcgcaatctgctgtccttcctgaggggcacctgctcattttgcagccgcacactgagaaagcaattggatcacaacctcaccttccacaagctggtggcctatatgatctgcctacatacagctattcacatcattgcacacctgtttaactttgactgctatagcagaagccgacaggccacagatggctcccttgcctccattctctccagcctatctcatgatgagaaaaaggggggttcttggctaaatcccatccagtcccgaaacagtggagtatgtgacattcaccagcattgctggtctcactggagtgatcatgacaatagccttgattctcatggtaacttcagctactgagttcatccggaggagttattttgaagtcttctggtatactcaccacctttttatcttctatatccttggcttagggattcacggcattggtggaattgtccggggtcaaacagaggagagcatgaatgagagtcatcctcgcaagtgtgcagagtcttttgagatgtgggatgatcgtgactcccactgtaggcgccctaagtttgaagggcatccccctgagtcttggaagtggatccttgcaccggtcattctttatatctgtgaaaggatcctccggttttaccgctcccagcagaaggttgtgattaccaaggttgttatgcacccatccaaagttttggaattgcagatgaacaagcgtggcttcagcatggaagtggggcagtatatctttgttaattgcccctcaatctctctcctggaatggcatccttttactttgacctctgctccagaggaagatttcttctccattcatatccgagcagcaggggactggacagaaaatctcataagggctttcgaacaacaatattcaccaattcccaggattgaagtggatggtccctttggcacagccagtgaggatgttttccagtatgaagtggctgtgctggttggagcaggaattggggtcaccccctttgcttctatcttgaaatccatctggtacaaattccagtgtgcagaccacaacctcaaaacaaaaaagatctatttctactggatctgcagggagacaggtgccttttcctggttcaacaacctgttgacttccctggaacaggagatggaggaattaggcaaagtgggttttctaaactaccgtctcttcctcaccggatgggacagcaatattgttggtcatgcagcattaaactttgacaaggccactgacatcgtgacaggtctgaaacagaaaacctcctttgggagaccaatgtgggacaatgagttttctacaatagctacctcccaccccaagtctgtagtgggagttttcttatgtggccctcggactttggcaaagagcctgcgcaaatgctgtcaccgatattccagtctggatcctagaaaggttcaattctacttcaacaaagaaaatttttgagttataggaataaggacggtaatctgcattttgtctctttgtatcttcagtaatttacttggtctcgtcaggtttgagcagtcactttaggataagaatgtgcctctcaagccttgactccctggtattctttttttgattgcattcaacttcgtaatgagagcaggactctctggaccacagtcgcagttttttcagttaatgaggtattaaagaccagccctcccttctcagtataatagctgtctgtcttaatggt

SEQ ID NO: 378944 - DNA, 2120 bp, Homo sapiens
ggacctctccagaatccggattgctgaatcttccctgttgcctagaagggctccaaaccacctcttgacaatgggaaactgggtggttaaccactggttttcagttttgtttctggttgtttggttagggctgaatgttttcctgtttgtggatgccttcctgaaatatgagaaggccgacaaatactactacacaagaaaaatccttgggtcaacattggcctgtgcccgagcgtctgctctctgcttgaattttaacagcacgctgatcctgcttcctgtgtgtcgcaatctgctgtccttcctgaggggcacctgctcattttgcagccgcacactgagaaagcaattggatcacaacctcaccttccacaagctggtggcctatatgatctgcctacatacagctattcacatcattgcacacctgtttaactttgactgctatagcagaagccgacaggccacagatggctcccttgcctccattctctccagcctatctcatgatgagaaaaaggggggttcttggctaaatcccatccagtcccgaaacagtggagtatgtgacattcaccagcattgctggtctcactggagtgatcatgacaatagccttgattctcatggtaacttcagctactgagttcatccggaggagttattttgaagtcttctggtatactcaccacctttttatcttctatatccttggcttagggattcacggcattggtggaattgtccggggtcaaacagaggagagcatgaatgagagtcatcctcgcaagtgtgcagagtcttttgagatgtgggatgatcgtgactcccactgtaggcgccctaagtttgaagggcatccccctgagtcttggaagtggatccttgcaccggtcattctttatatctgtgaaaggatcctccggttttaccgctcccagcagaaggttgtgattaccaaggttgttatgcacccatccaaagttttggaattgcagatgaacaagcgtggcttcagcatggaagtggggcagtatatctttgttaattgcccctcaatctctctcctggaatggcatccttttactttgacctctgctccagaggaagatttcttctccattcatatccgagcagcaggggactggacagaaaatctcataagggctttcgaacaacaatattcaccaattcccaggattgaagtggatggtccctttggcacagccagtgaggatgttttccagtatgaagtggctgtgctggttggagcaggaattggggtcaccccctttgcttctatcttgaaatccatctggtacaaattccagtgtgcagaccacaacctcaaaacaaaaaaggtctgtagtgggagttttcttatgtggccctcggactttggcaaagagcctgcgcaaatgctgtcaccgatattccagtctggatcctagaaaggttcaattctacttcaacaaagaaaatttttgagttataggaataaggacggtaatctgcattttgtctctttgtatcttcagtaatttacttggtctcgtcaggtttgagcagtcactttaggataagaatgtgcctctcaagccttgactccctggtattctttttttgattgcattcaacttcgttacttgagcttcagcaacttaagaacttctgaagttcttaaagttctgaagttcttaaagcccatggatcctttctcagaaaaataactgtaaatctttctggacagccatgactgtagcaaggcttgatagcagaggtttggtggttcagagttatacaactaatcccaggtgattttatcaattccagtgttaccatctcctgagttttggtttgtaatcttttgtccctcccacccccacagaagatttctaagtagggtgactttttaaataaaaatttattgaataattaatgataaaacataataataaacataaataataaacaaaattaccgagaaccccatccccatataacaccaacagtgtacatgtttactgtcacttttgatatggtcttatccagtgtgaacagcaatttattatttttgctcatcaaaaaataaaggattttcttcttcacttgaaaaatga

SEQ ID NO: 378945 - DNA, 564 bp, Homo sapiens
ataatttcatctgacattgagtccacgttcagattttcctaattgcacccacaatgtctcatatcttctttctcctccctccattcatgatccatgcagtgaacttttttgtgttgttttgttttttaagagacagagtctcacttttttgcccaggctgggcaatggtgtcatcatagctcactgcagcctcaaaatactgggctcaagcaacactcccacctcagcatttcaaattgatggaattatggatgcgtgccaccatgcccagctaattttttttaagagatggggtctttctgtgttgccccatctggtctttttttttcccttctttttctttttcttttgaggcacagtgttgctctgtcacagagtagtggtgcgatatcggctcactgcaacctccgcctcccaggttcaagtgattcgcatgcctgtaatcccagctactcgggagactgaggtaggataattgcttgaacctgggagctggaggttgtggtgagccgagattgcgccattgcactccagcctgggcaacaagagtgaaactctgcctca

SEQ ID NO: 378946 - DNA, 483 bp, Homo sapiens
  misc_feature (169)..(169): n is a, c, g, or t
  misc_feature (469)..(469): n is a, c, g, or t
  misc_feature (474)..(474): n is a, c, g, or t
  misc_feature (480)..(480): n is a, c, g, or t
gccttctctctgcctcatgcaaaggcaaagtcattctcacctcagtgtcttttcatttgctgctccctgtgcctaagatgttctccccagattcccatggtcatctccttctcatcattcaggtcttagctcaaatgtttcctcctatgaaaggcctttcctgaccacncctggtaacgcagtcccttccttacctggtaagggacttagcagtttaccctatatcccaatacctgatttcatttttttcatagcacttcctaatatctgaatttttttttttttttttttgagacggagtttcactcttgttgtccaggctggagtgcaatggtgtgatctcggctcaccacaacctccgccttccaggttcaagtgattctcctgggaggcaggggttgcggtgagctgagatcgtgccactgcactccagcctgggctacagagtgagactctgtctcaaaaaacnaaacnaaaacnaaa

SEQ ID NO: 378947 - DNA, 711 bp, Homo sapiens
  misc_feature (169)..(169): n is a, c, g, or t
gccttctctctgcctcatgcaaaggcaaagtcattctcacctcagtgtcttttcatttgctgctccctgtgcctaagatgttctccccagattcccatggtcatctccttctcatcattcaggtcttagctcaaatgtttcctcctatgaaaggcctttcctgaccacncctggtaacgcagtcccttccttacctggtaagggacttagcagtttaccctatatcccaatacctgatttcatttttttcatagcacttcctaatatctgaatttttttttttttttttttgagacggagtttcactcttgttgtccaggctggagtgcaatggtgtgatctcggctcaccacaacctccgccttccaggttcaagtgattctcctgcctcagcctcccgagtagctgggattaccggcatgcaccaccacacccggctaattttgtatttttagtagagacggggtttctccatgttggtcaggctggtctcgaactcctgacctcaggtgatctgcccgcctcagcctcccaaagtgttgggaccacaggcgtgagccaccgtgcccagccactatctgaaatttttatttgttcttataatgtctgtctccccacaccagagtcttgaaacattcctggcacacagcagtttcacaacaaataactactaataagtaacttcctaatttttaaaaaaagtatgataaa

SEQ ID NO: 378948 - DNA, 882 bp, Homo sapiens
taaatatgtgaaaagctcccatctccctattttgcctcccctccaacataaaatgagtacagatttagaatttcattggttaaatatatctttgagtattcattaaaaaaaaaaacaaactttagcagtggttactcaaaatcttgccatagtcagttctgcagtatccactaaaagacttagatttttatcaaaatttctttccccctaaagtctatgtggtggagctttcttttagaatcatcaaccagtttgttcttggcattaaacattatcttttctcattaaagctctaatttttttaaaaaaagctaatgatgaaaattttagttataatttaaatgaaatttgcatgtacaattgtcagtaaggactatgaaacataaacaattacataatttttgagatgcagcagatcctaggaaactcactcagtcctgtggttgccaacctttctccatctcccgcagacgttctactgcatgccagataccatgtgcagtaacttctgaatcctctcatccccctacttccagaacacaggactatgagttacttgaaagctgaggcttggtagagggctggagccaattgcgttaaactaactaacattattgcaaaatatattctagggcttttactctaataaaaatgactcctggaactgcagtactatattcttggaaccccaagaaaccaggtgacaacccataaatttaccatcacttttcagatgaggaaggcaaatctggaaggccaaattacttgtccaaagatagacaccaaaccagtaaaggagcaggatttgatggagggaggatgaagtatcaatgaaaaaataagtctaagtaaagaaatgcaaatatctttttctttaaaaaa

SEQ ID NO: 378949 - DNA, 887 bp, Homo sapiens
agcttgggcaacagagtgagactcagactcaaaaaaaaaaaaaaagaaaagttaatgcatctaaatttattgcaaagggaaaataaaaatgaaacaaacattattgttgagagtttgtttatcctatggtgctcctaagtataaacaaattttacactcaagaataaatttgttaatgtgaaatatccaatttatatcactgaaaagtataaaataaatgttttgtattggtttatactgtaattaactaaaactcatttccttttcattagggcataggaagtcgattcattttgcatacttggtagcacaaagttcaaatgactttaatatctggcttaaaataagttgggataatatgttctggggagtaaggaacaaggacttcacagaaggagcttgtattcagttcaagtatctgtagaggcacatagatattagcagaaaaccctaagtattgactccatgaatgcattttctaattttaactcaaagtaatcttaggacaaaggatctaaaactgattcttggttagtcactcttcattcactcatgtgttatttactaagtatcttctaaggatcaggcatttacccttatggagcatttagtctagcaggaaaagtagtcagagaaccctagctaagccaggctatctcaggagggaagaaatgaaaagaggtcaactactatttggccaggcgtggtggctcacacctgtaatcccaacactttgggaggcccaggctggtggatttcttgaacccagaagttcaagagcagcctgggcaacagagtaaaaccctccccaccgccgccatctctatttaaaaaacaaaacaaaacaaaaaaactccagcctgggcgacagagcgagactccatctc

SEQ ID NO: 378950 - DNA, 832 bp, Homo sapiens
agcttgggcaacagagtgagactcagactcaaaaaaaaaaaaaaagaaaagttaatgcatctaaatttattgcaaagggaaaataaaaatgaaacaaacattattgttgagagtttgtttatcctatggtgctcctaagtataaacaaattttacactcaagaataaatttgttaatgtgaaatatccaatttatatcactgaaaagtataaaataaatgttttgtattggtttatactgtaattaactaaaactcatttccttttcattagggcataggaagtcgattcattttgcatacttggtagcacaaagttcaaatgactttaatatctggcttaaaataagttgggataatatgttctggggagtaaggaacaaggacttcacagaaggagcttgtattcagttcaagtatctgtagaggcacatagatattagcagaaaaccctaagtattgactccatgaatgcattttctaattttaactcaaagtaatcttaggacaaaggatctaaaactgattcttggttagtcactcttcattcactcatgtgttatttactaagtatcttctaaggatcaggcatttacccttatggagcatttagtctagcaggaaaagtagtcagagaaccctagctaagccaggctatctcaggagggaagaaatgaactttgggaggcccaggctggtggatttcttgaacccagaagttcaagagcagcctgggcaacagagtaaaaccctccccaccgccgccatctctatttaaaaaacaaaacaaaacaaaaaaactccagcctgggcgacagagcgagactccatctc

SEQ ID NO: 378951 - DNA, 328 bp, Homo sapiens
ctggatgacatttctagacatgcttcaggccagaaaggagcctgctgcctgggaaagaatgacctagtcctggtaggattcattacctgctaactgaagagtctgagtgccttgaataaccagcagtgatacccgggaactacgttgagggccttgggtgataatttgagatctgctggcttcaggagagactcgacacattctcaactgtggtggctatgaagtcagactctctgcttgagaagagtagagggaaaagtaaagggcacttggtcttggacttgatctgtgaccagatcagccacagggagctagagcaccacgtggg

SEQ ID NO: 378952 - DNA, 442 bp, Homo sapiens
acagaattggaaccaggcagtccctgtgtgcttccgaattatgagagagtggtaactcagaagaagcacgttcatgcatttatctaatgaacattgattagacatgtgctgcatgccaggcattgttttagccacttgggttacagatatcctcatgaaacctatattgctagtaggtgaaaatacacaatagacagtcaacattatccgttagtgagttgcatgtaaagaaagtgcgtgaacaatgagaacacatggacacaggaaggggaacatcacacacgggggcctgttgtgggtggggggagggggaagggatagcattaggagatatacctaatgttaaatgacgagttaatgggtgcagcacaccaacatggcacatgtatacaaatgtaactaacctgcacgttgtgcacatgtaccctaaaacttaaagtat

SEQ ID NO: 378953 - DNA, 1130 bp, Homo sapiens
ctactctctccattttcagaagttgtccttggcaccctctcttcgtaattccagcctccgcacctcttgtgtttatactgtttcctcgttgccactggccaatgtggacagtctacttcctttcccatccagggctcccactaacatgccttcaactcacaaagtcttaaaatgaattgccttgtattttatccaccaacggagagcctccaattcttcccataatgaaattagtttgataaaaattcaggatattgtaataatgggagaaggcaaaagaggacccctccgtcttcatcattccctcagaaatggtatcaacaattttatgcccttgagtcatagcatgtaggaagaggtgagagcacaaaaataatctttaaggagttaacagagtacttctaatatttgcctactctgtgttttccaaaccttgcttcctcacagatttttttttcctgtttttctctgtactgcttactctattgaaggaatggctgtgggtaatattcagtattcaactcaacagggcctatcctcatgatctctagcgtggatacagtggagtccttcactgtcacagtaaaaccttaagttggcacactggtttgagtagagaagttaatgagtaatgaccactgacgcagacagagtatcaaatgcaattaataggtttaataaacaggagtagttaagtagacaatgattcctcagcagattatgggatgggtatgctctagtctggagttccacaagttgttctgagtgtggttaacccacatggacttttctacacgagtttttatttataaacataatatacaaacagacactaattttgccacatccatcctgaactattaaaacaaagttggaaggaacaatagaagaacgaagtctggtttaatgcagataatcaaacagctatgctccattaaaacatctcatgagtcaaatgcactccgtttgtttgtttgtttgtttgtttgtttgttttgagacagagtttcactcgtgtcacccaggctggagtgcaatggcgcgatctcggctcactacaaccaacacctctcaggttaaagcaattctcctgcctcagcctccccagtagctgggattacaggtgcaca

SEQ ID NO: 378954 - DNA, 513 bp, Homo sapiens
tcctggtttctgacacagagctcctaaaacacttgtaatctcctgagtaacacaggtgctaagaggagtttttgttctagtatttggtctctggccttggtcctgatacgagcacctaaacctcatggaatttcccggaagacaggagccttttgctctaatgaaggaagtcttagtgggctcctagatagcttcaggatggggctagtcaccaaaaggaccaagtcatgattagaaacttagaactttcagccctaatcccccaccctccagggagaagggaggggctggagactgagttaacaatcaatcatgcctacatgatgaaccctccataaaaatccctaaacaatgggatttggagcgtttccgggctggtgaacacatccatgtgctgggaagggggcacaccccaactcctgtgctcaggacacttctggacctcgccctatgcacctcttcatctagcgttcatctgtgtcctttataataaatcagtaaatgtaagtaaat

SEQ ID NO: 378955 - DNA, 687 bp, Homo sapiens
aaaatagatagcaaaaaaatgtgttggctgttctcactgtttatcttcctaacttcttttgatgatggaaggcagttttgtggaaattgccagccaggactttgacatgaaacagacccagggctaaattttggctctgtggtgttggataagtggccttgaataaattagttattaagcttcagttttctagcttttaactgattataacaatgcacacacatacctgacacactgttaaattttcttctcttcctgtttcttatgttaaggaaagatactctgtgttttggcatatgttggtgaatttgtaccatttttatcctctcagtccttccttttataagacaataattggagtagtttaatcttattcatgtgcagataaaagaggtttatgaagtttagggtgaagtaggcaagggaatctgtttactccctcttccctctactgaataattttccctctactgaataattttccctctaagaattgctgtgggtaataccaggagtggggacattgcccacatgcataagagcgtatctctccattcgatcagtttgtcaccatctttgctctgttttgaaagtcaggcttctctgtgactgtgaagcctgctgttccctgaaaatctgataatggagcagtggaggtttttttctttctgtgctctgtagatctca

SEQ ID NO: 378956 - DNA, 393 bp, Homo sapiens
ctgggcaacatagcaagaccttgtttcaaataaagtatgaaagtaaaatggtataaagaagtccatttattcattatctagtatcgacaatgaccaactaataagttgattgtttcatctattatctcctctctatctaaagcaaaccccagataacatttcatttcatccataaatatttcagcatgtatctccaaaagataaagacttgtttaaaaaacaaaatgtgggctgggcctgatggcttatgcctgtaaacccagagctttgggaggctgaggtatgagaccacttgaggccaggagttcaatcaagaccagcctgggcaacacagtgagacccccacctgtacaagatattttttaaaaaattagctgggtgtggtagcacata

SEQ ID NO: 378957 - DNA, 442 bp, Homo sapiens
gctctctacatttaaaagacaaacagaaaagctctccaaggttaagaaaatctattgcttaaactaatcaaacctcaaaaattccatggcaatcaggtacagtttctttaattggaatgtgggcagaggctcactcacatcaaagatagagatagttgagcatgaaggttcacgactatagtctcagcactctgggtggccgagcaggaggatcactggagcctaggatttgaagaccaccctgggcaacatagggagaccccatctctacagaattaaaaatttgttaaaagtctagccaggcatggtggtgcatacctgtggtcctagacactcccgagactgaggtaggagaatctcttgggctgggaagttgaagatcgcaccactgcacaacagtactctgggtaacagagcaagaccctgcctcataaaaacaaac

SEQ ID NO: 378958 - DNA, 1708 bp, Homo sapiens
gaattccgggatatcgtcgacccacgcgtccggctttgtaagctattggtgttgggataaaactcactgtttatgctgacaccaattcaaggttacttggagattttgtttttcttatacagttaagtcagttctagctaaaacataaacactgcaaactcatttgaaactgaagggaaaagggggtggtggtaaaagaggcttttctaaattattaaacttccctgaaatgtgcttgacccaaaattttggtccacaaccttcactggattaccaatcagacaaagtttagccatgtggacaggtctcaattttgtcagaaataatttggatccagctatgtcttttataggctggtgactttgtgatgctgtcttatgattagagttccaaggtaaaagatacaggatctttgattttgtgtgtatatgtgttcatatgtgtatgtacatgtattatgttaaagtcatgtccagcatgttgccaaattggcttataagtaaatgattactcacaaattaagtaaatccaaatgcttttcaagttcacataaatttagtaatctttggtaaataaaaataattttaaaattattagtaaaacaaaactagaaatgcctttggaattgtaagcatacattttttatgtgggcttacagattattttatattttgcctctgctagaaattttaaggtgtcaggggttggcacaaccacaaaagttataagagtacaaacccaaccaaaaaaagaataatctttgtttatgtgaattttttgacaaataagactaatttaagattgctaattcaataaaaacacctgaattttctgagttatcagcaagatgctcatgtgtttcactttaaggttctttcttaggtgaatacttggtattccaagggtacactaaatggttaacaagaaaataacttgaaatgatgactagctttgtctaatatctcagttttcagaaataatttggataaaatgttaataattaaagaatttctgggtaaagtggctcacacctgtaatgccaacactttgggaggccaaggtagaagtattgcttgagctcaggggttcaaaagcaggccctggcaacataggcccctatctctaaacaaattttcttaaaatttaaaaaatatttttagctgagcatgttggctcacaactgtgtccccagatattcaggaaatttaggtggaagaatcacttgagtctgggagattgaagctacagcgagccatgagcatgccacttcactccagcctgggcaatagaacaaaaccctgtctcaaaaataaataaataaataagtacatgtaaatgggatacatgctcacttataaattttgtaatttaaaatcttaaaattattttgaattgaatagtagatgcttgttggatgtctgggtaattttcaattaagaaagggttatcatatggaaaacatgttactaaaaattgtggagtggtttcatctataaaatgttaacatctgagagtcaggtaacaatttgctgcttcctaaaatttaaggctactaagaacaagaattctagttaatacataattctgtaagttgtgtttttattaagaaaagaggtaattataaagttatgaaagaaggtaggaagaaacaagtaggaggaataatgcaaagatacttaaggatatgaagatgtatttttgtagggaa

SEQ ID NO: 378959 - DNA, 2117 bp, Homo sapiens
gctgggaatatgctgggggaagacacaggccttgtttcaaaacaatctacctacttgtcatctggacactgtcctggctacttcagggacaccattccagttaaccttcgcagcaatcctgggccctattttacagatgagcttatatgctgtatgaaagtcacgtgaaccccagaactgggatttgaacccaggtctgccctatggcagacgccgtgtatgtaatcttcatattacattggaaaaagctacctattcaaggcacatattcaaggcataatggctcctgcctcaaaagcctccttgctgactgtgcttccaagcctcaaacagagacacacagcctatccacagggcagaaaagtgaagtcaggccagtcctggaaaggctcagatctctctggcctcagatccctcctctgcaaagtgagcaggcagcctgggtctcagggatttggcccagcgtcagtgtccctgaagctctctgccaagtgccgggaaagggcactggagaagagaggtcagaggagatgcatgactgtgagtaccctcatccttgctctgggtatgacagtcaccctggaatgagggagcttggcaaagggttttatcctccactgtattttgctcttgattctgggcaggatccagctcctgccttgccctcagtgctgagtgaccttaagaatctctgggctcaaagcatcccctttgagagtattatgtgtcttcagcattgacttcaatatctggcatggagtaggtgctcaccagtgtttgctgaatgcatgagaagaggtggggagtggaagcggggatgccttccacaggcctcttctgaagcaccctgggcctggcccactctttgcagggcccctctgccccatgttgccctaactctgaacagggatcaaaagaaagcctggtggttcaggtcttcccagtactctgggagctcctgggatgacaggcattcggggcagggtctcactggggccctcaaatatggcatatggacacagattctcatgccattccagatttctggccatccaaattctccctgtccttaagtcctagtccagggtccacctactccagggggtctactggaaacagagcacctgttttctgactttctagtgccctgagtgggaaccacttcactgggctcttgttcccatgctgttgtgtgttgctttgtatgtagttcttggcctacctaatggccctgaggatcagaagtaaatggtctctgtttccaatctgtctcctaggagtggactggtcaaagagagtaggcaggggcaaagtagaagactaaggatttaaacgcaatgtgctgaaacatcaatggatgataaaacaagtgggtaaaaaaaaaggtatgagaaacaatatttacatagcctcaaagtatacccccacaaaatacttatacattacaaagggaaagttagtaattttattatacaaggagaaacctggcagataccaccttaaccaggtgatcaaagtaagtatcatctggaatgtaatatgtaacaaatgctatcatgggcctcctggtcagatgtgttcaaaaggagacagtgtcacttattcttgctgagaatgcataaccagaatctaatcataaggaaacaagacaaacccaaaatgttctatgaagtaaatggcttgtgctcatttaaagagacaagacaactaaatgtaacttgtgatccttggccagaatttctttcttttttttgtttttgttttttggttacaaaggatattagttcaacaactggcaacacttaaataagatcaggtactgtgtcagcattgatttcttaattttgatacctgtactgtggttatataagaggctgtccttgtttaggaaatatatactgaactttttggggaaataaggatattaggtcagcaatttactctcaaatgtttccagaaaaaagtaataatacagtgtttatatgtgtgtgagagagtatgataaagcaaacaagttaaatgttaacacttggggaatatgagtaaagggtataaaagtattccttgtgttatttctaaaacttctctgtatgtctgacttcaaaataaaatgtatg

SEQ ID NO: 378960 - DNA, 655 bp, Homo sapiens
aagaatttgcttttcactctgaaaaggcattctttttaacccagtaaaattcaaaatgcgaactgtatttttaaaatattagcaagcaatattttataatagattatgagcagttgtatttcttgtgcccttggtaatgtatttcaaagctgggtctcttttaatactatttctacaaaatctttttacatagggatgacacatagaaagtgaaaattaaattatgcatatgcccatgcttctcattcttacctccaagaaagcatcgctgaaaccttgccactaactcaaggtattctgtcttttgaattctgtcgtgactggggctaaacaactgtcattggcaagtgacaagaggcacagacagcaggggaaagaaaaagagagaaaagaagtaggcgtaggagaaaataaaagcctaagagatggggaggaaaaatacccagtatcttccaggagggtaaggatgctggaagcaactgtctcgggtgccagtttgttggtgctcaagcaacgatctgcctactcctgctatatccagatgcttttaatgtcttttttggaatctagaaagtactaagaaatgtctcaaagtacagactgatgttatcattacatttaaatttgcctaaagaattctgccagttctccaatt

SEQ ID NO: 378961 - DNA, 384 bp, Homo sapiens
agcttgagagcgtagtgttcatattcagagtgtacatacttgtatccctttctccttctctggataccagctgtgtgactctggaagataagtctgttttcttgctgtcttataatagagaagtaagttatgtggctgaagtctgtagttgctgcagtctctgctccactgtacataaattctctaccatgtctaaaagaggacattactctgcagcaacctgagactacataacctatgatatggtgaatgggtatgtgtcagctggcttataaagatgtttgttaggaagtgacttgcatcctctatctgcttatgtcttattggtgaaaacatactcacactcggttgcaaagaggttttgagatgtagttttattcccag

SEQ ID NO: 378962 - DNA, 879 bp, Homo sapiens
aaaaggtggggccggaggcggcgagctgagcggctctgacaggacgggtcgcagggggtcgcctggccggagctgggctccgagaatcccgggtgccagcaccagagcagcggctctccgcactaactctcctctcctggtcagctgtaacccctgccgcagagcccggcaactttcagctgtcgcccgcggagccccgagggccactcgcctcacctgtgcgtgcagcgcctcgcgcgccctgtccggctgcggagatgagcgagcttaataccaaaacatccccagcaaccaaccaggcagctggccaagaggaaaaaggaaaagctggcaatgtcaagaaggcggaggaggaggaggagattgacattgatctgacagcaccagaaacagagaaggctgcccttgctattcagggcaagttccggcgatttcagaaaaggaaaaaggatcccagctcctgaatggccagccttgcccttcaccttcaccttcatgctggtcccttctctccccttctccacacccatgtatctttatcccttgtccctctagcctttccttgaggcaagttcaacctttatatactcttgtatctggccccctcaagccatcacagaagtagaggcacaagagaggtggagaagatgaagacttcaatcagcagtcactagtctaagggtggaacaatttcttcttggtataaggttctttgatcagtagctatgcctgccctgtagggctaaacaagaggcttcgaggctgagagatctccccaaagaacaatgtgggaaggaggggaaggctttcagagtagggtgcctgagggtgggacatatgcactgttctgctagttacggcattcacactttaggtaac

SEQ ID NO: 378963 - DNA, 412 bp, Homo sapiens
cttgactgccctgcaaaagatgtacctgtgttatagaaaattgttgactcattatattgtaccacagtgccgacagttgtggatatttgaatcttcttgtcctctagactagggtcagcaaactttttctgtgaagaatcagatggtatatatttttagctttgcgtactacataatctctgttgtgacggctcaactctgcctctgcccttataatgcaaaagcagccatagacttaaatgagtaggtataactgttccaagtaaattttatttactggctgggcatgatggctcaaacctgtaatgttagtgctttgggaggccaaggccaaggatcacttgaggccaggagttcaagaccagcctgagcaacatagtaagacccccccgccgcccccgcccatctctac

SEQ ID NO: 378964 - DNA, 444 bp, Homo sapiens
caaagaaagcaaaacagttttatttacaaagacaggtggcagctggatttgtcatgcaggccagagtttgtatacccctgttctaagcagtcaagtttgttgtcttttccacgctccccaaactgctttcaggtcgctgattacatttctcattccagattctggcatttgattggagaatttgtcttgatcaggctcagtggctcacgcctgcaatcctagcactttgggatgctgaggcgagaggattgagtgcgggagtttgagatcagactgggcaacaactgagaccctgtctctacaaaaaatttattaaaaattagccaggtatggtagtgcacgctggctgaggtgggaggatcacttgagcctgggaagacttcagtgagccatggttgtgccactgcactctagcccaagcaacagagcaagaccctgtctcca

SEQ ID NO: 378965 - DNA, 421 bp, Homo sapiens
cttgactgccctgcaaaagatgtacctgtgttatagaaaattgttgactcattatattgtaccacagtgccgacagttgtggatatttgaatcttcttgtcctctagactagggtcagcaaactttttctgtgaagaatcagatggtatatatttttagctttgcgtactacataatctctgttgtgacggctcaactctgcctctgcccttataatgcaaaagcagccatagacttaaatgagtaggtataactgttccaagtaaattttatttactggctgggcatgatggctcaaacctgtaatgttagtgctttgggaggccaaggccaaggatcacttgagcctgggaagacttcagtgagccatggttgtgccactgcactctagcccaagcaacagagcaagaccctgtctcca

SEQ ID NO: 378966 - DNA, 1609 bp, Homo sapiens
caccattaggcaaagatagtttctctagagagaatcatgcctgctaattacacgtgtaccaggccagatggagacaatacagattttcgatactttatttatgcagtgacatacactgtcattcttgtgccaggtctcatagggaatatattagccctgtgggtattctatggttatatgaaagaaacaaaacgagctgtgatatttatgataaacttagccattgctgacttactacaagttctttccttgccactgaggatcttctactacttgaatcatgactggccatttgggcctggtctctgcatgttctgtttctacctgaagtatgtcaacatgtatgcaagcatctacttcttggtctgcatcagtgtgcgacgattttggtttctcatgtacccctttcgcttccatgactgcaaacagaaatatgacctgtacatcagcattgctggctggctgatcatctgccttgcctgtgtactctttccactcctcagaaccagtgatgatacctctggcaataggaccaaatgctttgtggatcttcctaccaggaatgtcaacctggcccagtccgttgttatgatgaccattggcgagttgattgggtttgtaactccgcttctgattgtcctatattgtacctggaagacggttttatcactgcaagataaatatcccatggcccaagatcttggagagaaacagaaagccttgaagatgattctaacctgtgcaggggtattcctaatttgctttgcaccttatcatttcagttttcctttagatttcctggtgaagtccaatgaaattaaaagctgcctagccagaagggtgattctaatatttcattctgtggcattgtgtcttgctagtctgaattcatgtcttgacccagtcatatactacttttccactaatgagttccgaagacggctttcaagacaagatttgcatgacagcatccaactccatgcaaaatcctttgtgagtaaccatacagcttccaccatgacacctgaattatgctaaaacaaaaaaccaaactgaatgtgacctgaaatgcaagtacatcagaacatatctgcaatacccaagccacagggaagaacttgcaaaacaacacagcttttcagttctgctctatcttactgctatggggaattcacttcttcaaagcaggacctatttggagcattacgatccacgattattgatgttgacatgtccatgtagtaatttttcttcaagtctgtaaatcttaaaatatcaaatttctgtgacatcctataaacatatgcactcaactgtagtcagtacttttacctgtgaacctcaggcacaaaaagattattagcttggagtcaccataaacatttagttttgttgcaacagatactgagtctttatgttcagaggaaatgtaagtgtctttttatattagtaatcacagtttacatgccattttcatatgtttggttatattttagtgggatagatgatatattaccctgtgtaaagaaaatgtaaacataagatcatttttatctctcaagtgtgattactcttcagagtttgaagattaaaatagctattttcttca

SEQ ID NO: 378967 - DNA, 561 bp, Homo sapiens
gagatgaagtctcattgttttgtccaggctggagtgcagtggtgtaatctcagcccactgcaacctccacccaccggggttcaagcaattctcctgcctcagcctcccgagtagctgggattacaggcacctgccaccacacccagctaatttttttttatacttttagtagagaaggggtttcaccatgttggccaggctgatcttgaactcctgatctcaagttatctgcctgccttggcctcccaaagtgctgggattacaggtgtgagccaccacgcctggcctctaacaccaactttagatatggccatggaggacaatggaaaatggtgtagttcttagaaattagaaccaggggacagctacacaggctaaccaagaaatctcctctactgaaatagcaagaatcttggaaattcctacggactgactgtgacatgtttcccattcttccatcttctgaatgacagcttttattgcagttatatttttcctaccacttttgtatactggatgtgagatgaacagaaaacacattagtgaactgtgagggaccat

SEQ ID NO: 378968 - DNA, 363 bp, Homo sapiens
gtcttaccagctcccctgggattgggatttagctcatgaagcatcttccacctctccacatacagctctggccccttcaccttggccagcagcggttctgccaccctgtgtatgtatgcctctgctttcagtgaacacatcccaactgtgttctgcagtgaatttaatttaattccctgggtgatagaagactgtgcattctccccctcccctttcagactgtggagtgatgcttttgacctccattggggcaaactctttcctttctaagcgggcaacatccagagtccctctgtacttcagagtttctacccactatggggtcatcaccctaaacagggtcctgctctctccgggagtggc

SEQ ID NO: 378969 - DNA, 591 bp, Homo sapiens
tgaccccacctcagagcaaccacagctgggcggtgctgttcgacgggcagagcgtgagtgggcagggaggggtcaccctggcaggtgtcggtctggggggccccgcctcacccccctgcctccccagggctgcatctgttaccgccctgaggagcaccaggtctgcttcctccgcctgatggaggacagtgatcgggagaccctgcggctgctggtggatacctccaaggtccaagaggcttgggtccccagccaggacacccaccacacccaggagctgctggcagtgcaggggagcctcgaagtggaccccgcccaggcgggggctttggtgcagcgcctgtgcatgaggacccccatctactgggcccggcgagcagaggggccccggagacagcggctgatttatctctgcatcgacatctgcttcccgagcaacatctgcgtgtcggtctgcttttattacctcccagactgagcccccgacctggcccagcctggcccgtccccaatccagtgggctggccaggccacctgcaccagggaggacagctgctggcagggactaataaacccttccacctggcaaag

SEQ ID NO: 378970 - DNA, 517 bp, Homo sapiens
tgaccccacctcagagcaaccacagctgggcggtgctgttcgacgggcagagcggctgcatctgttaccgccctgaggagcaccaggtctgcttcctccgcctgatggaggacagtgatcgggagaccctgcggctgctggtggatacctccaaggtccaagaggcttgggtccccagccaggacacccaccacacccaggagctgctggcagtgcaggggagcctcgaagtggaccccgcccaggcgggggctttggtgcagcgcctgtgcatgaggacccccatctactgggcccggcgagcagaggggccccggagacagcggctgatttatctctgcatcgacatctgcttcccgagcaacatctgcgtgtcggtctgcttttattacctcccagactgagcccccgacctggcccagcctggcccgtccccaatccagtgggctggccaggccacctgcaccagggaggacagctgctggcagggactaataaacccttccacctggcaaag

SEQ ID NO: 378971 - DNA, 701 bp, Homo sapiens
aatatgtcctgagacatacatttttatggtggaaaattggggacaggaaaataacaggaaactgcataggcctctaaatacccaatattctcatggtccaatcatctattgttttactaatcaattggggaccaatctattgtgtgcctcctggaatcaatgctactatgtcagccagtcacttgatccagaaattccagcactgttaattaatctgcagtagataagtaccatctggtaattgcaactcacaggagttgaagtcatagatgcttttaccgaagtctagttcactcatgcttgcctgggacaaatgagcttacctcatttaagctctgaataacatgctcctaccacacccaattcgtatacttgatttttaaaattctgactgcattatagtgcaattttactcattcccaggaataaatacatatataatgaaatatgttctttatatagaaaaatatagattgttggaatggattttgaagtttcacatatgtgttttatttttctgtgtttgcttatatatgcgtgtaatatacacctaaaaggttacaatatacacctaatataatttaatatacaactgaaattatggatctattaatataaaaagaaagaacattagaggagaaataattgaaggtaaaattaactttgaaattactcttaattgattcaatagataactgttc

SEQ ID NO: 378972 - DNA, 497 bp, Homo sapiens
taacgggcagatggtgaaacagtagacgcacggtcgttttaaaagggaacattgtgtcaaaacacacattccccacagggcctgcttccttttccatcatccaaacccaccaactgacattccacaagttggttctgagacagagtctcagggtcatcccctgcactcaggctcattttaacattcaacaacttgataaacatttaaagacttccacatggtgtgctgtaggatctaaactgcattcagaaagagaggacttctttccattacaattagtgaagtcttcatcttgacaaagaaatgggtactatttcaggtcagagtaaacaatctagcatgtattctaaaagggaaagtgaggccgggcgtggtggctcacacctgtaatcccagcactttgggaggctgaggcaggcggatcacgaggtcaggagatcgagaccatcctggctaacatggtgaaaccccgtctctactaaaaatacaaaaaaaaa

SEQ ID NO: 378973 - DNA, 709 bp, Homo sapiens
gctttctttgctcagggatagaatttatcctgaagaatgagtgattgcaagaagcccaccatggccatgtaaaggtgacaaccagtacctggtctagagcctctccaaggatttttgcaactcagccacttctccattctacaagacttcaattcattttcttatgagctagaagagaaatattggtcaactttcataatttattgaggcagctgaggttaggtgggttatgaagaccccaatgattccatgaaagaggggagcaaacttcaagtcttatgactcttatctcatgctgtattcattggttgaagaataggttgcttgttacatggaaacagatgtttacagatatcatcaaagaaatgttgacatcgaaaagactgttacatattttttgctttttggtggctacagcaagattggcagaaatgtcttttacctcatccatcttaagtgagatgatgttgttagctattgtaggcaagctactgcagtttgcttatacacaattgcttcatgagacatttactggaagaaggttgttttgattttcctgtcatttgcacaactattttaagatattctgagtctcatttatgattccttatcagtgattgccattagctacaatttttttttctgttattttctctcctgggctttattggcatttgtataataaagagaagaattggtctctgatatg

SEQ ID NO: 378974 - DNA, 3667 bp, Homo sapiens
gtgtgtcgccggctccttgagggtccatgtgatttttacgccagtgctgctgaactgtgcagggtagggagctggcacagtccgattaattgtccttgggtcgaggtgtctcgtcggaccctttggggctcagtggagaattaaggcagagtcactgtaattatttctaataccaattccaaaatagtgactcttggacaatagtgcaattatatggaattatggctggttataagcctgtagctattcagacatatcctatacttggtgaaaaaatcacccaagatacactgtactggaacaactataagacccctgttcagattaaggaatttggtgcagtttcaaaagtagacttttctcctcagcctccatataattatgctgtcacagcttcctcaagaattcacatttatggccgatactcccaagaacctataaaaaccttttctcgatttaaagacacagcatactgtgctacttttcgacaagatggtagattgcttgtggctggcagtgaagatggtggagttcaactttttgatataagtgggagggctcccctcaggcagtttgaaggccatacaaaagcagttcatacagtagattttacagctgacaaatatcacgtggtctctggggctgatgattatacagttaaattatgggatattccaaactccaaagaaattttgacatttaaagaacactctgattatgtgaggtgtggatgtgctagcaaacttaatccggatctctttataacaggatcatatgatcatactgtgaagatgtttgatgcacgaacgagtgagagtgttctctccgttgagcatgggcagccagtggagagtgtcctacttttcccctctggaggtcttctggtgtcagcaggaggtcgttatgttaaagtctgggacatgttaaaaggaggacaattgctagtatctttgaaaaatcatcacaaaaccgtgacatgtttatgtctaagcagctctggacagaggttactctctggctcactggataggaaggtgaaagtatacagcacaacttcctacaaagtagtccacagttttgattatgcagcttcaattttgagtcttgcccttgcacatgaagatgagacaatagttgtaggaatgaccaatggaatactgagtgttaaacatcggaaatctgaagcaaagaaggaatcacttcccagaagaagaaggcctgcatatcgaacctttattaaaggaaaaaattacatgaagcaacgggatgacattttgattaacaggccagcaaagaagcacctagaattgtatgacagggatctgaaacattttcggatctctaaggcactcgatagagttcttgatcccacttgtacaataaagacacccgagattacggtgtccatcataaaggagttaaatcgaagaggagtccttgcaaatgcgcttgcaggtcgggatgagaaggaaatcagtcatgttcttaattttttgataaggaatctttctcagccaagatttgcccctgttttaatcaatgctgctgaaataattattgatatatatctgcctgtaattggtcagtcccctgtagttgataaaaagtttttactacttcaaggacttgtagaaaaagagattgattaccaaagagaattgttagaaaccttggggatgatggatatgctttttgccaccatgagaaggaaggaaggcacttctgtgttggaacacacatctgatggatttccagagaataagaagatagaatcatagtgtctgctaaataagacatataagaactctgaagttggaatagatttgactgtattaaatgttggcgagagactctctttgatacattaaaaaaactgtttgcagaagcagttctgtggaagagactggaataattatggccggaaaacaagtacccgttttaagtaagacatggttttccatgtaatattttgaattatagcatcttcacctagaagatctcaattgtcttagtcacagagtaggtttatctgggatggatattaattttaatacaggagtgttctgtatcaacatttgggttggtattcagatgggaattcaaatatgaatcctctctggagagggtccaactgggaatcctgctaaaggagcaaagccttgtattacctctggaagacaacaaaaacaattggcaacaacaaaaagcctctttcttgactttaatcagtgcctttgggatttctgggcccttgcttagcttgcttcctgtctccttgatatctacacttgtcttagatcacatgccctgcttcagctggtaatgggactgcatcggttccaagtgtggcaagtaagttttcggctctgaagaactgacactagctagatttgtattcagagtgtgagagcaagctctacagatagaccttattggactacttttttttttttcttcatgcagcctttctaccaagttttcaccttgtttcaggtcagaggaatgatagaatttgtcatttttcttacaacagcctttcagactattcttcatatgtttcaagctaatcttgtagctaagctacctaatcctctgaaaactgttttctctgatttgtatttagattcctccccccattattcacaatcatattgtatttcggaaccccaatgcagagcagtttgctttgaaaaatagttgtttttaaaagtttaatgtaaataattattttttagaagttttttttttttttttaaagacagggtctcgctttatcgcccaggctggagtacagtgatgcaatctcagtccactgcaacctctgccctcccgggtttaagcagttctcctgcctcagcctcctgagtagctgggattacaggtgtgccccaccacgcctggctaatttttgtagttttagtagagacggggtttcaccttaccgggctggtctaaaactcctgacctcaagtgatctacctgcctctgcctcccgaagtgcttggattacaggtgtgagccactgtgtccagcctgtaactattatttttttataaagagagattcttattttcttggctttttgatgtatctgttcctgatagataatcattggctagtaactcctagtacactggtttcacagttgctacctctcctgcttttctctaattattacgccaactcaagtagttaaaaatcagtaagaaaaatgtcttgagctagaagaacccatagaggaagattttgtaatgcgaatctcctctcataattttagttctgtaaattcagggtttttttttgtttttttgttttttttaagccgaaaaaatgcttaatatgttccagtaagggtattaagtaaaaattaaataaacgtattaagtttaacatattaaattaatttaacatttagactaacattaacatttaaattaatatgttaagtgaatatacttaatatattctagtacaggtatgcttggaaatagggcgtttccttttcatgaattgatttcgtacagcacagtggcttataaggaaccagcagtgtttttccctgagtaattatgaacttagtcaagatcagaagctgggttttggggttgagaagagttcatttatttaaataaagtttctatttaaaaacctttttaaaaagttaaca

SEQ ID NO: 378975 - DNA, 1883 bp, Homo sapiens
gtgtgtcgccggctccttgagggtccatgtgatttttacgccagtgctgctgaactgtgcagggtagggagctggcacagtccgattaattgtccttgggtcgaggtgtctcgtcggaccctttggggctcagtggagaattaaggcagagtcactgtaattatttctaataccaattccaaaatagtgactcttggacaatagtgcaattatatggaattatggctggttataagcctgtagctattcagacatatcctatacttggtgaaaaaatcacccaagatacactgtactggaacaactataagacccctgttcagattaaggaatttggtgcagtttcaaaagtagacttttctcctcagcctccatataattatgctgtcacagcttcctcaagaattcacatttatggccgatactcccaagaacctataaaaaccttttctcgatttaaagacacagcatactgtgctacttttcgacaagatggtagattgcttgtggctggcagtgaagatggtggagttcaactttttgatataagtgggagggctcccctcaggcagtttgaaggccatacaaaagcagttcatacagtagattttacagctgacaaatatcacgtggtctctggggctgatgattatacagttaaattatgggatattccaaactccaaagaaattttgacatttaaagaacactctgattatgtgaggtgtggatgtgctagcaaacttaatccggatctctttataacaggatcatatgatcatactgtgaagatgtttgatgcacgaacgagtgagagtgttctctccgttgagcatgggcagccagtggagagtgtcctacttttcccctctggaggtcttctggtgtcagcaggaggtcgttatgttaaagtctgggacatgttaaaaggaggacaattgctagtatctttgaaaaatcatcacaaaaccgtgacatgtttatgtctaagcagctctggacagaggttactctctggctcactggataggaaggtgaaagtatacagcacaacttcctacaaagtagtccacagttttgattatgcagcttcaattttgagtcttgcccttgcacatgaagatgagacaatagttgtaggaatgaccaatggaatactgagtgttaaacatcggaaatctgaagcaaagaaggaatcacttcccagaagaagaaggcctgcatatcgaacctttattaaaggaaaaaattacatgaagcaacgggatgacattttgattaacaggccagcaaagaagcacctagaattgtatgacagggatctgaaacattttcggatctctaaggcactcgatagagttcttgatcccacttgtacaataaagacacccgagattacggtgtccatcataaaggagttaaatcgaagaggagtccttgcaaatgcgcttgcaggtcgggatgagaaggaaatcagtcatgttcttaattttttgataaggaatctttctcagccaagatttgcccctgttttaatcaatgctgctgaaataattattgatatatatctgcctgtaattggtcagtcccctgtagttgataaaaagtttttactacttcaaggacttgtagaaaaagagattgattaccaaagagaattgttagaaaccttggggatgatggatatgctttttgccaccatgagaaggaaggaaggcacttctgtgttggaacacacatctgatggatttccagagaataagaagatagaatcatagtgtctgctaaataagacatataagaactctgaagttggaatagatttgactgtattaaatgttggcgagagactctctttgatacattaaaaaaactgtttgcag

SEQ ID NO: 378976 - DNA, 625 bp, Homo sapiens
tatgtgtatttgaatggaactgttggtgaatgtatggacaagcagcaaacacatggtaaatgtgttttgaagtaaaagtactataaattacgagttaagaatagactaacttatttttctaattgttattagcatgaagatgagacaatagttgtaggaatgaccaatggaatactgagtgttaaacatcggaaatctgaagcaaagaaggaatcacttcccagaagaagaaggcctgcatatcgaacctttattaaaggaaaaaattacatgaagcaacgggtatttgtgcatttctcatatttgtttaaagggtgaaatttgttagagtagccagcttcatccctgcacattactggaaagcgtagttcacatggcactttattttgcttttctctacatcagaattatttctagattgctagattggggacattattgatgagtaatggggaacaaggactactttatgtaatactctgcatcataacataatgttataatgctttactgcattcaaaataatgtctttcacatactacctgatttgatctaaatcccaagaagtagtagaaccaatcatgtccctgtttggcacctgagaagactgagcgacaaataattt

SEQ ID NO: 378977 - DNA, 3031 bp, Homo sapiens
gtgtgtcgccggctccttgagggtccatgtgatttttacgccagtgctgctgaactgtgcagggtagggagctggcacagtccgattaattgtccttgggtcgaggtgtctcgtcggaccctttggggctcagtggagaattaaggcagagtcactgtaattatttctaataccaattccaaaatagtgactcttggacaatagtgcaattatatggaattatggctggttataagcctgtagctattcagacatatcctatacttggtgaaaaaatcacccaagatacactgtactggaacaactataagacccctgttcagattaaggaatttggtgcagtttcaaaagtagacttttctcctcagcctccatataattatgctgtcacagcttcctcaagaattcacatttatggccgatactcccaagaacctataaaaaccttttctcgatttaaagacacagcatactgtgctacttttcgacaagatggtagattgcttgtggctggcagtgaagatggtggagttcaactttttgatataagtgggagggctcccctcaggcagtttgaaggccatacaaaagcagttcatacagtagattttacagctgacaaatatcacgtggtctctggggctgatgattatacagttaaattatgggatattccaaactccaaagaaattttgacatttaaagaacactctgattatgtgaggtgtggatgtgctagcaaacttaatccggatctctttataacaggatcatatgatcatactgtgaagatgtttgatgcacgaacgagtgagagtgttctctccgttgagcatgggcagccagtggagagtgtcctacttttcccctctggaggtcttctggtgtcagcaggaggtcgttatgttaaagtctgggacatgttaaaaggaggacaattgctagtatctttgaaaaatcatcacaaaaccgtgacatgtttatgtctaagcagctctggacagaggttactctctggctcactggataggaaggtgaaagtatacagcacaacttcctacaaagtagtccacagttttgattatgcagcttcaattttgagtcttgcccttgcacatgaagatgagacaatagttgtaggaatgaccaatggaatactgagtgttaaacatcggaaatctgaagcaaagaaggaatcacttcccagaagaagaaggcctgcatatcgaacctttattaaaggaaaaaattacatgaagcaacgggatgacattttgattaacaggccagcaaagaagcacctagaattgtatgacagggatctgaaacattttcggatctctaaggcactcgatagagttcttgatcccacttgtacaataaagacacccgagattacggtgtccatcataaaggagttaaatcgaagaggagtccttgcaaatgcgcttgcaggtcgggatgagaaggaaatcagtcatgttcttaattttttgataaggaatctttctcagccaagatttgcccctgttttaatcaatgctgctgaaataattattgatatatatctgcctgtaattggtcagtcccctgtagttgataaaaagtttttactacttcaaggacttgtagaaaaagagattgattaccaaagagaattgttagaaaccttggggatgatggatatgctttttgccaccatgagaaggaaggaaggcacttctgtgttggaacacacatctgatggatttccagagaataagaagatagaatcatagtgtctgctaaataagacatataagaactctgaagttggaatagatttgactgtattaaatgttggcgagagactctctttgatacattaaaaaaactgtttgcagaagcagttctgtggaagagactggaataattatggccggaaaacaagtacccgttttaagtaagacatggttttccatgtaatattttgaattatagcatcttcacctagaagatctcaattgtcttagtcacagagtaggtttatctgggatggatattaattttaatacaggagtgttctgtatcaacatttgggttggtattcagatgggaattcaaatatgaatcctctctggagagggtccaactgggaatcctgctaaaggagcaaagccttgtattacctctggaagacaacaaaaacaattggcaacaacaaaaagcctctttcttgactttaatcagtgcctttgggatttctgggcccttgcttagcttgcttcctgtctccttgatatctacacttgtcttagatcacatgccctgcttcagctggtaatgggactgcatcggttccaagtgtggcaagtaagttttcggctctgaagaactgacactagctagatttgtattcagagtgtgagagcaagctctacagatagaccttattggactacttttttttttttcttcatgcagcctttctaccaagttttcaccttgtttcaggtcagaggaatgatagaatttgtcatttttcttacaacagcctttcagactattcttcatatgtttcaagctaatcttgtagctaagctacctaatcctctgaaaactgttttctctgatttgtatttagattcctccccccattattcacaatcatattgtatttcggaaccccaatgcagagcagtttgctttgaaaaatagttgtttttaaaagtttaatgtaaataattattttttagaagttttttttttttttttaaagacagggtctcgctttatcgcccaggctggagtacagtgatgcaatctcagtccactgcaacctctgccctcccgggtttaagcagttctcctgcctcagcctcctgagtagctgggattacaggtgtggtggcgagtgcctttaatcctagctactcaggaggctgaggcaggagaatctcttgaacttgggaggcagaggttgcaatgagccaagatcgtgccactgcactccagcttcggtgacagagtgagactcagtctcaaaaaaaaa

SEQ ID NO: 378978 - DNA, 2130 bp, Homo sapiens
ggagcaggccctgaggactcccgcggtgctgtcacaagcagtgctgcctttgggagcccctaacctcctgctttttctctcctcagtgtgggaaaggggtttggtcagccaggggtgtcagcagccctgtcccacacccattgtctacacctaatctggtggcagggaggccacagagtgcagtgattggaactgggtgagagggttagaggcaactgggccctaggccgagtcaagtgcatggaatcctgactgtcagcaattagggatctttctgcttttgggagggaagtacttgttccacgcgtctcactgaatatggcacggaacctgatctgtcccaagtgggagtttaaccaagctagcgggggcccagggccctggcccagtctgacacctacctcctctcccaccttctactcacccagaagactaggagaatctgaaagcagaggtggtgcagcgtcactagctccaggaatccagaaaaacagggatagggcattctgggaggttgaagtgggtggatcacttgagctcaagagttggagatcagtctaggaaacacgatgaaaccccatctacacaaagcaaaaattagcttggcgtggtggcgcgacctgtagtcccagctactcagcaggctgaggtggaggatcgcttgagcctgagaggtccaggctgcagtgagccatgattgtgccactgcactccagcctgggtgatagagtgagaccctgtctcaaaaaaacaaaaccaaaaaaacagagctagggctggggacccctatggccactgaatctgagcccctgggggcagaggaactgagctcccagccctgtggctgccaaggatcctttttccttgagcttgcagggattgagagagagagagtcagcggccctgatgttagcgatgcagactccaggagaagggggcatgctcgcagtttagaggaagtgagcccctcttccacgttccactcccaccatcctcctgggaccccagcctgcatgccccccaaaagatgcttttgcactgattcaacaaagcctaaagatgcaaaggcctaattgaagacctgtgaatggcatgtacggtcctcagttcccagctgaggggccactcgggctccccatattcccctcagcctctccatcttccaacaggggtgtggagtgcatccatggccatgagtattgatctgtcccagcctgtgcattgctccgaggcagttctgagtggatgatgtacagatgggattcctcagctcatttgcgtggttgacgttatggctgctggttttactgccacaactcccaggcccaacctggcttaatgtctaagttttaagccaaaaaagatggggagcagagctttgtggcagggctgggggttggggtccactttagttttgtggcaggatgaaggctgcagtggttttattaatcatgattggcctggccgtagctccaggctgagagggacaggtttgtcagtggtggtcccccagatgtccctgtgcccagccctggcctgtctgccctcaggcccagcaggaggcgctaccacaggctctgactggcgtccctactccctgtaccccagatggacagaaccttcgggtctacagtcggaatatatcattctccccattttaacctgagctgcctgacacacggagggtgtgctgggtaaggggcctagggagccagggttgaatcatggatcctggggaaaggttgcagacacaggaagggttgtcacctctctgtggagccctgctgcttaccacacagcaccttctgcagagactagctctgagggtggcaggggaccccacaggccatggccactccctctctgcacctgtccgtgcctgctgtggaagcctggactgggggaggagattgctaccctgtgagcctgagggagccacgtccagctgtgacctctacctggggctttacagagagttgtttatgggtaacagacaccttgtttcagagggaatgggcatgagctggcaagtgaagcacccccacagcttatcaggaactttttctcatttttaaaccatcatgtcttcatttcacattggaataaagtgaggttttggaaaaaaactgc

SEQ ID NO: 378979 - DNA, 2076 bp, Homo sapiens
ggagcaggccctgaggactcccgcggtgctgtcacaagcagtgctgcctttgggagcccctaacctcctgctttttctctcctcagtgtgggaaaggggtttggtcagccaggggtgtcagcagccctgtcccacacccattgtctacacctaatctggtggcagggaggccacagagtgcagtgattggaactgggtgagagggttagaggcaactgggccctaggccgagtcaagtgcatggaatcctgactgtcagcaattagggatctttctgcttttgggagggaagtacttgttccacgcgtctcactgaatatggcacggaacctgatctgtcccaagtgggagtttaaccaagctagcgggggcccagggccctggcccagtctgacacctacctcctctcccaccttctactcacccagaagactaggagaatctgaaagcagaggtggtgcagcgtcactagctccaggaatccagaaaaacagggatagggcattctgggaggttgaagtgggtggatcacttgagctcaagagttggagatcagtctaggaaacacgatgaaaccccatctacacaaagcaaaaattagcttggcgtggtggcgcgacctgtagtcccagctactcagcaggctgaggtggaggatcgcttgagcctgagaggtccaggctgcagtgagccatgattgtgccactgcactccagcctgggtgatagagtgagaccctgtctcaaaaaaacaaaaccaaaaaaacagagctagggctggggacccctatggccactgaatctgagcccctgggggcagaggaactgagctcccagccctgtggctgccaaggatcctttttccttgagcttgcagggattgagagagagagagtcagcggccctgatgttagcgatgcagactccaggagaagggggcatgctcgcagtttagaggaagtgagcccctcttccacgttccactcccaccatcctcctgggaccccagcctgcatgccccccaaaacctgtgaatggcatgtacggtcctcagttcccagctgaggggccactcgggctccccatattcccctcagcctctccatcttccaacaggggtgtggagtgcatccatggccatgagtattgatctgtcccagcctgtgcattgctccgaggcagttctgagtggatgatgtacagatgggattcctcagctcatttgcgtggttgacgttatggctgctggttttactgccacaactcccaggcccaacctggcttaatgtctaagttttaagccaaaaaagatggggagcagagctttgtggcagggctgggggttggggtccactttagttttgtggcaggatgaaggctgcagtggttttattaatcatgattggcctggccgtagctccaggctgagagggacaggtttgtcagtggtggtcccccagatgtccctgtgcccagccctggcctgtctgccctcaggcccagcaggaggcgctaccacaggctctgactggcgtccctactccctgtaccccagatggacagaaccttcgggtctacagtcggaatatatcattctccccattttaacctgagctgcctgacacacggagggtgtgctgggtaaggggcctagggagccagggttgaatcatggatcctggggaaaggttgcagacacaggaagggttgtcacctctctgtggagccctgctgcttaccacacagcaccttctgcagagactagctctgagggtggcaggggaccccacaggccatggccactccctctctgcacctgtccgtgcctgctgtggaagcctggactgggggaggagattgctaccctgtgagcctgagggagccacgtccagctgtgacctctacctggggctttacagagagttgtttatgggtaacagacaccttgtttcagagggaatgggcatgagctggcaagtgaagcacccccacagcttatcaggaactttttctcatttttaaaccatcatgtcttcatttcacattggaataaagtgaggttttggaaaaaaactgc

SEQ ID NO: 378980 - DNA, 774 bp, Homo sapiens
cagaactataattaagttatatttagtactaaacaattgtctttacacatcacagtagcctctgcggtatctctgtaatatatgtagcacagcacagtttttatttttgaaacagtaactgagaaaatctaaaggtatgtgtgctatttcctccttgctcagaaggcaggaagggatataaatatattttagaaagattgttactcaggagcattatgataaaaagaaaataaaaatgaacagctatgatgtttgtcagtatgagatagatttatatgttctgacttggaaagatgaatcttagaggtattatgtggaaaagcaaattatgtacactatgtataacacagtccttggctggcagtggctcatgcctgtaatcccaacactttaaaaagccaaggtggaggattgcttgaggccaggagttcaagactggcctgggcgacatagcaagaccccacctctacaaaaaattagtcaagtatggtggcacacacccatagtctcagctactcctgtagctgaggcatgaggattatttgagcctaggtgacagaggaagaccctgtctcttaacaacaacaacaacaacaaaaaatcacaatcccatttttgttaaaaagaagattagtgaatacatagaagaaatctggactgagtgtagtggctcatgcctataatcccagcactaaaggaggctggggcaaaagtatcgcttgaggcctggagttcaagaccagcctgggcaacaaagcaaaaccctatcttatt

SEQ ID NO: 378981 - DNA, 304 bp, Homo sapiens
ccatcactttggatctgtttgaaactttcccaaatgcctcattggatggttattctccatgtcatccagagtcaagaagagtaactctgtcctgtccttttcaaatgttctggcctgtgcatgtccactcaaaaaaaataagcaaaaaaataaaacaaacttatcaggcggggcatagtggctcatgcctgtaattccagcactgagaggccaaggtgggaagatcgcttgaggccagggattcaagaccagcctgggcaaaaatagggagatcttgcctctataaaaaataaaaagtaaattg

SEQ ID NO: 378982 - DNA, 5416 bp, Homo sapiens
  misc_feature (5379)..(5379): n is a, c, g, or t
aagccatcttgttcccctctaggttgatagaagtccagatcctgaggaaatctccagctaaatgctcaaaatataaaaactgagctgagatttgcgaagagcagcagcatggatggattttatgaccagcaagtgccttacatggtcaccaatagtcagcgtgggagaaattgtaacgagaaaccaacaaatgtcaggaaaagaaaattcattaacagagatctggctcatgattcagaagaactctttcaagatctaagtcaattacaggaaacatggcttgcagaagctcaggtacctgacaatgatgagcagtttgtaccagactatcaggctgaaagtttggcttttcatggcctgccactgaaaatcaagaaagaaccccacagtccatgttcagaaatcagctctgcctgcagtcaagaacagccctttaaattcagctatggagaaaagtgcctgtacaatgtcagtgcctatgatcagaagccacaagtgggaatgaggccctccaacccccccacaccatccagcacgccagtgtccccactgcatcatgcatctccaaactcaactcatacaccgaaacctgaccgggccttcccagctcacctccctccatcgcagtccataccagatagcagctaccccatggaccacagatttcgccgccagctttctgaaccctgtaactcctttcctcctttgccgacgatgccaagggaaggacgtcctatgtaccaacgccagatgtctgagccaaacatccccttcccaccacaaggctttaagcaggagtaccacgacccagtgtatgaacacaacaccatggttggcagtgcggccagccaaagctttccccctcctctgatgattaaacaggaacccagagattttgcatatgactcagaagtgcctagctgccactccatttatatgaggcaagaaggcttcctggctcatcccagcagaacagaaggctgtatgtttgaaaagggccccaggcagttttatgatgacacctgtgttgtcccagaaaaattcgatggagacatcaaacaagagccaggaatgtatcgggaaggacccacataccaacggcgaggatcacttcagctctggcagtttttggtagctcttctggatgacccttcaaattctcattttattgcctggactggtcgaggcatggaatttaaactgattgagcctgaagaggtggcccgacgttggggcattcagaaaaacaggccagctatgaactatgataaacttagccgttcactccgctattactatgagaaaggaattatgcaaaaggtggctggagagagatatgtctacaagtttgtgtgtgatccagaagcccttttctccatggcctttccagataatcagcgtccactgctgaagacagacatggaacgtcacatcaacgaggaggacacagtgcctctttctcactttgatgagagcatggcctacatgccggaagggggctgctgcaacccccacccctacaacgaaggctacgtgtattaacacaagtgacagtcaagcagggcgtttttgcgcttttccttttttctgcaagatacagagaattgctgaatctttgttttatttctgttgttggtattttatttttaaataataatacacaaaaaggggcttttcctgttgcattattctatggtctgccatggactgtgcactttatttgagggtgggtgggagtaatctaaacatttattctgtgtaacaggaagctaatgggtgaatgggcagagggatttggggattactttttacttaggcttgggatggggtcctacaagttttgagtatgatgaaactatatcatgtctgtttgatttcataacaacataagataatgtttattttatcggggtatctatggtacagttaatttcacgttgtgtaaatatccacttggagactatttgccttgggcattttcccctgtcatttatgagtctctgcaggtgtacaaaaaaaccccaatctactgtaaatggcagtttaattgttagaaatgactgtttttgcaccacttgtaaaaaggtatttagcgattgcatttgctgtttgttgttttattttgctttatatatgacttgcagaggataaccataaaatgggtaattctctctgaagttgaataatcaccatgactgtaaatgaggggcacaattttggactctggcgccaaactgagtcataggccagtagcattacgtgtatctggtgccaccttgctgtttagatacaaatcataccgtcttttaaatattttgaagcccatttcagttaaataatgacatgtcatggtcctttggaatcttcatttaaatgttaaatctggaatcaaaatgaagcaaaaaatatctgtctccttttcactttcttcagtacataaatacattatttaatcaataagaattaactgtactaaatcatgtattatgctgttctagttacagcaaacactctttaagaaaaatatccaatacactaaataggtactatagtaatttttagacatggtacccattgatatgcatttaaaccttttactgctgtgttatgttgataacatatataaatattagataatgctaatgcttctgctgctgtcttttctgtaatattctctttcatgctgaatttactatgaccatttataagcagtgcagttaactacagatagcatttcaggacaaaatagatgactcaaaccatttattgcttaaaaaatagcttacgccatgctatgctataagcagcttttatgcacattgacaaatgaagagtaagcttcagcttgctaaaggaaactgtggaaccttttgtaacttttggtgatatggaaaattatttacaaaccgtcaaagaatatgaggaagttgctgtatgacatagtgctggcactgatattatccatcatctctttttggacacttctgtaaatgtgattggattgtttgaaagaagatttaaagtttcaaagttttttgttctgtttttgctttgcatttggagaaaatattgaaagcagggtatgttgtttcattcaccttgaaaaaaccatgagtaaatggggatatagaatctctgaatagctcgctaaaagattcaagcaagggacatgaattttgttccatctatcaataatatccagaagaacaacttttttaaagagtctatagcaaaaagcaaaaaaaaaaaaaaattctaaacacaaagtcaaaataaacctattgtaaaagcatttcgtgatgagcatgaaaaagattgtttaaagatgatccccccagctacccattttccaaaactacacagatcacagctcatttctctaagtggagcagttatcaagaaacccaaacaccaaaattgctactcttcacatttaatcctacaaaaagtactccaatttcaaaatatgtatgtaacctgcgatttcaatgattgttgttcatatacatcatgtattattttggcccattttgggcctaaaaaagaaaactatgccttaaaaatcagaaccttttctccccactatgcttatgtggccatctacagcacttagaataaaaacagatgttaaaatattcagtgaaagttttattggaaaaaggaattgagatatataattgagatttggtgaaattgaaggagaaaatttaagtgagtctttaaaatatattctgaatgaaaactgtattgaggattcatttttgttccttttttttctttttctcttttctcctttttcttctttttaatagtctagttttagtcagtcagtgaggaagaattgggccatgctaacgttatcacaagagaacaatggcagaaatggtattagttatataatatttaaggacaaactatatgttttgctgttttaacgtagtgactcactgaactaaatacataattgaccaacattaagtgtatttccaatacagaagggttgaaaatattacattataaactcttttgaaaaatgtatctaaaattttttaagttctgttttgattccactttttggttgagtttttatgtttttgttttcaggtagattaataaatctggcagctgatttctgcaagattcttgtgttttgaatttctcattgaattggctactcaaacatagaaatcatttgttaatgatgtaatgtcttctctcagcttttatcttcactgctgtttgctgtctcttgatgatgacatgttaatacccaatagattaattgcaacaaacacttatactcaaataactaagtaaaaataatttttcttgttatgtccatgaaaagtgcttcagaataaaaatccacaagactgacagtgcagaacatttttctcaaatcatgggcggatcttggaggtctagtttcccgtagatgctgtaaccaattaccacaacttcagtaatttacacaaatttatcttatagttctggaggcagaagttcaaaagaagccttaagagactaaaaccaagatgtccttaggtctggttccttctggaggctccaggggagattcttccagctttcacttctagagtctgctgacattccttggctcctggctacatcacttcaatctctgcttccatggtcacatactcttctactatagtcaaatttccttcctgcctcttataaggatgcttgtgattacatttaggggatgctcagataatccaggacaatctctccatctcaagatccttaacttaatgacgtgtgccaagtccctttggctagataattattcataggtcccagggattaggacatggatgtaaggggtgagggcagggctgttattcagaacaccgcacggaggaggaagactgtgtagcaaagactctaattgatttactcaggaacagtggagttctgctgagggatctaggatttgaaagtactagagtttgcttttatttaccactgagatattttccccttattctgcataaataattttgaaaactttctatattaaatttcaactattccactaaaatgtctggtaatcacatcaagcctttagattattcaaatccttccccagcccccaggaaaacactaagtcatgaaacagaaaaacagaaggtatgataataatagtaataacagttaaatcagtggtctaatccagattttattttttaatacatttcttttggtgttaatatgggttactatgtgatcttatcatttgctagtgattattacttattaggtaagaacaatgtgtaaaatatgtctattactcaaaagaacaattgcaaaatgagtcaacttatcttttataaccaggaagaaatattgggaagnagaattggcgagaaggattaaaagagcgtgtttacag

SEQ ID NO: 378983 - DNA, 5680 bp, Homo sapiens
  misc_feature (5643)..(5643): n is a, c, g, or t
agcggaagtggcttcagagatgcagccctcagtgcttaacgtcctagttattgtccttgaaacccgagccatctcaccgctcgcccccaaccctgggctctggctgtttaaaagctggagaggaagtgaaagcgtcaagtacatcccgttaggtgcaaagcaagtctcgttgatcgccattgctagttttgcacacgtttgcgaatcagagctgcccggggtacaccgaccgcgcagggaaacatcgagagtgtaaataaatacatcgcctcttgttcggatttttgctactaccgaaaatatgtaaattgtgaactctgttggctctctttggatccaggttgatagaagtccagatcctgaggaaatctccagctaaatgctcaaaatataaaaactgagctgagatttgcgaagagcagcagcatggatggattttatgaccagcaagtgccttacatggtcaccaatagtcagcgtgggagaaattgtaacgagaaaccaacaaatgtcaggaaaagaaaattcattaacagagatctggctcatgattcagaagaactctttcaagatctaagtcaattacaggaaacatggcttgcagaagctcaggtacctgacaatgatgagcagtttgtaccagactatcaggctgaaagtttggcttttcatggcctgccactgaaaatcaagaaagaaccccacagtccatgttcagaaatcagctctgcctgcagtcaagaacagccctttaaattcagctatggagaaaagtgcctgtacaatgtcagtgcctatgatcagaagccacaagtgggaatgaggccctccaacccccccacaccatccagcacgccagtgtccccactgcatcatgcatctccaaactcaactcatacaccgaaacctgaccgggccttcccagctcacctccctccatcgcagtccataccagatagcagctaccccatggaccacagatttcgccgccagctttctgaaccctgtaactcctttcctcctttgccgacgatgccaagggaaggacgtcctatgtaccaacgccagatgtctgagccaaacatccccttcccaccacaaggctttaagcaggagtaccacgacccagtgtatgaacacaacaccatggttggcagtgcggccagccaaagctttccccctcctctgatgattaaacaggaacccagagattttgcatatgactcagaagtgcctagctgccactccatttatatgaggcaagaaggcttcctggctcatcccagcagaacagaaggctgtatgtttgaaaagggccccaggcagttttatgatgacacctgtgttgtcccagaaaaattcgatggagacatcaaacaagagccaggaatgtatcgggaaggacccacataccaacggcgaggatcacttcagctctggcagtttttggtagctcttctggatgacccttcaaattctcattttattgcctggactggtcgaggcatggaatttaaactgattgagcctgaagaggtggcccgacgttggggcattcagaaaaacaggccagctatgaactatgataaacttagccgttcactccgctattactatgagaaaggaattatgcaaaaggtggctggagagagatatgtctacaagtttgtgtgtgatccagaagcccttttctccatggcctttccagataatcagcgtccactgctgaagacagacatggaacgtcacatcaacgaggaggacacagtgcctctttctcactttgatgagagcatggcctacatgccggaagggggctgctgcaacccccacccctacaacgaaggctacgtgtattaacacaagtgacagtcaagcagggcgtttttgcgcttttccttttttctgcaagatacagagaattgctgaatctttgttttatttctgttgttggtattttatttttaaataataatacacaaaaaggggcttttcctgttgcattattctatggtctgccatggactgtgcactttatttgagggtgggtgggagtaatctaaacatttattctgtgtaacaggaagctaatgggtgaatgggcagagggatttggggattactttttacttaggcttgggatggggtcctacaagttttgagtatgatgaaactatatcatgtctgtttgatttcataacaacataagataatgtttattttatcggggtatctatggtacagttaatttcacgttgtgtaaatatccacttggagactatttgccttgggcattttcccctgtcatttatgagtctctgcaggtgtacaaaaaaaccccaatctactgtaaatggcagtttaattgttagaaatgactgtttttgcaccacttgtaaaaaggtatttagcgattgcatttgctgtttgttgttttattttgctttatatatgacttgcagaggataaccataaaatgggtaattctctctgaagttgaataatcaccatgactgtaaatgaggggcacaattttggactctggcgccaaactgagtcataggccagtagcattacgtgtatctggtgccaccttgctgtttagatacaaatcataccgtcttttaaatattttgaagcccatttcagttaaataatgacatgtcatggtcctttggaatcttcatttaaatgttaaatctggaatcaaaatgaagcaaaaaatatctgtctccttttcactttcttcagtacataaatacattatttaatcaataagaattaactgtactaaatcatgtattatgctgttctagttacagcaaacactctttaagattgatatgcatttaaaccttttactgctgtgttatgttgataacatatataaatattagataatgctaatgcttctgctgctgtcttttctgtaatattctctttcatgctgaatttactatgaccatttataagcagtgcagttaactacagatagcatttcaggacaaaatagatgactcaaaccatttattgcttaaaaaatagcttacgccatgctatgctataagcagcttttatgcacattgacaaatgaagagtaagcttcagcttgctaaaggaaactgtggaaccttttgtaacttttggtgatatggaaaattatttacaaaccgtcaaagaatatgaggaagttgctgtatgacatagtgctggcactgatattatccatcatctctttttggacacttctgtaaatgtgattggattgtttgaaagaagatttaaagtttcaaagttttttgttctgtttttgctttgcatttggagaaaatattgaaagcagggtatgttgtttcattcaccttgaaaaaaccatgagtaaatggggatatagaatctctgaatagctcgctaaaagattcaagcaagggacatgaattttgttccatctatcaataatatccagaagaacaacttttttaaagagtctatagcaaaaagcaaaaaaaaaaaaaaattctaaacacaaagtcaaaataaacctattgtaaaagcatttcgtgatgagcatgaaaaagattgtttaaagatgatccccccagctacccattttccaaaactacacagatcacagctcatttctctaagtggagcagttatcaagaaacccaaacaccaaaattgctactcttcacatttaatcctacaaaaagtactccaatttcaaaatatgtatgtaacctgcgatttcaatgattgttgttcatatacatcatgtattattttggcccattttgggcctaaaaaagaaaactatgccttaaaaatcagaaccttttctccccactatgcttatgtggccatctacagcacttagaataaaaacagatgttaaaatattcagtgaaagttttattggaaaaaggaattgagatatataattgagatttggtgaaattgaaggagaaaatttaagtgagtctttaaaatatattctgaatgaaaactgtattgaggattcatttttgttccttttttttctttttctcttttctcctttttcttctttttaatagtctagttttagtcagtcagtgaggaagaattgggccatgctaacgttatcacaagagaacaatggcagaaatggtattagttatataatatttaaggacaaactatatgttttgctgttttaacgtagtgactcactgaactaaatacataattgaccaacattaagtgtatttccaatacagaagggttgaaaatattacattataaactcttttgaaaaatgtatctaaaattttttaagttctgttttgattccactttttggttgagtttttatgtttttgttttcaggtagattaataaatctggcagctgatttctgcaagattcttgtgttttgaatttctcattgaattggctactcaaacatagaaatcatttgttaatgatgtaatgtcttctctcagcttttatcttcactgctgtttgctgtctcttgatgatgacatgttaatacccaatagattaattgcaacaaacacttatactcaaataactaagtaaaaataatttttcttgttatgtccatgaaaagtgcttcagaataaaaatccacaagactgacagtgcagaacatttttctcaaatcatgggcggatcttggaggtctagtttcccgtagatgctgtaaccaattaccacaacttcagtaatttacacaaatttatcttatagttctggaggcagaagttcaaaagaagccttaagagactaaaaccaagatgtccttaggtctggttccttctggaggctccaggggagattcttccagctttcacttctagagtctgctgacattccttggctcctggctacatcacttcaatctctgcttccatggtcacatactcttctactatagtcaaatttccttcctgcctcttataaggatgcttgtgattacatttaggggatgctcagataatccaggacaatctctccatctcaagatccttaacttaatgacgtgtgccaagtccctttggctagataattattcataggtcccagggattaggacatggatgtaaggggtgagggcagggctgttattcagaacaccgcacggaggaggaagactgtgtagcaaagactctaattgatttactcaggaacagtggagttctgctgagggatctaggatttgaaagtactagagtttgcttttatttaccactgagatattttccccttattctgcataaataattttgaaaactttctatattaaatttcaactattccactaaaatgtctggtaatcacatcaagcctttagattattcaaatccttccccagcccccaggaaaacactaagtcatgaaacagaaaaacagaaggtatgataataatagtaataacagttaaatcagtggtctaatccagattttattttttaatacatttcttttggtgttaatatgggttactatgtgatcttatcatttgctagtgattattacttattaggtaagaacaatgtgtaaaatatgtctattactcaaaagaacaattgcaaaatgagtcaacttatcttttataaccaggaagaaatattgggaagnagaattggcgagaaggattaaaagagcgtgtttacag

SEQ ID NO: 378984 - DNA, 1723 bp, Homo sapiens
accccctgcttggttgcaccctcagatagtacccatgagcttcactgttcagcctcggggcccaggcgcttcctggaatctctccttggccggggttaaaatgcagttcccgctcaaaatgcttataggttgatagaagtccagatcctgaggaaatctccagctaaatgctcaaaatataaaaactgagctgagatttgcgaagagcagcagcatggatggattttatgaccagcaagtgccttacatggtcaccaatagtcagcgtgggagaaattgtaacgagaaaccaacaaatgtcaggaaaagaaaattcattaacagagatctggctcatgattcagaagaactctttcaagatctaagtcaattacaggaaacatggcttgcagaagtggcttttcatggcctgccactgaaaatcaagaaagaaccccacagtccatgttcagaaatcagctctgcctgcagtcaagaacagccctttaaattcagctatggagaaaagtgcctgtacaatgtcagtgcctatgatcagaagccacaagtgggaatgaggccctccaacccccccacaccatccagcacgccagtgtccccactgcatcatgcatctccaaactcaactcatacaccgaaacctgaccgggccttcccagctcacctccctccatcgcagtccataccagatagcagctaccccatggaccacagatttcgccgccagctttctgaaccctgtaactcctttcctcctttgccgacgatgccaagggaaggacgtcctatgtaccaacgccagatgtctgagccaaacatccccttcccaccacaaggctttaagcaggagtaccacgacccagtgtatgaacacaacaccatggttggcagtgcggccagccaaagctttccccctcctctgatgattaaacaggaacccagagattttgcatatgactcagaagtgcctagctgccactccatttatatgaggcaagaaggcttcctggctcatcccagcagaacagaaggctgtatgtttgaaaagggccccaggcagttttatgatgacacctgtgttgtcccagaaaaattcgatggagacatcaaacaagagccaggaatgtatcgggaaggacccacataccaacggcgaggatcacttcagctctggcagtttttggtagctcttctggatgacccttcaaattctcattttattgcctggactggtcgaggcatggaatttaaactgattgagcctgaagaggtggcccgacgttggggcattcagaaaaacaggccagctatgaactatgataaacttagccgttcactccgctattactatgagaaaggaattatgcaaaaggtggctggagagagatatgtctacaagtttgtgtgtgatccagaagcccttttctccatggcctttccagataatcagcgtccactgctgaagacagacatggaacgtcacatcaacgaggaggacacagtgcctctttctcactttgatgagagcatggcctacatgccggaagggggctgctgcaacccccacccctacaacgaaggctacgtgtattaacacaagtgacagtcaagcagggcgtttttgcgcttttccttttttctgcaagatacagagaattgctgaatctttgttttatttctgttgttggtattttatttttaaataataatacacaaaaagggg

SEQ ID NO: 378985 - DNA, 2089 bp, Homo sapiens
  misc_feature (2052)..(2052): n is a, c, g, or t
tgtgatctgtgtagtttggaaaatgggtagctggggggatcatctttaaacaatctttttcatgcttatcaagaaacccaaacaccaaaattgctactcttcacatttaatcctacaaaaagtactccaatttcaaaatatgtatgtaacctgcgatttcaatgattgttgttcatatacatcatgtattattttggcccattttgggcctaaaaaagaaaactatgccttaaaaatcagaaccttttctccccactatgcttatgtggccatctacagcacttagaataaaaacagatgttaaaatattcagtgaaagttttattggaaaaaggaattgagatatataattgagatttggtgaaattgaaggagaaaatttaagtgagtctttaaaatatattctgaatgaaaactgtattgaggattcatttttgttccttttttttctttttctcttttctcctttttcttctttttaatagtctagttttagtcagtcagtgaggaagaattgggccatgctaacgttatcacaagagaacaatggcagaaatggtattagttatataatatttaaggacaaactatatgttttgctgttttaacgtagtgactcactgaactaaatacataattgaccaacattaagtgtatttccaatacagaagggttgaaaatattacattataaactcttttgaaaaatgtatctaaaattttttaagttctgttttgattccactttttggttgagtttttatgtttttgttttcaggtagattaataaatctggcagctgatttctgcaagattcttgtgttttgaatttctcattgaattggctactcaaacatagaaatcatttgttaatgatgtaatgtcttctctcagcttttatcttcactgctgtttgctgtctcttgatgatgacatgttaatacccaatagattaattgcaacaaacacttatactcaaataactaagtaaaaataatttttcttgttatgtccatgaaaagtgcttcagaataaaaatccacaagactgacagtgcagaacatttttctcaaatcatgggcggatcttggaggtctagtttcccgtagatgctgtaaccaattaccacaacttcagtaatttacacaaatttatcttatagttctggaggcagaagttcaaaagaagccttaagagactaaaaccaagatgtccttaggtctggttccttctggaggctccaggggagattcttccagctttcacttctagagtctgctgacattccttggctcctggctacatcacttcaatctctgcttccatggtcacatactcttctactatagtcaaatttccttcctgcctcttataaggatgcttgtgattacatttaggggatgctcagataatccaggacaatctctccatctcaagatccttaacttaatgacgtgtgccaagtccctttggctagataattattcataggtcccagggattaggacatggatgtaaggggtgagggcagggctgttattcagaacaccgcacggaggaggaagactgtgtagcaaagactctaattgatttactcaggaacagtggagttctgctgagggatctaggatttgaaagtactagagtttgcttttatttaccactgagatattttccccttattctgcataaataattttgaaaactttctatattaaatttcaactattccactaaaatgtctggtaatcacatcaagcctttagattattcaaatccttccccagcccccaggaaaacactaagtcatgaaacagaaaaacagaaggtatgataataatagtaataacagttaaatcagtggtctaatccagattttattttttaatacatttcttttggtgttaatatgggttactatgtgatcttatcatttgctagtgattattacttattaggtaagaacaatgtgtaaaatatgtctattactcaaaagaacaattgcaaaatgagtcaacttatcttttataaccaggaagaaatattgggaagnagaattggcgagaaggattaaaagagcgtgtttacag

SEQ ID NO: 378986 - DNA, 874 bp, Homo sapiens
accccctgcttggttgcaccctcagatagtacccatgagcttcactgttcagcctcggggcccaggcgcttcctggaatctctccttggccggggttaaaatgcagttcccgctcaaaatgcttataggttgatagaagtccagatcctgaggaaatctccagctaaatgctcaaaatataaaaactgagctgagatttgcgaagagcagcagcatggatggattttatgaccagcaagtgccttacatggtcaccaatagtcagcgtgggagaaattgtaacgagaaaccaacaaatgtcaggaaaagaaaattcattaacagagatctggctcatgattcagaagaactctttcaagatctaagtcaattacaggaaacatggcttgcagaagctcaggtacctgacaatgatgagcagtttgtaccagactatcaggctgaaagttacatgtctggatactggctactggctactgtattggtcagcacagctttgaacagcgatgtcttccacattgttgtctccagcctggttcttccctccgaagctgtccattggacatcctcacctgatccctgctagtgtccctgtgcagattagaaaaaggcaacacctctggacttgctcccttagcccttggctgtgcattgcacaaaacaccatctacacgccaactccaatctttaacgcaacactccacagacaatttacactcagcaagtccaacagtgaaatcatgatttttcctgaccaacgttgctcttttacttctgttgcctttctaagttactggcatcaccatccaaactgaaatcctgatatttatccttagagacctcggttctttacaataaacctcaaattgctaac

SEQ ID NO: 378987 - DNA, 5734 bp, Homo sapiens
  misc_feature (5697)..(5697): n is a, c, g, or t
agcggaagtggcttcagagatgcagccctcagtgcttaacgtcctagttattgtccttgaaacccgagccatctcaccgctcgcccccaaccctgggctctggctgtttaaaagctggagaggaagtgaaagcgtcaagtacatcccgttaggtgcaaagcaagtctcgttgatcgccattgctagttttgcacacgtttgcgaatcagagctgcccggggtacaccgaccgcgcagggaaacatcgagagtgtaaataaatacatcgcctcttgttcggatttttgctactaccgaaaatatgtaaattgtgaactctgttggctctctttggatccaggttgatagaagtccagatcctgaggaaatctccagctaaatgctcaaaatataaaaactgagctgagatttgcgaagagcagcagcatggatggattttatgaccagcaagtgccttacatggtcaccaatagtcagcgtgggagaaattgtaacgagaaaccaacaaatgtcaggaaaagaaaattcattaacagagatctggctcatgattcagaagaactctttcaagatctaagtcaattacaggaaacatggcttgcagaagctcaggtacctgacaatgatgagcagtttgtaccagactatcaggctgaaagtttggcttttcatggcctgccactgaaaatcaagaaagaaccccacagtccatgttcagaaatcagctctgcctgcagtcaagaacagccctttaaattcagctatggagaaaagtgcctgtacaatgtcagtgcctatgatcagaagccacaagtgggaatgaggccctccaacccccccacaccatccagcacgccagtgtccccactgcatcatgcatctccaaactcaactcatacaccgaaacctgaccgggccttcccagctcacctccctccatcgcagtccataccagatagcagctaccccatggaccacagatttcgccgccagctttctgaaccctgtaactcctttcctcctttgccgacgatgccaagggaaggacgtcctatgtaccaacgccagatgtctgagccaaacatccccttcccaccacaaggctttaagcaggagtaccacgacccagtgtatgaacacaacaccatggttggcagtgcggccagccaaagctttccccctcctctgatgattaaacaggaacccagagattttgcatatgactcagaagtgcctagctgccactccatttatatgaggcaagaaggcttcctggctcatcccagcagaacagaaggctgtatgtttgaaaagggccccaggcagttttatgatgacacctgtgttgtcccagaaaaattcgatggagacatcaaacaagagccaggaatgtatcgggaaggacccacataccaacggcgaggatcacttcagctctggcagtttttggtagctcttctggatgacccttcaaattctcattttattgcctggactggtcgaggcatggaatttaaactgattgagcctgaagaggtggcccgacgttggggcattcagaaaaacaggccagctatgaactatgataaacttagccgttcactccgctattactatgagaaaggaattatgcaaaaggtggctggagagagatatgtctacaagtttgtgtgtgatccagaagcccttttctccatggcctttccagataatcagcgtccactgctgaagacagacatggaacgtcacatcaacgaggaggacacagtgcctctttctcactttgatgagagcatggcctacatgccggaagggggctgctgcaacccccacccctacaacgaaggctacgtgtattaacacaagtgacagtcaagcagggcgtttttgcgcttttccttttttctgcaagatacagagaattgctgaatctttgttttatttctgttgttggtattttatttttaaataataatacacaaaaaggggcttttcctgttgcattattctatggtctgccatggactgtgcactttatttgagggtgggtgggagtaatctaaacatttattctgtgtaacaggaagctaatgggtgaatgggcagagggatttggggattactttttacttaggcttgggatggggtcctacaagttttgagtatgatgaaactatatcatgtctgtttgatttcataacaacataagataatgtttattttatcggggtatctatggtacagttaatttcacgttgtgtaaatatccacttggagactatttgccttgggcattttcccctgtcatttatgagtctctgcaggtgtacaaaaaaaccccaatctactgtaaatggcagtttaattgttagaaatgactgtttttgcaccacttgtaaaaaggtatttagcgattgcatttgctgtttgttgttttattttgctttatatatgacttgcagaggataaccataaaatgggtaattctctctgaagttgaataatcaccatgactgtaaatgaggggcacaattttggactctggcgccaaactgagtcataggccagtagcattacgtgtatctggtgccaccttgctgtttagatacaaatcataccgtcttttaaatattttgaagcccatttcagttaaataatgacatgtcatggtcctttggaatcttcatttaaatgttaaatctggaatcaaaatgaagcaaaaaatatctgtctccttttcactttcttcagtacataaatacattatttaatcaataagaattaactgtactaaatcatgtattatgctgttctagttacagcaaacactctttaagaaaaatatccaatacactaaataggtactatagtaatttttagacatggtacccattgatatgcatttaaaccttttactgctgtgttatgttgataacatatataaatattagataatgctaatgcttctgctgctgtcttttctgtaatattctctttcatgctgaatttactatgaccatttataagcagtgcagttaactacagatagcatttcaggacaaaatagatgactcaaaccatttattgcttaaaaaatagcttacgccatgctatgctataagcagcttttatgcacattgacaaatgaagagtaagcttcagcttgctaaaggaaactgtggaaccttttgtaacttttggtgatatggaaaattatttacaaaccgtcaaagaatatgaggaagttgctgtatgacatagtgctggcactgatattatccatcatctctttttggacacttctgtaaatgtgattggattgtttgaaagaagatttaaagtttcaaagttttttgttctgtttttgctttgcatttggagaaaatattgaaagcagggtatgttgtttcattcaccttgaaaaaaccatgagtaaatggggatatagaatctctgaatagctcgctaaaagattcaagcaagggacatgaattttgttccatctatcaataatatccagaagaacaacttttttaaagagtctatagcaaaaagcaaaaaaaaaaaaaaattctaaacacaaagtcaaaataaacctattgtaaaagcatttcgtgatgagcatgaaaaagattgtttaaagatgatccccccagctacccattttccaaaactacacagatcacagctcatttctctaagtggagcagttatcaagaaacccaaacaccaaaattgctactcttcacatttaatcctacaaaaagtactccaatttcaaaatatgtatgtaacctgcgatttcaatgattgttgttcatatacatcatgtattattttggcccattttgggcctaaaaaagaaaactatgccttaaaaatcagaaccttttctccccactatgcttatgtggccatctacagcacttagaataaaaacagatgttaaaatattcagtgaaagttttattggaaaaaggaattgagatatataattgagatttggtgaaattgaaggagaaaatttaagtgagtctttaaaatatattctgaatgaaaactgtattgaggattcatttttgttccttttttttctttttctcttttctcctttttcttctttttaatagtctagttttagtcagtcagtgaggaagaattgggccatgctaacgttatcacaagagaacaatggcagaaatggtattagttatataatatttaaggacaaactatatgttttgctgttttaacgtagtgactcactgaactaaatacataattgaccaacattaagtgtatttccaatacagaagggttgaaaatattacattataaactcttttgaaaaatgtatctaaaattttttaagttctgttttgattccactttttggttgagtttttatgtttttgttttcaggtagattaataaatctggcagctgatttctgcaagattcttgtgttttgaatttctcattgaattggctactcaaacatagaaatcatttgttaatgatgtaatgtcttctctcagcttttatcttcactgctgtttgctgtctcttgatgatgacatgttaatacccaatagattaattgcaacaaacacttatactcaaataactaagtaaaaataatttttcttgttatgtccatgaaaagtgcttcagaataaaaatccacaagactgacagtgcagaacatttttctcaaatcatgggcggatcttggaggtctagtttcccgtagatgctgtaaccaattaccacaacttcagtaatttacacaaatttatcttatagttctggaggcagaagttcaaaagaagccttaagagactaaaaccaagatgtccttaggtctggttccttctggaggctccaggggagattcttccagctttcacttctagagtctgctgacattccttggctcctggctacatcacttcaatctctgcttccatggtcacatactcttctactatagtcaaatttccttcctgcctcttataaggatgcttgtgattacatttaggggatgctcagataatccaggacaatctctccatctcaagatccttaacttaatgacgtgtgccaagtccctttggctagataattattcataggtcccagggattaggacatggatgtaaggggtgagggcagggctgttattcagaacaccgcacggaggaggaagactgtgtagcaaagactctaattgatttactcaggaacagtggagttctgctgagggatctaggatttgaaagtactagagtttgcttttatttaccactgagatattttccccttattctgcataaataattttgaaaactttctatattaaatttcaactattccactaaaatgtctggtaatcacatcaagcctttagattattcaaatccttccccagcccccaggaaaacactaagtcatgaaacagaaaaacagaaggtatgataataatagtaataacagttaaatcagtggtctaatccagattttattttttaatacatttcttttggtgttaatatgggttactatgtgatcttatcatttgctagtgattattacttattaggtaagaacaatgtgtaaaatatgtctattactcaaaagaacaattgcaaaatgagtcaacttatcttttataaccaggaagaaatattgggaagnagaattggcgagaaggattaaaagagcgtgtttacag

SEQ ID NO: 378988 - DNA, 5468 bp, Homo sapiens
  misc_feature (5431)..(5431): n is a, c, g, or t
accccctgcttggttgcaccctcagatagtacccatgagcttcactgttcagcctcggggcccaggcgcttcctggaatctctccttggccggggttaaaatgcagttcccgctcaaaatgcttataggttgatagaagtccagatcctgaggaaatctccagctaaatgctcaaaatataaaaactgagctgagatttgcgaagagcagcagcatggatggattttatgaccagcaagtgccttacatggtcaccaatagtcagcgtgggagaaattgtaacgagaaaccaacaaatgtcaggaaaagaaaattcattaacagagatctggctcatgattcagaagaactctttcaagatctaagtcaattacaggaaacatggcttgcagaagtggcttttcatggcctgccactgaaaatcaagaaagaaccccacagtccatgttcagaaatcagctctgcctgcagtcaagaacagccctttaaattcagctatggagaaaagtgcctgtacaatgtcagtgcctatgatcagaagccacaagtgggaatgaggccctccaacccccccacaccatccagcacgccagtgtccccactgcatcatgcatctccaaactcaactcatacaccgaaacctgaccgggccttcccagctcacctccctccatcgcagtccataccagatagcagctaccccatggaccacagatttcgccgccagctttctgaaccctgtaactcctttcctcctttgccgacgatgccaagggaaggacgtcctatgtaccaacgccagatgtctgagccaaacatccccttcccaccacaaggctttaagcaggagtaccacgacccagtgtatgaacacaacaccatggttggcagtgcggccagccaaagctttccccctcctctgatgattaaacaggaacccagagattttgcatatgactcagaagtgcctagctgccactccatttatatgaggcaagaaggcttcctggctcatcccagcagaacagaaggctgtatgtttgaaaagggccccaggcagttttatgatgacacctgtgttgtcccagaaaaattcgatggagacatcaaacaagagccaggaatgtatcgggaaggacccacataccaacggcgaggatcacttcagctctggcagtttttggtagctcttctggatgacccttcaaattctcattttattgcctggactggtcgaggcatggaatttaaactgattgagcctgaagaggtggcccgacgttggggcattcagaaaaacaggccagctatgaactatgataaacttagccgttcactccgctattactatgagaaaggaattatgcaaaaggtggctggagagagatatgtctacaagtttgtgtgtgatccagaagcccttttctccatggcctttccagataatcagcgtccactgctgaagacagacatggaacgtcacatcaacgaggaggacacagtgcctctttctcactttgatgagagcatggcctacatgccggaagggggctgctgcaacccccacccctacaacgaaggctacgtgtattaacacaagtgacagtcaagcagggcgtttttgcgcttttccttttttctgcaagatacagagaattgctgaatctttgttttatttctgttgttggtattttatttttaaataataatacacaaaaaggggcttttcctgttgcattattctatggtctgccatggactgtgcactttatttgagggtgggtgggagtaatctaaacatttattctgtgtaacaggaagctaatgggtgaatgggcagagggatttggggattactttttacttaggcttgggatggggtcctacaagttttgagtatgatgaaactatatcatgtctgtttgatttcataacaacataagataatgtttattttatcggggtatctatggtacagttaatttcacgttgtgtaaatatccacttggagactatttgccttgggcattttcccctgtcatttatgagtctctgcaggtgtacaaaaaaaccccaatctactgtaaatggcagtttaattgttagaaatgactgtttttgcaccacttgtaaaaaggtatttagcgattgcatttgctgtttgttgttttattttgctttatatatgacttgcagaggataaccataaaatgggtaattctctctgaagttgaataatcaccatgactgtaaatgaggggcacaattttggactctggcgccaaactgagtcataggccagtagcattacgtgtatctggtgccaccttgctgtttagatacaaatcataccgtcttttaaatattttgaagcccatttcagttaaataatgacatgtcatggtcctttggaatcttcatttaaatgttaaatctggaatcaaaatgaagcaaaaaatatctgtctccttttcactttcttcagtacataaatacattatttaatcaataagaattaactgtactaaatcatgtattatgctgttctagttacagcaaacactctttaagaaaaatatccaatacactaaataggtactatagtaatttttagacatggtacccattgatatgcatttaaaccttttactgctgtgttatgttgataacatatataaatattagataatgctaatgcttctgctgctgtcttttctgtaatattctctttcatgctgaatttactatgaccatttataagcagtgcagttaactacagatagcatttcaggacaaaatagatgactcaaaccatttattgcttaaaaaatagcttacgccatgctatgctataagcagcttttatgcacattgacaaatgaagagtaagcttcagcttgctaaaggaaactgtggaaccttttgtaacttttggtgatatggaaaattatttacaaaccgtcaaagaatatgaggaagttgctgtatgacatagtgctggcactgatattatccatcatctctttttggacacttctgtaaatgtgattggattgtttgaaagaagatttaaagtttcaaagttttttgttctgtttttgctttgcatttggagaaaatattgaaagcagggtatgttgtttcattcaccttgaaaaaaccatgagtaaatggggatatagaatctctgaatagctcgctaaaagattcaagcaagggacatgaattttgttccatctatcaataatatccagaagaacaacttttttaaagagtctatagcaaaaagcaaaaaaaaaaaaaaattctaaacacaaagtcaaaataaacctattgtaaaagcatttcgtgatgagcatgaaaaagattgtttaaagatgatccccccagctacccattttccaaaactacacagatcacagctcatttctctaagtggagcagttatcaagaaacccaaacaccaaaattgctactcttcacatttaatcctacaaaaagtactccaatttcaaaatatgtatgtaacctgcgatttcaatgattgttgttcatatacatcatgtattattttggcccattttgggcctaaaaaagaaaactatgccttaaaaatcagaaccttttctccccactatgcttatgtggccatctacagcacttagaataaaaacagatgttaaaatattcagtgaaagttttattggaaaaaggaattgagatatataattgagatttggtgaaattgaaggagaaaatttaagtgagtctttaaaatatattctgaatgaaaactgtattgaggattcatttttgttccttttttttctttttctcttttctcctttttcttctttttaatagtctagttttagtcagtcagtgaggaagaattgggccatgctaacgttatcacaagagaacaatggcagaaatggtattagttatataatatttaaggacaaactatatgttttgctgttttaacgtagtgactcactgaactaaatacataattgaccaacattaagtgtatttccaatacagaagggttgaaaatattacattataaactcttttgaaaaatgtatctaaaattttttaagttctgttttgattccactttttggttgagtttttatgtttttgttttcaggtagattaataaatctggcagctgatttctgcaagattcttgtgttttgaatttctcattgaattggctactcaaacatagaaatcatttgttaatgatgtaatgtcttctctcagcttttatcttcactgctgtttgctgtctcttgatgatgacatgttaatacccaatagattaattgcaacaaacacttatactcaaataactaagtaaaaataatttttcttgttatgtccatgaaaagtgcttcagaataaaaatccacaagactgacagtgcagaacatttttctcaaatcatgggcggatcttggaggtctagtttcccgtagatgctgtaaccaattaccacaacttcagtaatttacacaaatttatcttatagttctggaggcagaagttcaaaagaagccttaagagactaaaaccaagatgtccttaggtctggttccttctggaggctccaggggagattcttccagctttcacttctagagtctgctgacattccttggctcctggctacatcacttcaatctctgcttccatggtcacatactcttctactatagtcaaatttccttcctgcctcttataaggatgcttgtgattacatttaggggatgctcagataatccaggacaatctctccatctcaagatccttaacttaatgacgtgtgccaagtccctttggctagataattattcataggtcccagggattaggacatggatgtaaggggtgagggcagggctgttattcagaacaccgcacggaggaggaagactgtgtagcaaagactctaattgatttactcaggaacagtggagttctgctgagggatctaggatttgaaagtactagagtttgcttttatttaccactgagatattttccccttattctgcataaataattttgaaaactttctatattaaatttcaactattccactaaaatgtctggtaatcacatcaagcctttagattattcaaatccttccccagcccccaggaaaacactaagtcatgaaacagaaaaacagaaggtatgataataatagtaataacagttaaatcagtggtctaatccagattttattttttaatacatttcttttggtgttaatatgggttactatgtgatcttatcatttgctagtgattattacttattaggtaagaacaatgtgtaaaatatgtctattactcaaaagaacaattgcaaaatgagtcaacttatcttttataaccaggaagaaatattgggaagnagaattggcgagaaggattaaaagagcgtgtttacag

SEQ ID NO: 378989 - DNA, 2010 bp, Homo sapiens
agcggaagtggcttcagagatgcagccctcagtgcttaacgtcctagttattgtccttgaaacccgagccatctcaccgctcgcccccaaccctgggctctggctgtttaaaagctggagaggaagtgaaagcgtcaagtacatcccgttaggtgcaaagcaagtctcgttgatcgccattgctagttttgcacacgtttgcgaatcagagctgcccggggtacaccgaccgcgcagggaaacatcgagagtgtaaataaatacatcgcctcttgttcggatttttgctactaccgaaaatatgtaaattgtgaactctgttggctctctttggatccaggttgatagaagtccagatcctgaggaaatctccagctaaatgctcaaaatataaaaactgagctgagatttgcgaagagcagcagcatggatggattttatgaccagcaagtgccttacatggtcaccaatagtcagcgtgggagaaattgtaacgagaaaccaacaaatgtcaggaaaagaaaattcattaacagagatctggctcatgattcagaagaactctttcaagatctaagtcaattacaggaaacatggcttgcagaagctcaggtacctgacaatgatgagcagtttgtaccagactatcaggctgaaagtttggcttttcatggcctgccactgaaaatcaagaaagaaccccacagtccatgttcagaaatcagctctgcctgcagtcaagaacagccctttaaattcagctatggagaaaagtgcctgtacaatgtcagtgcctatgatcagaagccacaagtgggaatgaggccctccaacccccccacaccatccagcacgccagtgtccccactgcatcatgcatctccaaactcaactcatacaccgaaacctgaccgggccttcccagctcacctccctccatcgcagtccataccagatagcagctaccccatggaccacagatttcgccgccagctttctgaaccctgtaactcctttcctcctttgccgacgatgccaagggaaggacgtcctatgtaccaacgccagatgtctgagccaaacatccccttcccaccacaaggctttaagcaggagtaccacgacccagtgtatgaacacaacaccatggttggcagtgcggccagccaaagctttccccctcctctgatgattaaacaggaacccagagattttgcatatgactcagaagtgcctagctgccactccatttatatgaggcaagaaggcttcctggctcatcccagcagaacagaaggctgtatgtttgaaaagggccccaggcagttttatgatgacacctgtgttgtcccagaaaaattcgatggagacatcaaacaagagccaggaatgtatcgggaaggacccacataccaacggcgaggatcacttcagctctggcagtttttggtagctcttctggatgacccttcaaattctcattttattgcctggactggtcgaggcatggaatttaaactgattgagcctgaagaggtggcccgacgttggggcattcagaaaaacaggccagctatgaactatgataaacttagccgttcactccgctattactatgagaaaggaattatgcaaaaggtgagcagctaatacagcattaaaattcattgaaatgttgcacattaatctgaacatcatactttaaacgccacatatcattgcattgctgaagcgagtttttcactcattttaacaaatgcttagctcttggttttggtattacaagcctttctatgtataaatgcctagacattgtagacaaatgtgtagtgatattgtatacagaataataggctttctggaaggtcctactttgctgcacatggttaaaaaagattgttttagtattaatagcacatctgtcttcagaagtttttattgcacattgtctacaattatataattttggaatgcttttgtttatagcaataaaagaatctttagaataaa

SEQ ID NO: 378990 - DNA, 648 bp, Homo sapiens
gatatttgaaaaaatattgcaaaatggaaaatgaggcagagaattaatttcagtaacaaaggactgatacaaactgaccagaaggagaaaaaacaaaacaattgagaaataaagctaaataatatgaataaaaaattcacataagaacacatctgggtagccaaaaaatgtatgaataaatgctcaaactcacttatagataggaaatgcaaattaaagtagcaatgaaggccaggcacggtggctcatgcctgtaatcctagcactttggaaggccaaggcgggtggatcacttgaacccagaagttcgagaccagcctgggcaacgtggggaaaccctgtctctaccaaaaatacaaaaatttgcctgacaaaaatgaaaaaaatctgtaatatatattactgccaggctcattcagtactaggggatatgtgaattggtagagcctttttgaaaaccagtcatacagtgtcttttaatattcaaatatatatacccattagccctgtagggccactcttgagaataagaaaaaagcacctaccagtaaggatatatattcaaggatgtttacaagatcattatttctagtgggaaaaaaaaacccaaaacttaaaaaaagaaaaaaactgaaaataaatgttgac

SEQ ID NO: 378991 - DNA, 1250 bp, Homo sapiens
tgaatcgagggggaggggtggtaaccggaaataaagacctccgatcttccgccccacatgcagtctttgtctttttggggggaatggggccccttgtcttctccacacccggggcccctaagcagcagtgtcgggccacgccccctcggtgggaggtcggcctgcgctggtggccgcagatggcctaaggctggcgggcctttgattggccccggctttgcccttgccacgcccctctgcgctgggattggcttagtgctgggattcccacccacccacagcccgccatggcgtctcagctccagaaccgactccgctccgcactggccttggtcacaggtgcggggagcggcatcggccgagcggtcagtgtacgcctggccggagagggggccaccgtagctgcctgcgacctggaccgggcagcggcacaggagacggtgcggctgctgggcgggccagggagcaaggaggggccgccccgagggaaccatgctgccttccaggctgacgtgtctgaggccagggccgccaggtgcctgctggaacaagtgcaggcctgcttttctcgcccaccatctgtcgttgtgtcctgtgcgggcatcacccaggatgagtttctgctgcacatgtctgaggatgactgggacaaagtcatagctgtcaacctcaagggcaccttcctagtcactcaggctgcagcacaagccctggtgtccaatggttgtcgtggttccatcatcaacatcagtagcatcgtaggaaaggtggggaacgtggggcagacaaactatgcagcatccaaggctggagtgattgggctgacccagaccgcagcccgggagcttggacgacatgggatccgctgtaactctgtcctcccagggttcattgcaacacccatgacacagaaagtgccacagaaagtggtggacaagattactgaaatgatcccgatgggacacttgggggaccctgaggatgtggcagatgtggtcgcattcttggcatctgaagatagtggatacatcacagggacctcagtggaagtcactggaggtcttttcatgtaactgcctcaaggaccctggactctgctcacccccccaccactctgcctggcctcctgctgatgaggactctaagttcccaggatacaaaaggggtggcagtgtatggttcaggaatgctgaatatgggaagcaggggtgcttgtgaccctaataaattccaagtcctcttccctgcca

SEQ ID NO: 378992 - DNA, 468 bp, Homo sapiens
atgatttttacagtatagtttgtaaattcctcgtgacatattttcaatgtatttagctttgtcttgtactccacagtggtaatggtaagtcttaacacaggcttttatttcacatccaatagtagcacccaggccctgtccgaattcggcacgagcattactgaaatgatcccgatgggacacttgggggaccctgaggatgtggcagatgtggtcgcattcttggcatctgaagatagtggatacatcacagggacctcagtggaagtcactggaggtcttttcatgtaactgcctcaaggaccctggactctgctcacccccccaccactctgcctggcctcctgctgatgaggactctaagttcccaggatacaaaaggggtggcagtgtatggttcaggaatgctgaatatgggaagcaggggtgcttgtgaccctaataaattccaagtcctcttccctgcca

SEQ ID NO: 378993 - DNA, 388 bp, Homo sapiens
tgaatcgagggggaggggtggtaaccggaaataaagacctccgatcttccgccccacatgcagtctttgtctttttggggggaatggggccccttgtcttctccacacccggggcccctaagcagcagtgtcgggccacgccccctcggtgggaggtcggcctgcgctggtggccgcagatggcctaaggctggcgggcctttgattggccccggctttgcccttgccacgcccctctgcgctgggattggcttagtgctgggattcccacccacccacagcccgccatggcgtctcagctccagaaccgactccgctccgcactggccttggtcacaggttgagggggttctttccccgggcggtttggggtattggagtgaggtca

SEQ ID NO: 378994 - DNA, 1276 bp, Homo sapiens
tgaatcgagggggaggggtggtaaccggaaataaagacctccgatcttccgccccacatgcagtctttgtctttttggggggaatggggccccttgtcttctccacacccggggcccctaagcagcagtgtcgggccacgccccctcggtgggaggtcggcctgcgctggtggccgcagatggcctaaggctggcgggcctttgattggccccggctttgcccttgccacgcccctctgcgctgggattggcttagtgctgggattcccacccacccacagcccgccatggcgtctcagctccagaaccgactccgctccgcactggccttggtcacaggtgcggggagcggcatcggccgagcggtcagtgtacgcctggccggagagggggccaccgtagctgcctgcgacctggaccgggcagcggcacaggagacggtgcggctgctgggcgggccagggagcaaggaggggccgccccgagggaaccatgctgccttccaggctgacgtgtctgaggccagggccgccaggtgcctgctggaacaagtgcaggcctgcttttctcgcccaccatctgtcgttgtgtcctgtgcgggcatcacccaggatgagtttctgctgcacatgtctgaggatgactgggacaaagtcatagctgtcaacctcaagggcaccttcctagtcactcaggctgcagcacaagccctggtgtccaatggttgtcgtggttccatcatcaacatcagtagcatcgtaggaaaggtggggaacgtggggcagacaaactatgcagcatccaaggctggagtgattgggctgacccagaccgcagcccgggagcttggacgacatgggatccgctgtaactctgtcctcccagggttcattgcaacacccatgacacagaaagtgccacagaaagtggtggacaagattactgaaatgatcccgatgggacacttgggggaccctgaggatgtggcagatgtggtcgcattcttggcatctgaagatagtggatacatcacagggacctcagtggaagtcactggaggtcttttcatgtaactgcctcaaggaccctggactctgctcacccccccaccactctgcctggcctcctgctgaaatgatcccgatgggacacttgggggaccctgaggatgtggcagatgtggtcgcattcttggcagtgtatggttcaggaatgctgaatatgggaagcaggggtgcttgtgaccctaataaattccaagtcctcttccctgcca

SEQ ID NO: 378995 - DNA, 938 bp, Homo sapiens
gcggccgctgtgacctctggccccttacccacattttactttctgccctgtgacctctgatccctgccctctcctccccgtgcccggtccggcgtgttctgtcctacctcaggtgcggggagcggcatcggccgagcggtcagtgtacgcctggccggagagggggccaccgtagctgcctgcgacctggaccgggcagcggcacaggagacggtgcggctgctgggcgggccagggagcaaggaggggccgccccgagggaaccatgctgccttccaggctgacgtgtctgaggccagggccgccaggtgcctgctggaacaagtgcaggcctgcttttctcgcccaccatctgtcgttgtgtcctgtgcgggcatcacccaggatgagtttctgctgcacatgtctgaggatgactgggacaaagtcatagctgtcaacctcaagggcaccttcctagtcactcaggctgcagcacaagccctggtgtccaatggttgtcgtggttccatcatcaacatcagtagcatcgtaggaaaggtggggaacgtggggcagacaaactatgcagcatccaaggctggagtgattgggctgacccagaccgcagcccgggagcttggacgattactgaaatgatcccgatgggacacttgggggaccctgaggatgtggcagatgtggtcgcattcttggcatctgaagatagtggatacatcacagggacctcagtggaagtcactggaggtcttttcatgtaactgcctcaaggaccctggactctgctcacccccccaccactctgcctggcctcctgctgatgaggactctaagttcccaggatacaaaaggggtggcagtgtatggttcaggaatgctgaatatgggaagcaggggtgcttgtgaccctaataaattccaagtcctcttccctgcca

SEQ ID NO: 378996 - DNA, 702 bp, Homo sapiens
gcggccgctgtgacctctggccccttacccacattttactttctgccctgtgacctctgatccctgccctctcctccccgtgcccggtccggcgtgttctgtcctacctcaggtgcggggagcggcatcggccgagcggtcagtgtacgcctggccggagagggggccaccgtagctgcctgcgacctggaccgggcagcggcacaggagacggtgcggctgctgggcgggccagggagcaaggaggggccgccccgagggaaccatgctgccttccaggctgacgtgtctgaggccagggccgccaggtgcctgctggaacaagtgcaggcctgcttttctcgcccaccatctgtcgttgtgtcctgtgcgggcatcacccaggatgagtttctgctgcacatgtctgaggatgactgggacaaagtcatagctgtcaacctcaagggcaccttcctagtcactcaggctgcagcacaagccctggtgtccaatggttgtcgtggttccatcatcaacatcagtagcatcgtaggaaaggtcaggttgagttggacgaggtcagccagccaagtggtatagagaggagaacccctccttgagactcctgactcatcctcagacatgtgcagcagaaactcatcctgggtgatgcccgcacaggacacaacgacagatggtgggcgagaaaaccagcttccg

SEQ ID NO: 378997 - DNA, 1023 bp, Homo sapiens
gcggccgctgtgacctctggccccttacccacattttactttctgccctgtgacctctgatccctgccctctcctccccgtgcccggtccggcgtgttctgtcctacctcaggtgcggggagcggcatcggccgagcggtcagtgtacgcctggccggagagggggccaccgtagctgcctgcgacctggaccgggcagcggcacaggagacggtgcggctgctgggcgggccagggagcaaggaggggccgccccgagggaaccatgctgccttccaggctgacgtgtctgaggccagggccgccaggtgcctgctggaacaagtgcaggcctgcttttctcgcccaccatctgtcgttgtgtcctgtgcgggcatcacccaggatgagtttctgctgcacatgtctgaggatgactgggacaaagtcatagctgtcaacctcaagggcaccttcctagtcactcaggctgcagcacaagccctggtgtccaatggttgtcgtggttccatcatcaacatcagtagcatcgtaggaaaggtggggaacgtggggcagacaaactatgcagcatccaaggctggagtgattgggctgacccagaccgcagcccgggagcttggacgacatgggatccgctgtaactctgtcctcccagggttcattgcaacacccatgacacagaaagtgccacagaaagtggtggacaagattactgaaatgatcccgatgggacacttgggggaccctgaggatgtggcagatgtggtcgcattcttggcatctgaagatagtggatacatcacagggacctcagtggaagtcactggaggtcttttcatgtaactgcctcaaggaccctggactctgctcacccccccaccactctgcctggcctcctgctgatgaggactctaagttcccaggatacaaaaggggtggcagtgtatggttcaggaatgctgaatatgggaagcaggggtgcttgtgaccctaataaattccaagtcctcttccctgcca

SEQ ID NO: 378998 - DNA, 1245 bp, Homo sapiens
gcggccgctgtgacctctggccccttacccacattttactttctgccctgtgacctctgatccctgccctctcctccccgtgcccggtccggcgtgttctgtcctacctcaggtgcggggagcggcatcggccgagcggtcagtgtacgcctggccggagagggggccaccgtagctgcctgcgacctggaccgggcagcggcacaggagacggtgcggctgctgggcgggccagggagcaaggaggggccgccccgagggaaccatgctgccttccaggctgacgtgtctgaggccagggccgccaggtgcctgctggaacaagtgcaggcctgcttttctcgcccaccatctgtcgttgtgtcctgtgcgggcatcacccaggatgagtttctgctgcacatgtctgaggatgactgggacaaagtcatagctgtcaacctcaagggcaccttcctagtcactcaggctgcagcacaagccctggtgtccaatggttgtcgtggttccatcatcaacatcagtagcatcgtaggaaaggtggggaacgtggggcagacaaactatgcagcatccaaggctggagtgattgggctgacccagaccgcagcccgggagcttggacgacatgggatccgctgtaactctgtcctcccagggttcattgcaacacccatgacacagaaagtgccacagaaagtggtggacaaggtaggaggctgtgggtggagggcagaatcattcagagactcaatctctctgggcttcacagagagagagagagagagagagagagaatactgggcacagttcctggcaaacattaaatattcaatgaatgtatgagaaatgaagacaaaaaagggtcacagactcagtcttcaaaaaaatccataaaagaagctttcacccacatgagtatttccttacagaattactgaaatgatcccgatgggacacttgggggaccctgaggatgtggcagatgtggtcgcattcttggcatctgaagatagtggatacatcacagggacctcagtggaagtcactggaggtcttttcatgtaactgcctcaaggaccctggactctgctcacccccccaccactctgcctggcctcctgctgatgaggactctaagttcccaggatacaaaaggggtggcagtgtatggttcaggaatgctgaatatgggaagcaggggtgcttgtgaccctaataaattccaagtcctcttccctgcca

SEQ ID NO: 378999 - DNA, 1174 bp, Homo sapiens
cctaagtaactttgagaggacaagataggcaaagttttttccctacatctcttttggccaaaagaatatctgaccatcacagagatccagagaacagaaacaagagcccctaagtcccagcctctgcaatacacagttaccagatgggaatgcagcacagtggcacagagaggtaactacggagcccatgccctggaggaactctgtagctgtgcatcatggaacgccacaggatttttacattagttgaatatgttcctgcatttcagcagtgcataatcgagcaggaggctggaatctggagacctttgttattcattctttttaaggttattttttattaactgtgcatatgaaatttccactcaatttaaaaatccaaatctttttaagcttcttggaagaatttcctcctgcttatattgttaattgcactaatgaactcttctagggtaaattctggcaaactaccctttttttttttttaatcacagaatattcctgttcccacagaactttggcacattctgaagaaaatctctgcagtcaatttttatctcctctgcttgactgcatctaactgttcatctctgttataaatggagcttcagccctctgggtcagagactgacaaccctccttcttcttcctaacctgtcctactctccttctttttctgctttcattttaattttgggaaattttaaagtaaaagtttcaaagttgaaagattatagtgagtacccttatgtcctttagtgcatcagttgttaatgttttgccttgttttcttttcttccttttttttttttaagagaaggggtctctccctattttacccaagctggccttgaaccccttgcctcaagtgagcttcaaccttagcctcctgagtagccaggactatggcatgtaccaccgcacctgcctcacattttctttctcactgtaaatacacattcttattcttgaaccttctgaaaataagttgcagacatcatgaaaatgtaaaatacttcatcatattctttcttttaataagagcattgtcctataaatctgcaatattttcacgcccatgaaactgaacactgatactgcataaatctaatatatgatccatattcaaaattctccagttgtccccaaaatatcctttatagctgtttatttt

SEQ ID NO: 379000 - DNA, 991 bp, Homo sapiens
tcacctcttaacagaagcccaccctccatccctgacaccatgacccactgttgctccccttgctgtcagcctacctgctgcaggaccacctgctggcagcccaccactgtgaccacctgcagcagcacaccctgctgccagccctcctgctgtgtttccagctgctgccagccttgctgccacccaacttgctgtcaaaacacctgctgtaggaccacctgctgccagcccatctgtgtgaccagctgctgccagccttcctgctgtagcacaccctgctgccagcccacatgctgtgggtccagctgtggtcagagcagctcctgtgcacctgtgtactgcagaagaacctgctaccaccccacaagtgtttgtctgcctggttgcctaaaccagagctgtggctccaactgctgccagccctgctgccgcccagcctgctgtgagaccacctgctgcaggaccacttgtttccagcccacctgtgtgtacagctgctgccagccttcttgctgctaatcaactcccaagagaactaccatcctcacacaacaaccttcagctcaactgacttgtcttttgagggactaatttactttgctgctgacagccaccatgctctcacccaaatttttatgaattctctacatgtttaaaatcttgggaatctgcttgagggagggcagaatacttcatcctcattccctctttccttacaccttgtggatcatgtgccagcttcgtctgttcttaatttggagtcatgatctcagctttgtctcaaaaatcaagagcttcattctttgcttctaaggaatttaggtttctgcaactgatcaatcatctttgcaattatattttcattttaaatatccttctcatggttcttgtatccttctttcttcttttcacgataactttgggttatgtctctggtagcagagattcttacctatatgtttctgaataaactctgaaccatcttcatctc

SEQ ID NO: 379001 - DNA, 4950 bp, Homo sapiens
ccaagcctgagtgttaatttaactctatgttgtccgccgtgtaaacatccgaggtcatttgttgcgttgaattatctgaccatccttttttactgtgactcttcccattctctttggcaagaagtccccttctcgcccccaaaccagcaagggactcccccacctgggtctgtgccctgccccgcgctgggggccgagtccttgaatgtggcttcaggggctcctgtcctgacggttgcgtccgggggaggggaaggaagggccgctgtcgccaaggttttctctcccagaaccccgtgggccgccgcgatggccctcaagatggtgaagggcagcatcgaccgcatgttcgacaagaatctgcaggacttggtccgcggcatccgtaaccacaaggaggacgaggcaaaatacatatctcagtgcattgatgagatcaagcaggagctgaagcaggacaacatagcggtgaaggcgaacgcggtctgcaagctgacgtatttacagatgttgggatacgacatcagctgggccgccttcaacatcatagaagtgatgagtgcctccaagttcaccttcaagcgaattggctacctcgctgcttcccagagctttcacgaaggcaccgacgtcatcatgctgaccaccaatcagatccgtaaggacttgagcagccccagccagtacgacacaggtgttgcactgacgggtctgtcctgcttcgtcaccccagaccttgccagagacctggcaaatgacatcatgacactgatgtcacacaccaagccctacatcaggaagaaggctgtgctgatcatgtacaaggtgttcctgaagtaccccgagtcgctgcgccctgcctttccccggctgaaggagaagctggaggaccccgaccccggggttcagtcggctgccgtcaatgtcatctgcgagctggccagacgcaaccctaagaactacctgtccctggccccgctctttttcaagctgatgacgtcctccaccaacaactgggtcctcatcaagatcatcaagctgttcggtgctcttactcctttggaaccgcggctgggcaagaagctgatcgagcccctcaccaatctcatccacagcacgtctgccatgtctctcctctatgaatgtgtgaacaccgtgattgcagtgctcatctcgctgtcctccggcatgcccaaccacagcgccagcatccagctttgtgttcagaaattaaggatattgatcgaggactccgatcagaacttgaagtacctggggctgctggcaatgtccaagatcctgaagacccaccccaagtccgtgcagtcccacaaggacctcatcctgcagtgcctggacgacaaggacgagtccatccggctgcgggccctggacctgctctatgggatggtgtccaagaagaacctgatggagatcgtgaagaagctgatgacccacgtagacaaggcagagggtaccacctaccgtgacgagctgctcaccaagatcattgacatctgcagccagtccaactaccagtacatcaccaacttcgagtggtacatcagcatcctggtggagctgacccggctggagggcacacggcacggccacctcatcgccgcccaaatgctggacgtggccatccgcgtgaaggccatccgcaagttcgccgtgtcccagatgtctgcgctgcttgacagtgcacacctgctggccagcagcacccagcggaacgggatctgtgaggtgctgtacgctgccgcctggatctgcggggagttctcagagcatctgcaggaaccacaccacactttggaggccatgctgcggcccagagtcaccacgctgccaggccacatccaggccgtgtatgtgcagaacgtggtcaagctctacgcctccatcctgcagcagaaggagcaggccggggaggcagagggcgctcaggccgtcacccagctcatggtggaccggctgccccagtttgtgcagagcgcagacctggaggtgcaggagcgggcgtcctgcatcctgcagctggtcaagcacatccagaagcttcaggccaaggacgtgcctgtggcagaggaggtcagcgctctctttgctggggagctgaacccagtggcccccaaggcccagaagaaggttccagtccccgaaggcctggacctggacgcctggatcaatgagccactctcggacagcgagtcagaggacgagaggcccagggccgtcttccacgaggaggagcagcggcgtcccaagcaccggccgtcggaggcggacgaggaagagctggctcggcgccgagaggcccggaagcaggagcaggccaacaaccccttctacatcaagagctcgccatcgccacagaagcggtaccaggacaccccgggcgtggagcacattcccgtggtgcagattgacctctccgtccccttgaaggttccagggctgcctatgtcagatcagtatgtgaagctggaggaggagcggcggcaccggcagaagctggagaaggacaagaggaggaaaaagaggaaggagaaggagaagaagggcaagcgccgccacagctcgctgcccacggagagcgacgaggacatcgcccctgcccagcaggtggacatcgtcacagaggagatgcctgagaatgctctgcccagcgacgaggatgacaaagaccccaacgacccctacagggctctggatattgacctggataagcccttagccgacagcgagaaactgcctattcagaaacacagaaacaccgagacctcaaaatcccctgagaaggacgttcccatggtagaaaagaagagcaagaaacccaagaagaaagagaaaaaacacaaagagaaagagagagacaaggagaagaagaaggagaaggagaagaagaaatctcccaagcctaagaagaagaagcacaggaaggagaaggaggagcggaccaaaggcaagaagaagtccaagaagcagcctccaggcagcgaggaggcagcgggggagccggtgcagaatggcgcgccagaggaggagcagctcccgcctgagtccagctactccctcctcgctgaaaattcctatgttaaaatgacctgtgacatccggggcagtctgcaggaggacagccaggtcactgtggccatcgtgctggagaacaggagcagcagcatcctcaagggcatggagctcagcgtgctggactcactcaatgccaggatggcccggccgcagggctcctccgtccacgatggcgtccccgtgcctttccagctgcccccaggcgtctccaacgaagcccagtatgtgttcaccatccagagcatcgtcatggcgcagaagctcaaggggaccctgtccttcattgccaagaatgacgagggtgcgacccacgagaagctggacttcaggctgcacttcagctgcagctcctacttgatcaccactccctgctacagtgacgcctttgctaagttgctggagtctggggacttgagcatgagctcaatcaaagtcgatggcattcggatgtccttccagaatcttctggcgaagatctgttttcaccaccatttttccgttgtggagcgagtggactcctgcgcctccatgtacagccgctccatccagggccaccatgtctgcctcctggtgaaaaagggtgagaactctgtctcagtcgacgggaagtgcagtgactccacgctactgagcaacttgttagaagagatgaaggcgacgctggccaagtgttgagagctgcctgcgagccccgcaccaccccgcggagcacgtacccagggaccgcagccctgacgtgtctcgcctctcctcagtcgtgtgtactgtacccaagcctgagtgttaatttaactctatgttgtccgccgtgtagacatccgaggtcatttgttgcgttgaattatctgaccatccttttttactgtgactcttcccattctctttggcaagaagtccccttctcgcccccaaaccagcaagggactcccccacctgggtctgtgccctgccccgcgctgggggccgagtccttgaatgtggcttcaggggctcctgtcctgggccagggcctgatgggcaccacgtgaggggcacttggtggacagggcggggctgacgtggcctcctctggggtcgcctgcttttgacccaaaggtcctgacggttgcgtccgggggaggggaaggaagggccgctgtcgccaaggttttctctcccagaacccacagtgggaaagcggtcttgccaggcgttgtccattgtcagtgtgctcgtgggctggtgactgggtcttgggatcccaggccacgcgccagccaggctgtgggcagggcggggccagggacgccaaagagaggttgcagtcagaaccgtggacggggtgggttgaggcctctctgccacccgtcttcctggtcagcagaagtgcatctcggcttgggtttggggtggtccgcatcccctgcttgccactatgcgcaccaaggtttccccacatccttcccagcacccttaggaaggcccaggcagggcctggaagcagcggacctgggctgttctgtgttgaaggagtgtgcccagtgcccttgggcaggacctgtgagagccacctcacaggcagagcccccaccaggcagggcaaggagactccgctcactccccacggccagcgtgggcacaggactgacccttcttcagagataatgacattttatcttctccttttgatgaaaactgtcactttagcatgtaatccattacagaatcccatgcagtgattccaggatttgaaattgtatgatgtgttacataagaatttatttgctatcgacattcccgtataaagagagagacatatcacgctgctgtcatgattttgtgtcaagatgatccaataaagttgtaaaacaggca

SEQ ID NO: 379002 - DNA, 483 bp, Homo sapiens
ggcgcgaattcactagtgattgagccagctcgtgatctccttcttttcagctttgtgttcagaaattaaggatattgatcgaggactccgatcagaactgtgagtcatcccctccccagtgctgtcattttcgtgtccccagctctgtgaagttaggggtcctcctagtgtgaggaggaagtggacacggcatctgcaaccccagctgtctccctgatggatggcactctgcctcagaggcagccctctgccagtgccctgtggcgcccttgcaccccgacctatctgcgtggggtggctgggaaacaccagctcctctgagccccagtcccaggggagatgcagggggcatggcaaaggcccccactggggagatcctggcagttggacagatgccactcactgagcaccttggtccgaaatttctggatatttcagcctctgcatgtttttgcgggggtgcgtgaggctttgcgttgtgag

SEQ ID NO: 379003 - DNA, 604 bp, Homo sapiens
cgccatcttgtccgccatttgcaaggggcccggagcgggatcgcggcacctgccgagcgggtcgccgcctctgccgcggtccttggaccccgccgccgccctggcctgggagcttgccccgccgcagcggccggcagcgcggcgctccgcgggcggcaggcacgggccccgggccccctcacggcgcccagccgcgggcctcccgaggcaaaagcccgtgggccgccgcgatggccctcaagatggtgaagggcagcatcgaccgcatgttcgacaagaatctgcaggacttggtccgcggcatccgtaaccacaaggaggacgaggtccgcgggagagctgtggggcttggtgagtgtttcgtggcctctcgggttggtcagcacccccagccagctggcccaggacccctctacagaagtccaggagagcaggcgtcaccaagatgtccaaccccttcctgaagcaagtcttcaacaaggacaagacattccgccccaagcgcaagtttgagccaggcacccagcgcttcgagctgcacaagaaggcgcaggcgtcgctgaacgccgggctggacctgcggctggccgtgcagttgcccccg

SEQ ID NO: 379004 - DNA, 4747 bp, Homo sapiens
cgccatcttgtccgccatttgcaaggggcccggagcgggatcgcggcacctgccgagcgggtcgccgcctctgccgcggtccttggaccccgccgccgccctggcctgggagcttgccccgccgcagcggccggcagcgcggcgctccgcgggcggcaggcacgggccccgggccccctcacggcgcccagccgcgggcctcccgaggcaaaagcccgtgggccgccgcgatggccctcaagatggtgaagggcagcatcgaccgcatgttcgacaagaatctgcaggacttggtccgcggcatccgtaaccacaaggaggacgaggcaaaatacatatctcagtgcattgatgagatcaagcaggagctgaagcaggacaacatagcggtgaaggcgaacgcggtctgcaagctgacgtatttacagatgttgggatacgacatcagctgggccgccttcaacatcatagaagtgatgagtgcctccaagttcaccttcaagcgaattggctacctcgctgcttcccagagctttcacgaaggcaccgacgtcatcatgctgaccaccaatcagatccgtaaggacttgagcagccccagccagtacgacacaggtgttgcactgacgggtctgtcctgcttcgtcaccccagaccttgccagagacctggcaaatgacatcatgacactgatgtcacacaccaagccctacatcaggaagaaggctgtctgatcgagcccctcaccaatctcatccacagcacgtctgccatgtctctcctctatgaatgtgtgaacaccgtgattgcagtgctcatctcgctgtcctccggcatgcccaaccacagcgccagcatccagctttgtgttcagaaattaaggatattgatcgaggactccgatcagaacttgaagtacctggggctgctggcaatgtccaagatcctgaagacccaccccaagtccgtgcagtcccacaaggacctcatcctgcagtgcctggacgacaaggacgagtccatccggctgcgggccctggacctgctctatgggatggtgtccaagaagaacctgatggagatcgtgaagaagctgatgacccacgtagacaaggcagagggtaccacctaccgtgacgagctgctcaccaagatcattgacatctgcagccagtccaactaccagtacatcaccaacttcgagtggtacatcagcatcctggtggagctgacccggctggagggcacacggcacggccacctcatcgccgcccaaatgctggacgtggccatccgcgtgaaggccatccgcaagttcgccgtgtcccagatgtctgcgctgcttgacagtgcacacctgctggccagcagcacccagcggaacgggatctgtgaggtgctgtacgctgccgcctggatctgcggggagttctcagagcatctgcaggaaccacaccacactttggaggccatgctgcggcccagagtcaccacgctgccaggccacatccaggccgtgtatgtgcagaacgtggtcaagctctacgcctccatcctgcagcagaaggagcaggccggggaggcagagggcgctcaggccgtcacccagctcatggtggaccggctgccccagtttgtgcagagcgcagacctggaggtgcaggagcgggcgtcctgcatcctgcagctggtcaagcacatccagaagcttcaggccaaggacgtgcctgtggcagaggaggtcagcgctctctttgctggggagctgaacccagtggcccccaaggcccagaagaaggttccagtccccgaaggcctggacctggacgcctggatcaatgagccactctcggacagcgagtcagaggacgagaggcccagggccgtcttccacgaggaggagcagcggcgtcccaagcaccggccgtcggaggcggacgaggaagagctggctcggcgccgagaggcccggaagcaggagcaggccaacaaccccttctacatcaagagctcgccatcgccacagaagcggtaccaggacaccccgggcgtggagcacattcccgtggtgcagattgacctctccgtccccttgaaggttccagggctgcctatgtcagatcagtatgtgaagctggaggaggagcggcggcaccggcagaagctggagaaggacaagaggaggaaaaagaggaaggagaaggagaagaagggcaagcgccgccacagctcgctgcccacggagagcgacgaggacatcgcccctgcccagcaggtggacatcgtcacagaggagatgcctgagaatgctctgcccagcgacgaggatgacaaagaccccaacgacccctacagggctctggatattgacctggataagcccttagccgacagcgagaaactgcctattcagaaacacagaaacaccgagacctcaaaatcccctgagaaggacgttcccatggtagaaaagaagagcaagaaacccaagaagaaagagaaaaaacacaaagagaaagagagagacaaggagaagaagaaggagaaggagaagaaggctgaggacctggacttctggctgtctaccaccccaccgcctgcccccgcccccgcccccgcccccgttccatccacggacgagtgtgaggacgccaagacggaggcgcagggcgaggaggacgatgccgaggggcaagaccaggacaagaaatctcccaagcctaagaagaagaagcacaggaaggagaaggaggagcggaccaaaggcaagaagaagtccaagaagcagcctccaggcagcgaggaggcagcgggggagccggtgcagaatggcgcgccagaggaggagcagctcccgcctgagtccagctactccctcctcgctgaaaattcctatgttaaaatgacctgtgacatccggggcagtctgcaggaggacagccaggtcactgtggccatcgtgctggagaacaggagcagcagcatcctcaagggcatggagctcagcgtgctggactcactcaatgccaggatggcccggccgcagggctcctccgtccacgatggcgtccccgtgcctttccagctgcccccaggcgtctccaacgaagcccagtatgtgttcaccatccagagcatcgtcatggcgcagaagctcaaggggaccctgtccttcattgccaagaatgacgagggtgcgacccacgagaagctggacttcaggctgcacttcagctgcagctcctacttgatcaccactccctgctacagtgacgcctttgctaagttgctggagtctggggacttgagcatgagctcaatcaaagtcgatggcattcggatgtccttccagaatcttctggcgaagatctgttttcaccaccatttttccgttgtggagcgagtggactcctgcgcctccatgtacagccgctccatccagggccaccatgtctgcctcctggtgaaaaagggtgagaactctgtctcagtcgacgggaagtgcagtgactccacgctactgagcaacttgttagaagagatgaaggcgacgctggccaagtgttgagagctgcctgcgagccccgcaccaccccgcggagcacgtacccagggaccgcagccctgacgtgtctcgcctctcctcagtcgtgtgtactgtacccaagcctgagtgttaatttaactctatgttgtccgccgtgtagacatccgaggtcatttgttgcgttgaattatctgaccatccttttttactgtgactcttcccattctctttggcaagaagtccccttctcgcccccaaaccagcaagggactcccccacctgggtctgtgccctgccccgcgctgggggccgagtccttgaatgtggcttcaggggctcctgtcctgggccagggcctgatgggcaccacgtgaggggcacttggtggacagggcggggctgacgtggcctcctctggggtcgcctgcttttgacccaaaggtcctgacggttgcgtccgggggaggggaaggaagggccgctgtcgccaaggttttctctcccagaacccacagtgggaaagcggtcttgccaggcgttgtccattgtcagtgtgctcgtgggctggtgactgggtcttgggatcccaggccacgcgccagccaggctgtgggcagggcggggccagggacgccaaagagaggttgcagtcagaaccgtggacggggtgggttgaggcctctctgccacccgtcttcctggtcagcagaagtgcatctcggcttgggtttggggtggtccgcatcccctgcttgccactatgcgcaccaaggtttccccacatccttcccagcacccttaggaaggcccaggcagggcctggaagcagcggacctgggctgttctgtgttgaaggagtgtgcccagtgcccttgggcaggacctgtgagagccacctcacaggcagagcccccaccaggcagggcaaggagactccgctcactccccacggccagcgtgggcacaggactgacccttcttcagagataatgacattttatcttctccttttgatgaaaactgtcactttagcatgtaatccattacagaatcccatgcagtgattccaggatttgaaattgtatgatgtgttacataagaatttatttgctatcgacattcccgtataaagagagagacatatcacgctgctgtcatgattttgtgtcaagatgatccaataaagttgtaaaacaggca

SEQ ID NO: 379005 - DNA, 5100 bp, Homo sapiens
ccaagcctgagtgttaatttaactctatgttgtccgccgtgtaaacatccgaggtcatttgttgcgttgaattatctgaccatccttttttactgtgactcttcccattctctttggcaagaagtccccttctcgcccccaaaccagcaagggactcccccacctgggtctgtgccctgccccgcgctgggggccgagtccttgaatgtggcttcaggggctcctgtcctgacggttgcgtccgggggaggggaaggaagggccgctgtcgccaaggttttctctcccagaaccccgtgggccgccgcgatggccctcaagatggtgaagggcagcatcgaccgcatgttcgacaagaatctgcaggacttggtccgcggcatccgtaaccacaaggaggacgaggcaaaatacatatctcagtgcattgatgagatcaagcaggagctgaagcaggacaacatagcggtgaaggcgaacgcggtctgcaagctgacgtatttacagatgttgggatacgacatcagctgggccgccttcaacatcatagaagtgatgagtgcctccaagttcaccttcaagcgaattggctacctcgctgcttcccagagctttcacgaaggcaccgacgtcatcatgctgaccaccaatcagatccgtaaggacttgagcagccccagccagtacgacacaggtgttgcactgacgggtctgtcctgcttcgtcaccccagaccttgccagagacctggcaaatgacatcatgacactgatgtcacacaccaagccctacatcaggaagaaggctgtgctgatcatgtacaaggtgttcctgaagtaccccgagtcgctgcgccctgcctttccccggctgaaggagaagctggaggaccccgaccccggggttcagtcggctgccgtcaatgtcatctgcgagctggccagacgcaaccctaagaactacctgtccctggccccgctctttttcaagctgatgacgtcctccaccaacaactgggtcctcatcaagatcatcaagctgttcggtgctcttactcctttggaaccgcggctgggcaagaagctgatcgagcccctcaccaatctcatccacagcacgtctgccatgtctctcctctatgaatgtgtgaacaccgtgattgcagtgctcatctcgctgtcctccggcatgcccaaccacagcgccagcatccagctttgtgttcagaaattaaggatattgatcgaggactccgatcagaacttgaagtacctggggctgctggcaatgtccaagatcctgaagacccaccccaagtccgtgcagtcccacaaggacctcatcctgcagtgcctggacgacaaggacgagtccatccggctgcgggccctggacctgctctatgggatggtgtccaagaagaacctgatggagatcgtgaagaagctgatgacccacgtagacaaggcagagggtaccacctaccgtgacgagctgctcaccaagatcattgacatctgcagccagtccaactaccagtacatcaccaacttcgagtggtacatcagcatcctggtggagctgacccggctggagggcacacggcacggccacctcatcgccgcccaaatgctggacgtggccatccgcgtgaaggccatccgcaagttcgccgtgtcccagatgtctgcgctgcttgacagtgcacacctgctggccagcagcacccagcggaacgggatctgtgaggtgctgtacgctgccgcctggatctgcggggagttctcagagcatctgcaggaaccacaccacactttggaggccatgctgcggcccagagtcaccacgctgccaggccacatccaggccgtgtatgtgcagaacgtggtcaagctctacgcctccatcctgcagcagaaggagcaggccggggaggcagagggcgctcaggccgtcacccagctcatggtggaccggctgccccagtttgtgcagagcgcagacctggaggtgcaggagcgggcgtcctgcatcctgcagctggtcaagcacatccagaagcttcaggccaaggacgtgcctgtggcagaggaggtcagcgctctctttgctggggagctgaacccagtggcccccaaggcccagaagaaggttccagtccccgaaggcctggacctggacgcctggatcaatgagccactctcggacagcgagtcagaggacgagaggcccagggccgtcttccacgaggaggagcagcggcgtcccaagcaccggccgtcggaggcggacgaggaagagctggctcggcgccgagaggcccggaagcaggagcaggccaacaaccccttctacatcaagagctcgccatcgccacagaagcggtaccaggacaccccgggcgtggagcacattcccgtggtgcagattgacctctccgtccccttgaaggttccagggctgcctatgtcagatcagtatgtgaagctggaggaggagcggcggcaccggcagaagctggagaaggacaagaggaggaaaaagaggaaggagaaggagaagaagggcaagcgccgccacagctcgctgcccacggagagcgacgaggacatcgcccctgcccagcaggtggacatcgtcacagaggagatgcctgagaatgctctgcccagcgacgaggatgacaaagaccccaacgacccctacagggctctggatattgacctggataagcccttagccgacagcgagaaactgcctattcagaaacacagaaacaccgagacctcaaaatcccctgagaaggacgttcccatggtagaaaagaagagcaagaaacccaagaagaaagagaaaaaacacaaagagaaagagagagacaaggagaagaagaaggagaaggagaagaaggctgaggacctggacttctggctgtctaccaccccaccgcctgcccccgcccccgcccccgcccccgttccatccacggacgagtgtgaggacgccaagacggaggcgcagggcgaggaggacgatgccgaggggcaagaccaggacaagaaatctcccaagcctaagaagaagaagcacaggaaggagaaggaggagcggaccaaaggcaagaagaagtccaagaagcagcctccaggcagcgaggaggcagcgggggagccggtgcagaatggcgcgccagaggaggagcagctcccgcctgagtccagctactccctcctcgctgaaaattcctatgttaaaatgacctgtgacatccggggcagtctgcaggaggacagccaggtcactgtggccatcgtgctggagaacaggagcagcagcatcctcaagggcatggagctcagcgtgctggactcactcaatgccaggatggcccggccgcagggctcctccgtccacgatggcgtccccgtgcctttccagctgcccccaggcgtctccaacgaagcccagtatgtgttcaccatccagagcatcgtcatggcgcagaagctcaaggggaccctgtccttcattgccaagaatgacgagggtgcgacccacgagaagctggacttcaggctgcacttcagctgcagctcctacttgatcaccactccctgctacagtgacgcctttgctaagttgctggagtctggggacttgagcatgagctcaatcaaagtcgatggcattcggatgtccttccagaatcttctggcgaagatctgttttcaccaccatttttccgttgtggagcgagtggactcctgcgcctccatgtacagccgctccatccagggccaccatgtctgcctcctggtgaaaaagggtgagaactctgtctcagtcgacgggaagtgcagtgactccacgctactgagcaacttgttagaagagatgaaggcgacgctggccaagtgttgagagctgcctgcgagccccgcaccaccccgcggagcacgtacccagggaccgcagccctgacgtgtctcgcctctcctcagtcgtgtgtactgtacccaagcctgagtgttaatttaactctatgttgtccgccgtgtagacatccgaggtcatttgttgcgttgaattatctgaccatccttttttactgtgactcttcccattctctttggcaagaagtccccttctcgcccccaaaccagcaagggactcccccacctgggtctgtgccctgccccgcgctgggggccgagtccttgaatgtggcttcaggggctcctgtcctgggccagggcctgatgggcaccacgtgaggggcacttggtggacagggcggggctgacgtggcctcctctggggtcgcctgcttttgacccaaaggtcctgacggttgcgtccgggggaggggaaggaagggccgctgtcgccaaggttttctctcccagaacccacagtgggaaagcggtcttgccaggcgttgtccattgtcagtgtgctcgtgggctggtgactgggtcttgggatcccaggccacgcgccagccaggctgtgggcagggcggggccagggacgccaaagagaggttgcagtcagaaccgtggacggggtgggttgaggcctctctgccacccgtcttcctggtcagcagaagtgcatctcggcttgggtttggggtggtccgcatcccctgcttgccactatgcgcaccaaggtttccccacatccttcccagcacccttaggaaggcccaggcagggcctggaagcagcggacctgggctgttctgtgttgaaggagtgtgcccagtgcccttgggcaggacctgtgagagccacctcacaggcagagcccccaccaggcagggcaaggagactccgctcactccccacggccagcgtgggcacaggactgacccttcttcagagataatgacattttatcttctccttttgatgaaaactgtcactttagcatgtaatccattacagaatcccatgcagtgattccaggatttgaaattgtatgatgtgttacataagaatttatttgctatcgacattcccgtataaagagagagacatatcacgctgctgtcatgattttgtgtcaagatgatccaataaagttgtaaaacaggca

SEQ ID NO: 379006 - DNA, 5136 bp, Homo sapiens
ccaagcctgagtgttaatttaactctatgttgtccgccgtgtaaacatccgaggtcatttgttgcgttgaattatctgaccatccttttttactgtgactcttcccattctctttggcaagaagtccccttctcgcccccaaaccagcaagggactcccccacctgggtctgtgccctgccccgcgctgggggccgagtccttgaatgtggcttcaggggctcctgtcctgacggttgcgtccgggggaggggaaggaagggccgctgtcgccaaggttttctctcccagaaccccgtgggccgccgcgatggccctcaagatggtgaagggcagcatcgaccgcatgttcgacaagaatctgcaggacttggtccgcggcatccgtaaccacaaggaggacgaggcaaaatacatatctcagtgcattgatgagatcaagcaggagctgaagcaggacaacatagcggtgaaggcgaacgcggtctgcaagctgacgtatttacagatgttgggatacgacatcagctgggccgccttcaacatcatagaagtgatgagtgcctccaagttcaccttcaagcgaattggctacctcgctgcttcccagagctttcacgaaggcaccgacgtcatcatgctgaccaccaatcagatccgtaaggacttgagcagccccagccagtacgacacaggtgttgcactgacgggtctgtcctgcttcgtcaccccagaccttgccagagacctggcaaatgacatcatgacactgatgtcacacaccaagccctacatcaggaagaaggctgtgctgatcatgtacaaggtgttcctgaagtaccccgagtcgctgcgccctgcctttccccggctgaaggagaagctggaggaccccgaccccggggttcagtcggctgccgtcaatgtcatctgcgagctggccagacgcaaccctaagaactacctgtccctggccccgctctttttcaagctgatgacgtcctccaccaacaactgggtcctcatcaagatcatcaagctgttcggtgctcttactcctttggaaccgcggctgggcaagaagctgatcgagcccctcaccaatctcatccacagcacgtctgccatgtctctcctctatgaatgtgtgaacaccgtgattgcagtgctcatctcgctgtcctccggcatgcccaaccacagcgccagcatccagctttgtgttcagaaattaaggatattgatcgaggactccgatcagaacttgaagtacctggggctgctggcaatgtccaagatcctgaagacccaccccaagtccgtgcagtcccacaaggacctcatcctgcagtgcctggacgacaaggacgagtccatccggctgcgggccctggacctgctctatgggatggtgtccaagaagaacctgatggagatcgtgaagaagctgatgacccacgtagacaaggcagagggtaccacctaccgtgacgagctgctcaccaagatcattgacatctgcagccagtccaactaccagtacatcaccaacttcgagtggtacatcagcatcctggtggagctgacccggctggagggcacacggcacggccacctcatcgccgcccaaatgctggacgtggccatccgcgtgaaggccatccgcaagttcgccgtgtcccagatgtctgcgctgcttgacagtgcacacctgctggccagcagcacccagcggaacgggatctgtgaggtgctgtacgctgccgcctggatctgcggggagttctcagagcatctgcaggaaccacaccacactttggaggccatgctgcggcccagagtcaccacgctgccaggccacatccaggccgtgtatgtgcagaacgtggtcaagctctacgcctccatcctgcagcagaaggagcaggccggggaggcagagggcgctcaggccgtcacccagctcatggtggaccggctgccccagtttgtgcagagcgcagacctggaggtgcaggagcgggcgtcctgcatcctgcagctggtcaagcacatccagaagcttcaggccaaggacgtgcctgtggcagaggaggtcagcgctctctttgctggggagctgaacccagtggcccccaaggcccagaagaaggttccagtccccgaaggcctggacctggacgcctggatcaatgagccactctcggacagcgagtcagaggacgagaggcccagggccgtcttccacgaggaggagcagcggcgtcccaagcaccggccgtcggaggcggacgaggaagagctggctcggcgccgagaggcccggaagcaggagcaggccaacaaccccttctacatcaagagctcgccatcgccacagaagcggtaccaggacaccccgggcgtggagcacattcccgtggtgcagattgacctctccgtccccttgaaggttccagggctgcctatgtcagatcagtatgtgaagctggaggaggagcggcggcaccggcagaagctggagaaggacaagaggaggaaaaagaggaaggagaaggagaagaagggcaagcgccgccacagctcgctgcccacggagagcgacgaggacatcgcccctgcccagcaggtggacatcgtcacagaggagatgcctgagaatgctctgcccagcgacgaggatgacaaagaccccaacgacccctacagggctctggatattgacctggataagcccttagccgacagcgagaaactgcctattcagaaacacagaaacaccgagacctcaaaatcccctgagaaggacgttcccatggtagaaaagaagagcaagaaacccaagaagaaagagaaaaaacacaaagagaaagagagagacaaggagaagaagaaggagaaggagaagaaggctgaggacctggacttctggctgtctaccaccccaccgcctgcccccgcccccgcccccgcccccgttccatccacgggggagctcagtgtgaacactgtcactaccccgaaggacgagtgtgaggacgccaagacggaggcgcagggcgaggaggacgatgccgaggggcaagaccaggacaagaaatctcccaagcctaagaagaagaagcacaggaaggagaaggaggagcggaccaaaggcaagaagaagtccaagaagcagcctccaggcagcgaggaggcagcgggggagccggtgcagaatggcgcgccagaggaggagcagctcccgcctgagtccagctactccctcctcgctgaaaattcctatgttaaaatgacctgtgacatccggggcagtctgcaggaggacagccaggtcactgtggccatcgtgctggagaacaggagcagcagcatcctcaagggcatggagctcagcgtgctggactcactcaatgccaggatggcccggccgcagggctcctccgtccacgatggcgtccccgtgcctttccagctgcccccaggcgtctccaacgaagcccagtatgtgttcaccatccagagcatcgtcatggcgcagaagctcaaggggaccctgtccttcattgccaagaatgacgagggtgcgacccacgagaagctggacttcaggctgcacttcagctgcagctcctacttgatcaccactccctgctacagtgacgcctttgctaagttgctggagtctggggacttgagcatgagctcaatcaaagtcgatggcattcggatgtccttccagaatcttctggcgaagatctgttttcaccaccatttttccgttgtggagcgagtggactcctgcgcctccatgtacagccgctccatccagggccaccatgtctgcctcctggtgaaaaagggtgagaactctgtctcagtcgacgggaagtgcagtgactccacgctactgagcaacttgttagaagagatgaaggcgacgctggccaagtgttgagagctgcctgcgagccccgcaccaccccgcggagcacgtacccagggaccgcagccctgacgtgtctcgcctctcctcagtcgtgtgtactgtacccaagcctgagtgttaatttaactctatgttgtccgccgtgtagacatccgaggtcatttgttgcgttgaattatctgaccatccttttttactgtgactcttcccattctctttggcaagaagtccccttctcgcccccaaaccagcaagggactcccccacctgggtctgtgccctgccccgcgctgggggccgagtccttgaatgtggcttcaggggctcctgtcctgggccagggcctgatgggcaccacgtgaggggcacttggtggacagggcggggctgacgtggcctcctctggggtcgcctgcttttgacccaaaggtcctgacggttgcgtccgggggaggggaaggaagggccgctgtcgccaaggttttctctcccagaacccacagtgggaaagcggtcttgccaggcgttgtccattgtcagtgtgctcgtgggctggtgactgggtcttgggatcccaggccacgcgccagccaggctgtgggcagggcggggccagggacgccaaagagaggttgcagtcagaaccgtggacggggtgggttgaggcctctctgccacccgtcttcctggtcagcagaagtgcatctcggcttgggtttggggtggtccgcatcccctgcttgccactatgcgcaccaaggtttccccacatccttcccagcacccttaggaaggcccaggcagggcctggaagcagcggacctgggctgttctgtgttgaaggagtgtgcccagtgcccttgggcaggacctgtgagagccacctcacaggcagagcccccaccaggcagggcaaggagactccgctcactccccacggccagcgtgggcacaggactgacccttcttcagagataatgacattttatcttctccttttgatgaaaactgtcactttagcatgtaatccattacagaatcccatgcagtgattccaggatttgaaattgtatgatgtgttacataagaatttatttgctatcgacattcccgtataaagagagagacatatcacgctgctgtcatgattttgtgtcaagatgatccaataaagttgtaaaacaggca

SEQ ID NO: 379007 - DNA, 5150 bp, Homo sapiens
ccaagcctgagtgttaatttaactctatgttgtccgccgtgtaaacatccgaggtcatttgttgcgttgaattatctgaccatccttttttactgtgactcttcccattctctttggcaagaagtccccttctcgcccccaaaccagcaagggactcccccacctgggtctgtgccctgccccgcgctgggggccgagtccttgaatgtggcttcaggggctcctgtcctgacggttgcgtccgggggaggggaaggaagggccgctgtcgccaaggttttctctcccagaaccccgtgggccgccgcgatggccctcaagatggtgaagggcagcatcgaccgcatgttcgacaagaatctgcaggacttggtccgcggcatccgtaaccacaaggaggacgaggcaaaatacatatctcagtgcattgatgagatcaagcaggagctgaagcaggacaacatagcggtgaaggcgaacgcggtctgcaagctgacgtatttacagatgttgggatacgacatcagctgggccgccttcaacatcatagaagtgatgagtgcctccaagttcaccttcaagcgaattggctacctcgctgcttcccagagctttcacgaaggcaccgacgtcatcatgctgaccaccaatcagatccgtaaggacttgagcagccccagccagtacgacacaggtgttgcactgacgggtctgtcctgcttcgtcaccccagaccttgccagagacctggcaaatgacatcatgacactgatgtcacacaccaagccctacatcaggaagaaggctgtgctgatcatgtacaaggtgttcctgaagtaccccgagtcgctgcgccctgcctttccccggctgaaggagaagctggaggaccccgaccccggggttcagtcggctgccgtcaatgtcatctgcgagctggccagacgcaaccctaagaactacctgtccctggccccgctctttttcaagctgatgacgtcctccaccaacaactgggtcctcatcaagatcatcaagctgttcggtgctcttactcctttggaaccgcggctgggcaagaagctgatcgagcccctcaccaatctcatccacagcacgtctgccatgtctctcctctatgaatgtgtgaacaccgtgattgcagtgctcatctcgctgtcctccggcatgcccaaccacagcgccagcatccagctttgtgttcagaaattaaggatattgatcgaggactccgatcagaacttgaagtacctggggctgctggcaatgtccaagatcctgaagacccaccccaagtccgtgcagtcccacaaggacctcatcctgcagtgcctggacgacaaggacgagtccatccggctgcgggccctggacctgctctatgggatggtgtccaagaagaacctgatggagatcgtgaagaagctgatgacccacgtagacaaggcagagggtaccacctaccgtgacgagctgctcaccaagatcattgacatctgcagccagtccaactaccagtacatcaccaacttcgagtggtacatcagcatcctggtggagctgacccggctggagggcacacggcacggccacctcatcgccgcccaaatgctggacgtggccatccgcgtgaaggccatccgcaagttcgccgtgtcccagatgtctgcgctgcttgacagtgcacacctgctggccagcagcacccagcggaacgggatctgtgaggtgctgtacgctgccgcctggatctgcggggagttctcagagcatctgcaggaaccacaccacactttggaggccatgctgcggcccagagtcaccacgctgccaggccacatccaggccgtgtatgtgcagaacgtggtcaagctctacgcctccatcctgcagcagaaggagcaggccggggaggcagagggcgctcaggccgtcacccagctcatggtggaccggctgccccagtttgtgcagagcgcagacctggaggtgcaggagcgggcgtcctgcatcctgcagctggtcaagcacatccagaagcttcaggccaaggacgtgcctgtggcagaggaggtcagcgctctctttgctggggagctgaacccagtggcccccaaggcccagaagaaggttccagtccccgaagggcgcgtgctcggtcacacactgccttgtgtggccctcctgtccggtgcagcctggacctggacgcctggatcaatgagccactctcggacagcgagtcagaggacgagaggcccagggccgtcttccacgaggaggagcagcggcgtcccaagcaccggccgtcggaggcggacgaggaagagctggctcggcgccgagaggcccggaagcaggagcaggccaacaaccccttctacatcaagagctcgccatcgccacagaagcggtaccaggacaccccgggcgtggagcacattcccgtggtgcagattgacctctccgtccccttgaaggttccagggctgcctatgtcagatcagtatgtgaagctggaggaggagcggcggcaccggcagaagctggagaaggacaagaggaggaaaaagaggaaggagaaggagaagaagggcaagcgccgccacagctcgctgcccacggagagcgacgaggacatcgcccctgcccagcaggtggacatcgtcacagaggagatgcctgagaatgctctgcccagcgacgaggatgacaaagaccccaacgacccctacagggctctggatattgacctggataagcccttagccgacagcgagaaactgcctattcagaaacacagaaacaccgagacctcaaaatcccctgagaaggacgttcccatggtagaaaagaagagcaagaaacccaagaagaaagagaaaaaacacaaagagaaagagagagacaaggagaagaagaaggagaaggagaagaaggctgaggacctggacttctggctgtctaccaccccaccgcctgcccccgcccccgcccccgcccccgttccatccacggacgagtgtgaggacgccaagacggaggcgcagggcgaggaggacgatgccgaggggcaagaccaggacaagaaatctcccaagcctaagaagaagaagcacaggaaggagaaggaggagcggaccaaaggcaagaagaagtccaagaagcagcctccaggcagcgaggaggcagcgggggagccggtgcagaatggcgcgccagaggaggagcagctcccgcctgagtccagctactccctcctcgctgaaaattcctatgttaaaatgacctgtgacatccggggcagtctgcaggaggacagccaggtcactgtggccatcgtgctggagaacaggagcagcagcatcctcaagggcatggagctcagcgtgctggactcactcaatgccaggatggcccggccgcagggctcctccgtccacgatggcgtccccgtgcctttccagctgcccccaggcgtctccaacgaagcccagtatgtgttcaccatccagagcatcgtcatggcgcagaagctcaaggggaccctgtccttcattgccaagaatgacgagggtgcgacccacgagaagctggacttcaggctgcacttcagctgcagctcctacttgatcaccactccctgctacagtgacgcctttgctaagttgctggagtctggggacttgagcatgagctcaatcaaagtcgatggcattcggatgtccttccagaatcttctggcgaagatctgttttcaccaccatttttccgttgtggagcgagtggactcctgcgcctccatgtacagccgctccatccagggccaccatgtctgcctcctggtgaaaaagggtgagaactctgtctcagtcgacgggaagtgcagtgactccacgctactgagcaacttgttagaagagatgaaggcgacgctggccaagtgttgagagctgcctgcgagccccgcaccaccccgcggagcacgtacccagggaccgcagccctgacgtgtctcgcctctcctcagtcgtgtgtactgtacccaagcctgagtgttaatttaactctatgttgtccgccgtgtagacatccgaggtcatttgttgcgttgaattatctgaccatccttttttactgtgactcttcccattctctttggcaagaagtccccttctcgcccccaaaccagcaagggactcccccacctgggtctgtgccctgccccgcgctgggggccgagtccttgaatgtggcttcaggggctcctgtcctgggccagggcctgatgggcaccacgtgaggggcacttggtggacagggcggggctgacgtggcctcctctggggtcgcctgcttttgacccaaaggtcctgacggttgcgtccgggggaggggaaggaagggccgctgtcgccaaggttttctctcccagaacccacagtgggaaagcggtcttgccaggcgttgtccattgtcagtgtgctcgtgggctggtgactgggtcttgggatcccaggccacgcgccagccaggctgtgggcagggcggggccagggacgccaaagagaggttgcagtcagaaccgtggacggggtgggttgaggcctctctgccacccgtcttcctggtcagcagaagtgcatctcggcttgggtttggggtggtccgcatcccctgcttgccactatgcgcaccaaggtttccccacatccttcccagcacccttaggaaggcccaggcagggcctggaagcagcggacctgggctgttctgtgttgaaggagtgtgcccagtgcccttgggcaggacctgtgagagccacctcacaggcagagcccccaccaggcagggcaaggagactccgctcactccccacggccagcgtgggcacaggactgacccttcttcagagataatgacattttatcttctccttttgatgaaaactgtcactttagcatgtaatccattacagaatcccatgcagtgattccaggatttgaaattgtatgatgtgttacataagaatttatttgctatcgacattcccgtataaagagagagacatatcacgctgctgtcatgattttgtgtcaagatgatccaataaagttgtaaaacaggca

SEQ ID NO: 379008 - DNA, 5050 bp, Homo sapiens
ccaagcctgagtgttaatttaactctatgttgtccgccgtgtaaacatccgaggtcatttgttgcgttgaattatctgaccatccttttttactgtgactcttcccattctctttggcaagaagtccccttctcgcccccaaaccagcaagggactcccccacctgggtctgtgccctgccccgcgctgggggccgagtccttgaatgtggcttcaggggctcctgtcctgacggttgcgtccgggggaggggaaggaagggccgctgtcgccaaggttttctctcccagaaccccgtgggccgccgcgatggccctcaagatggtgaagggcagcatcgaccgcatgttcgacaagaatctgcaggacttggtccgcggcatccgtaaccacaaggaggacgaggcaaaatacatatctcagtgcattgatgagatcaagcaggagctgaagcaggacaacatagcggtgaaggcgaacgcggtctgcaagctgacgtatttacagatgttgggatacgacatcagctgggccgccttcaacatcatagaagtgatgagtgcctccaagttcaccttcaagcgaattggctacctcgctgcttcccagagctttcacgaaggcaccgacgtcatcatgctgaccaccaatcagatccgtaaggacttgagcagccccagccagtacgacacaggtgttgcactgacgggtctgtcctgcttcgtcaccccagaccttgccagagacctggcaaatgacatcatgacactgatgtcacacaccaagccctacatcaggaagaaggctgtgctgatcatgtacaaggtgttcctgaagtaccccgagtcgctgcgccctgcctttccccggctgaaggagaagctggaggaccccgaccccggggttcagtcggctgccgtcaatgtcatctgcgagctggccagacgcaaccctaagaactacctgtccctggccccgctctttttcaagctgatgacgtcctccaccaacaactgggtcctcatcaagatcatcaagctgttcggtgctcttactcctttggaaccgcggctgggcaagaagctgatcgagcccctcaccaatctcatccacagtgctcatctcgctgtcctccggcatgcccaaccacagcgccagcatccagctttgtgttcagaaattaaggatattgatcgaggactccgatcagaacttgaagtacctggggctgctggcaatgtccaagatcctgaagacccaccccaagtccgtgcagtcccacaaggacctcatcctgcagtgcctggacgacaaggacgagtccatccggctgcgggccctggacctgctctatgggatggtgtccaagaagaacctgatggagatcgtgaagaagctgatgacccacgtagacaaggcagagggtaccacctaccgtgacgagctgctcaccaagatcattgacatctgcagccagtccaactaccagtacatcaccaacttcgagtggtacatcagcatcctggtggagctgacccggctggagggcacacggcacggccacctcatcgccgcccaaatgctggacgtggccatccgcgtgaaggccatccgcaagttcgccgtgtcccagatgtctgcgctgcttgacagtgcacacctgctggccagcagcacccagcggaacgggatctgtgaggtgctgtacgctgccgcctggatctgcggggagttctcagagcatctgcaggaaccacaccacactttggaggccatgctgcggcccagagtcaccacgctgccaggccacatccaggccgtgtatgtgcagaacgtggtcaagctctacgcctccatcctgcagcagaaggagcaggccggggaggcagagggcgctcaggccgtcacccagctcatggtggaccggctgccccagtttgtgcagagcgcagacctggaggtgcaggagcgggcgtcctgcatcctgcagctggtcaagcacatccagaagcttcaggccaaggacgtgcctgtggcagaggaggtcagcgctctctttgctggggagctgaacccagtggcccccaaggcccagaagaaggttccagtccccgaaggcctggacctggacgcctggatcaatgagccactctcggacagcgagtcagaggacgagaggcccagggccgtcttccacgaggaggagcagcggcgtcccaagcaccggccgtcggaggcggacgaggaagagctggctcggcgccgagaggcccggaagcaggagcaggccaacaaccccttctacatcaagagctcgccatcgccacagaagcggtaccaggacaccccgggcgtggagcacattcccgtggtgcagattgacctctccgtccccttgaaggttccagggctgcctatgtcagatcagtatgtgaagctggaggaggagcggcggcaccggcagaagctggagaaggacaagaggaggaaaaagaggaaggagaaggagaagaagggcaagcgccgccacagctcgctgcccacggagagcgacgaggacatcgcccctgcccagcaggtggacatcgtcacagaggagatgcctgagaatgctctgcccagcgacgaggatgacaaagaccccaacgacccctacagggctctggatattgacctggataagcccttagccgacagcgagaaactgcctattcagaaacacagaaacaccgagacctcaaaatcccctgagaaggacgttcccatggtagaaaagaagagcaagaaacccaagaagaaagagaaaaaacacaaagagaaagagagagacaaggagaagaagaaggagaaggagaagaaggctgaggacctggacttctggctgtctaccaccccaccgcctgcccccgcccccgcccccgcccccgttccatccacggacgagtgtgaggacgccaagacggaggcgcagggcgaggaggacgatgccgaggggcaagaccaggacaagaaatctcccaagcctaagaagaagaagcacaggaaggagaaggaggagcggaccaaaggcaagaagaagtccaagaagcagcctccaggcagcgaggaggcagcgggggagccggtgcagaatggcgcgccagaggaggagcagctcccgcctgagtccagctactccctcctcgctgaaaattcctatgttaaaatgacctgtgacatccggggcagtctgcaggaggacagccaggtcactgtggccatcgtgctggagaacaggagcagcagcatcctcaagggcatggagctcagcgtgctggactcactcaatgccaggatggcccggccgcagggctcctccgtccacgatggcgtccccgtgcctttccagctgcccccaggcgtctccaacgaagcccagtatgtgttcaccatccagagcatcgtcatggcgcagaagctcaaggggaccctgtccttcattgccaagaatgacgagggtgcgacccacgagaagctggacttcaggctgcacttcagctgcagctcctacttgatcaccactccctgctacagtgacgcctttgctaagttgctggagtctggggacttgagcatgagctcaatcaaagtcgatggcattcggatgtccttccagaatcttctggcgaagatctgttttcaccaccatttttccgttgtggagcgagtggactcctgcgcctccatgtacagccgctccatccagggccaccatgtctgcctcctggtgaaaaagggtgagaactctgtctcagtcgacgggaagtgcagtgactccacgctactgagcaacttgttagaagagatgaaggcgacgctggccaagtgttgagagctgcctgcgagccccgcaccaccccgcggagcacgtacccagggaccgcagccctgacgtgtctcgcctctcctcagtcgtgtgtactgtacccaagcctgagtgttaatttaactctatgttgtccgccgtgtagacatccgaggtcatttgttgcgttgaattatctgaccatccttttttactgtgactcttcccattctctttggcaagaagtccccttctcgcccccaaaccagcaagggactcccccacctgggtctgtgccctgccccgcgctgggggccgagtccttgaatgtggcttcaggggctcctgtcctgggccagggcctgatgggcaccacgtgaggggcacttggtggacagggcggggctgacgtggcctcctctggggtcgcctgcttttgacccaaaggtcctgacggttgcgtccgggggaggggaaggaagggccgctgtcgccaaggttttctctcccagaacccacagtgggaaagcggtcttgccaggcgttgtccattgtcagtgtgctcgtgggctggtgactgggtcttgggatcccaggccacgcgccagccaggctgtgggcagggcggggccagggacgccaaagagaggttgcagtcagaaccgtggacggggtgggttgaggcctctctgccacccgtcttcctggtcagcagaagtgcatctcggcttgggtttggggtggtccgcatcccctgcttgccactatgcgcaccaaggtttccccacatccttcccagcacccttaggaaggcccaggcagggcctggaagcagcggacctgggctgttctgtgttgaaggagtgtgcccagtgcccttgggcaggacctgtgagagccacctcacaggcagagcccccaccaggcagggcaaggagactccgctcactccccacggccagcgtgggcacaggactgacccttcttcagagataatgacattttatcttctccttttgatgaaaactgtcactttagcatgtaatccattacagaatcccatgcagtgattccaggatttgaaattgtatgatgtgttacataagaatttatttgctatcgacattcccgtataaagagagagacatatcacgctgctgtcatgattttgtgtcaagatgatccaataaagttgtaaaacaggca

SEQ ID NO: 379009 - DNA, 5055 bp, Homo sapiens
ccaagcctgagtgttaatttaactctatgttgtccgccgtgtaaacatccgaggtcatttgttgcgttgaattatctgaccatccttttttactgtgactcttcccattctctttggcaagaagtccccttctcgcccccaaaccagcaagggactcccccacctgggtctgtgccctgccccgcgctgggggccgagtccttgaatgtggcttcaggggctcctgtcctgacggttgcgtccgggggaggggaaggaagggccgctgtcgccaaggttttctctcccagaaccccgtgggccgccgcgatggccctcaagatggtgaagggcagcatcgaccgcatgttcgacaagaatctgcaggacttggtccgcggcatccgtaaccacaaggaggacgaggcaaaatacatatctcagtgcattgatgagatcaagcaggagctgaagcaggacaacatagcggtgaaggcgaacgcggtctgcaagctgacgtatttacagatgttgggatacgacatcagctgggccgccttcaacatcatagaagtgatgagtgcctccaagttcaccttcaagcgaattggctacctcgctgcttcccagagctttcacgaaggcaccgacgtcatcatgctgaccaccaatcagatccgtaaggacttgagcagccccagccagtacgacacaggtgttgcactgacgggtctgtcctgcttcgtcaccccagaccttgccagagacctggcaaatgacatcatgacactgatgtcacacaccaagccctacatcaggaagaaggctgtgctgatcatgtacaaggtgttcctgaagtaccccgagtcgctgcgccctgcctttccccggctgaaggagaagctggaggaccccgaccccggggttcagtcggctgccgtcaatgtcatctgcgagctggccagacgcaaccctaagaactacctgtccctggccccgctctttttcaagctgatgacgtcctccaccaacaactgggtcctcatcaagatcatcaagctgttcggtgctcttactcctttggaaccgcggctgggcaagaagctgatcgagcccctcaccaatctcatccacagcacgtctgccatgtctctcctctatgaatgtgtgaacaccgtgattgcagtgctcatctcgctgtcctccggcatgcccaaccacagcgccagcatccagctttgtgttcagaaattaaggatattgatcgaggactccgatcagaacttgaagtacctggggctgctggcaatgtccaagatcctgaagacccaccccaagtccgtgcagtcccacaaggacctcatcctgcagtgcctggacgacaaggacgagtccatccggctgcgggccctggacctgctctatgggatggtgtccaagaagaacctgatggagatcgtgaagaagctgatgacccacgtagacaaggcagagggtaccacctaccgtgacgagctgctcaccaagatcattgacatctgcagccagtccaactaccagtacatcaccaacttcgagtggtacatcagcatcctggtggagctgacccggctggagggcacacggcacggccacctcatcgccgcccaaatgctggacgtggccatccgcgtgaaggccatccgcaagttcgccgtgtcccagatgtctgcgctgcttgacagtgcacacctgctggccagcagcacccagcggaacgggatctgtgaggtgctgtacgctgccgcctggatctgcggggagttctcagagcatctgcaggaaccacaccacactttggaggccatgctgcggcccagagtcaccacgctgccaggccacatccaggccgtgtatgtgcagaacgtggtcaagctctacgcctccatcctgcagcagaaggagcaggccggggaggcagagggcgctcaggccgtcacccagctcatggtggaccggctgccccagtttgtgcagagcgcagacctggaggtgcaggagcgggcgtcctgcatcctgcagctggtcaagcacatccagaagcttcaggccaaggacgtgcctgtggcagaggaggtcagcgctctctttgctggggagctgaacccagtggcccccaaggcccagaagaaggttccagtccccgaaggcctggacctggacgcctggatcaatgagccactctcggacagcgagtcagaggacgagaggcccagggccgtcttccacgaggaggagcagcggcgtcccaagcaccggccgtcggaggcggacgaggaagagctggctcggcgccgagaggcccggaagcaggagcaggccaacaaccccttctacatcaagagctcgccatcgccacagaagcggtaccaggacaccccgggcgtggagcacattcccgtggtgcagattgacctctccgtccccttgaaggttccagggctgcctatgtcagatcagtatgtgaagctggaggaggagcggcggcaccggcagaagctggagaaggacaagaggaggaaaaagaggaaggagaaggagaagaagggcaagcgccgccacagctcgctgcccacggagagcgacgaggacatcgcccctgcccagcaggtggacatcgtcacagaggagatgcctgagaatgctctgcccagcgacgaggatgacaaagaccccaacgacccctacagggctctggatattgacctggataagcccttagccgacagcgagaaactgcctattcagaaacacagaaacaccgagacctcaaaatcccctgagaaggacgttcccatggtagaaaagaagagcaagaaacccaagaagaaagagaaaaaacacaaagagaaagagagagacaaggagaagaagaaggagaaggagaagaaggctgaggacctggacttctggctgtctaccaccccaccgcctgcccccgcccccgcccccgcccccgttccatccacggacgagtgtgaggacgccaagacggaggcgcagggcgaggaggacgatgccgaggggcaagaccaggacaagaaatctcccaagcctaagaagaagaagcacaggaaggagaaggaggagcggaccaaaggcaagaagaagtccaagaagcagcctccaggcagcgaggaggcagcgggggagccggtgcagaatggcgcgccagaggaggagcagctcccgcctgagtccagctactccctcctcgctgaaaattcctatgttaaaatgacctgtgacatccggggcagtctgcaggaggacagccaggtcactgtggccatcgtgctggagaacaggagcagcagcatcctcaagggcatggagctcagcgtgctggactcactcaatgccaggatggcccggccgcagggctcctccgtccacgatggcgtccccgtgcctttccagctgcccccaggcgtctccaacgaagcccagtatgtgttcaccatccagagcatcgtcatggcgcagaagctcaaggggaccctgtccttcattgccaagaatgacgagggtgcgacccacgagaagctggacttcaggctgcacttcagctgcagctcctacttgatcaccactccctgctacagtgacgcctttgctaagttgctggagtctggggacttgagcatgagctcaatcaaagtcgatggcattcggatgtccttccagaatcttctggcgaagatctgttttcaccaccatttttccgttgtggagcgagtggactcctgcgcctccatgtacagccgctccatccagggccaccatgtctgcctcctggtgaaaaagggtgagaactctgtctcagtcgacgggaagtgcagtgactccacgctactgagcaacttgttagaagagatgaaggcgacgctggccaagtgttgagagctgcctgcgagccccgcaccaccccgcggagcacgtacccagggaccgcagccctgacgtgtctcgcctctcctcagtcgtgtgtactgtacccaagcctgagtgttaatttaactctatgttgtccgccgtgtagacatccgaggtcatttgttgcgttgaattatctgaccatccttttttactgtgactcttcccattctctttggcaagaagtccccttctcgcccccaaaccagcaagggactcccccacctgggtctgtgccctgccccgcgctgggggccgagtccttgaatgtggcttcaggggctcctgtcctgggccagggcctgatgggcaccacgtgaggggcacttggtggacagggcggggctgacgtggcctcctctggggtcgcctgcttttgacccaaaggtcctgacggttgcgtccgggggaggggaaggaagggccgctgtcgccaaggttttctctcccagaacccacagtgggaaagcggtcttgccaggcgttgtccattgtcagtgtgctcgtgggctggtgactgggtcttgggatcccaggccacgcgccagccaggctgtgggcagggcggggccagggacgccaaagagaggttgcagtcagaaccgtggacggggtgggttgaggcctctctgccacccgtcttcctggtcagcagaagtgcatctcggcttgggtttggggtggtccgcatcccctgcttgccactatgcgcaccaaggtttccccacatccttcccagcacccttaggaaggcccaggcagggcctggaagcagcggacctgggctgttctgtgttgaaggagtgtgcccagtgcccttgggcaggacctgtgagagccacctcacaggcagagcccccaccaggcagggcaaggagactccgctcactccccacggccagcgtgggcacaggactgacccttcttcagagataatgacattttatcttctccttttgatgaaaactgtcactttagcatgtaatccattacagaatcccatgcagtgattccaggatttgaaattgtatgatgtgttacataagaatttatttgctatcgacattcccgtataaagagagagacatatcacgctgctgt

SEQ ID NO: 379010 - DNA, 4289 bp, Homo sapiens
ccaagcctgagtgttaatttaactctatgttgtccgccgtgtaaacatccgaggtcatttgttgcgttgaattatctgaccatccttttttactgtgactcttcccattctctttggcaagaagtccccttctcgcccccaaaccagcaagggactcccccacctgggtctgtgccctgccccgcgctgggggccgagtccttgaatgtggcttcaggggctcctgtcctgacggttgcgtccgggggaggggaaggaagggccgctgtcgccaaggttttctctcccagaaccccgtgggccgccgcgatggccctcaagatggtgaagggcagcatcgaccgcatgttcgacaagaatctgcaggacttggtccgcggcatccgtaaccacaaggaggacgaggcaaaatacatatctcagtgcattgatgagatcaagcaggagctgaagcaggacaacatagcggtgaaggcgaacgcggtctgcaagctgacgtatttacagatgttgggatacgacatcagctgggccgccttcaacatcatagaagtgatgagtgcctccaagttcaccttcaagcgaattggctacctcgctgcttcccagagctttcacgaaggcaccgacgtcatcatgctgaccaccaatcagatccgtaaggacttgagcagccccagccagtacgacacaggtgttgcactgacgggtctgtcctgcttcgtcaccccagaccttgccagagacctggcaaatgacatcatgacactgatgtcacacaccaagccctacatcaggaagaaggctgtgctgatcatgtacaaggtgttcctgaagtaccccgagtcgctgcgccctgcctttccccggctgaaggagaagctggaggaccccgaccccggggttcagtcggctgccgtcaatgtcatctgcgagctggccagacgcaaccctaagaactacctgtccctggccccgctctttttcaagctgatgacgtcctccaccaacaactgggtcctcatcaagatcatcaagctgttcggtgctcttactcctttggaaccgcggctgggcaagaagctgatcgagcccctcaccaatctcatccacagcacgtctgccatgtctctcctctatgaatgtgtgaacaccgtgattgcagtgctcatctcgctgtcctccggcatgcccaaccacagcgccagcatccagctttgtgttcagaaattaaggatattgatcgaggactccgatcagaacttgaagtacctggggctgctggcaatgtccaagatcctgaagacccaccccaagtccgtgcagtcccacaaggacctcatcctgcagtgcctggacgacaaggacgagtccatccggctgcgggccctggacctgctctatgggatggtgtccaagaagaacctgatggagatcgtgaagaagctgatgacccacgtagacaaggcagagggtaccacctaccgtgacgagctgctcaccaagatcattgacatctgcagccagtccaactaccagtacatcaccaacttcgagtggtacatcagcatcctggtggagctgacccggctggagggcacacggcacggccacctcatcgccgcccaaatgctggacgtggccatccgcgtgaaggccatccgcaagttcgccgtgtcccagatgtctgcgctgcttgacagtgcacacctgctggccagcagcacccagcggaacgggatctgtgaggtgctgtacgctgccgcctggatctgcggggagttctcagagcatctgcaggaaccacaccacactttggaggccatgctgcggcccagagtcaccacgctgccaggccacatccaggccgtgtatgtgcagaacgtggtcaagctctacgcctccatcctgcagcagaaggagcaggccggggaggcagagggcgctcaggccgtcacccagctcatggtggaccggctgccccagtttgtgcagagcgcagacctggaggtgcaggagcgggcgtcctgcatcctgcagctggtcaagcacatccagaagcttcaggccaaggacgtgcctgtggcagaggaggtcagcgctctctttgctggggagctgaacccagtggcccccaaggcccagaagaaggttccagtccccgaaggcctggacctggacgcctggatcaatgagccactctcggacagcgagtcagaggacgagaggcccagggccgtcttccacgaggaggagcagcggcgtcccaagcaccggccgtcggaggcggacgaggaagagctggctcggcgccgagaggcccggaagcaggagcaggccaacaaccccttctacatcaagagctcgccatcgccacagaagcggtaccaggacaccccgggcgtggagcacattcccgtggtgcagattgacctctccgtccccttgaaggttccagggctgcctatgtcagatcagtatgtgaagctggaggaggagcggcggcaccggcagaagctggagaaggacaagaggaggaaaaagaggaaggagaaggagaagaagggcaagcgccgccacagctcgctgcccacggagagcgacgaggacatcgcccctgcccagcaggtggacatcgcgtctccaacgaagcccagtatgtgttcaccatccagagcatcgtcatggcgcagaagctcaaggggaccctgtccttcattgccaagaatgacgagggtgcgacccacgagaagctggacttcaggctgcacttcagctgcagctcctacttgatcaccactccctgctacagtgacgcctttgctaagttgctggagtctggggacttgagcatgagctcaatcaaagtcgatggcattcggatgtccttccagaatcttctggcgaagatctgttttcaccaccatttttccgttgtggagcgagtggactcctgcgcctccatgtacagccgctccatccagggccaccatgtctgcctcctggtgaaaaagggtgagaactctgtctcagtcgacgggaagtgcagtgactccacgctactgagcaacttgttagaagagatgaaggcgacgctggccaagtgttgagagctgcctgcgagccccgcaccaccccgcggagcacgtacccagggaccgcagccctgacgtgtctcgcctctcctcagtcgtgtgtactgtacccaagcctgagtgttaatttaactctatgttgtccgccgtgtagacatccgaggtcatttgttgcgttgaattatctgaccatccttttttactgtgactcttcccattctctttggcaagaagtccccttctcgcccccaaaccagcaagggactcccccacctgggtctgtgccctgccccgcgctgggggccgagtccttgaatgtggcttcaggggctcctgtcctgggccagggcctgatgggcaccacgtgaggggcacttggtggacagggcggggctgacgtggcctcctctggggtcgcctgcttttgacccaaaggtcctgacggttgcgtccgggggaggggaaggaagggccgctgtcgccaaggttttctctcccagaacccacagtgggaaagcggtcttgccaggcgttgtccattgtcagtgtgctcgtgggctggtgactgggtcttgggatcccaggccacgcgccagccaggctgtgggcagggcggggccagggacgccaaagagaggttgcagtcagaaccgtggacggggtgggttgaggcctctctgccacccgtcttcctggtcagcagaagtgcatctcggcttgggtttggggtggtccgcatcccctgcttgccactatgcgcaccaaggtttccccacatccttcccagcacccttaggaaggcccaggcagggcctggaagcagcggacctgggctgttctgtgttgaaggagtgtgcccagtgcccttgggcaggacctgtgagagccacctcacaggcagagcccccaccaggcagggcaaggagactccgctcactccccacggccagcgtgggcacaggactgacccttcttcagagataatgacattttatcttctccttttgatgaaaactgtcactttagcatgtaatccattacagaatcccatgcagtgattccaggatttgaaattgtatgatgtgttacataagaatttatttgctatcgacattcccgtataaagagagagacatatcacgctgctgtcatgattttgtgtcaagatgatccaataaagttgtaaaacaggca

SEQ ID NO: 379011 - DNA, 5130 bp, Homo sapiens
  misc_feature (5056)..(5056): n is a, c, g, or t
  misc_feature (5062)..(5062): n is a, c, g, or t
  misc_feature (5066)..(5066): n is a, c, g, or t
  misc_feature (5097)..(5098): n is a, c, g, or t
  misc_feature (5100)..(5101): n is a, c, g, or t
ccaagcctgagtgttaatttaactctatgttgtccgccgtgtaaacatccgaggtcatttgttgcgttgaattatctgaccatccttttttactgtgactcttcccattctctttggcaagaagtccccttctcgcccccaaaccagcaagggactcccccacctgggtctgtgccctgccccgcgctgggggccgagtccttgaatgtggcttcaggggctcctgtcctgacggttgcgtccgggggaggggaaggaagggccgctgtcgccaaggttttctctcccagaaccccgtgggccgccgcgatggccctcaagatggtgaagggcagcatcgaccgcatgttcgacaagaatctgcaggacttggtccgcggcatccgtaaccacaaggaggacgaggcaaaatacatatctcagtgcattgatgagatcaagcaggagctgaagcaggacaacatagcggtgaaggcgaacgcggtctgcaagctgacgtatttacagatgttgggatacgacatcagctgggccgccttcaacatcatagaagtgatgagtgcctccaagttcaccttcaagcgaattggctacctcgctgcttcccagagctttcacgaaggcaccgacgtcatcatgctgaccaccaatcagatccgtaaggacttgagcagccccagccagtacgacacaggtgttgcactgacgggtctgtcctgcttcgtcaccccagaccttgccagagacctggcaaatgacatcatgacactgatgtcacacaccaagccctacatcaggaagaaggctgtgctgatcatgtacaaggtgttcctgaagtaccccgagtcgctgcgccctgcctttccccggctgaaggagaagctggaggaccccgaccccggggttcagtcggctgccgtcaatgtcatctgcgagctggccagacgcaaccctaagaactacctgtccctggccccgctctttttcaagctgatgacgtcctccaccaacaactgggtcctcatcaagatcatcaagctgttcggtgctcttactcctttggaaccgcggctgggcaagaagctgatcgagcccctcaccaatctcatccacagcacgtctgccatgtctctcctctatgaatgtgtgaacaccgtgattgcagtgctcatctcgctgtcctccggcatgcccaaccacagcgccagcatccagctttgtgttcagaaattaaggatattgatcgaggactccgatcagaacttgaagtacctggggctgctggcaatgtccaagatcctgaagacccaccccaagtccgtgcagtcccacaaggacctcatcctgcagtgcctggacgacaaggacgagtccatccggctgcgggccctggacctgctctatgggatggtgtccaagaagaacctgatggagatcgtgaagaagctgatgacccacgtagacaaggcagagggtaccacctaccgtgacgagctgctcaccaagatcattgacatctgcagccagtccaactaccagtacatcaccaacttcgagtggtacatcagcatcctggtggagctgacccggctggagggcacacggcacggccacctcatcgccgcccaaatgctggacgtggccatccgcgtgaaggccatccgcaagttcgccgtgtcccagatgtctgcgctgcttgacagtgcacacctgctggccagcagcacccagcggaacgggatctgtgaggtgctgtacgctgccgcctggatctgcggggagttctcagagcatctgcaggaaccacaccacactttggaggccatgctgcggcccagagtcaccacgctgccaggccacatccaggccgtgtatgtgcagaacgtggtcaagctctacgcctccatcctgcagcagaaggagcaggccggggaggcagagggcgctcaggccgtcacccagctcatggtggaccggctgccccagtttgtgcagagcgcagacctggaggtgcaggagcgggcgtcctgcatcctgcagctggtcaagcacatccagaagcttcaggccaaggacgtgcctgtggcagaggaggtcagcgctctctttgctggggagctgaacccagtggcccccaaggcccagaagaaggttccagtccccgaaggcctggacctggacgcctggatcaatgagccactctcggacagcgagtcagaggacgagaggcccagggccgtcttccacgaggaggagcagcggcgtcccaagcaccggccgtcggaggcggacgaggaagagctggctcggcgccgagaggcccggaagcaggagcaggccaacaaccccttctacatcaagagctcgccatcgccacagaagcggtaccaggacaccccgggcgtggagcacattcccgtggtgcagattgacctctccgtccccttgaaggttccagggctgcctatgtcagatcagtatgtgaagctggaggaggagcggcggcaccggcagaagctggagaaggacaagaggaggaaaaagaggaaggagaaggagaagaagggcaagcgccgccacagctcgctgcccacggagagcgacgaggacatcgcccctgcccagcaggtggacatcgtcacagaggagatgcctgagaatgctctgcccagcgacgaggatgacaaagaccccaacgacccctacagggctctggatattgacctggataagcccttagccgacagcgagaaactgcctattcagaaacacagaaacaccgagacctcaaaatcccctgagaaggacgttcccatggtagaaaagaagagcaagaaacccaagaagaaagagaaaaaacacaaagagaaagagagagacaaggagaagaagaaggagaaggagaagaaggctgaggacctggacttctggctgtctaccaccccaccgcctgcccccgcccccgcccccgcccccgttccatccacggacgagtgtgaggacgccaagacggaggcgcagggcgaggaggacgatgccgaggggcaagaccaggacaagaaatctcccaagcctaagaagaagaagcacaggaaggagaaggaggagcggaccaaaggcaagaagaagtccaagaagcagcctccaggcagcgaggaggcagcgggggagccggtgcagaatggcgcgccagaggaggagcagctcccgcctgagtccagctactccctcctcgctgaaaattcctatgttaaaatgacctgtgacatccggggcagtctgcaggaggacagccaggtcactgtggccatcgtgctggagaacaggagcagcagcatcctcaagggcatggagctcagcgtgctggactcactcaatgccaggatggcccggccgcagggctcctccgtccacgatggcgtccccgtgcctttccagctgcccccaggcgtctccaacgaagcccagtatgtgttcaccatccagagcatcgtcatggcgcagaagctcaaggggaccctgtccttcattgccaagaatgacgagggtgcgacccacgagaagctggacttcaggctgcacttcagctgcagctcctacttgatcaccactccctgctacagtgacgcctttgctaagttgctggagtctggggacttgagcatgagctcaatcaaagtcgatggcattcggatgtccttccagaatcttctggcgaagatctgttttcaccaccatttttccgttgtggagcgagtggactcctgcgcctccatgtacagccgctccatccagggccaccatgtctgcctcctggtgaaaaagggtgagaactctgtctcagtcgacgggaagtgcagtgactccacgctactgagcaacttgttagaagagatgaaggcgacgctggccaagtgttgagagctgcctgcgagccccgcaccaccccgcggagcacgtacccagggaccgcagccctgacgtgtctcgcctctcctcagtcgtgtgtactgtacccaagcctgagtgttaatttaactctatgttgtccgccgtgtagacatccgaggtcatttgttgcgttgaattatctgaccatccttttttactgtgactcttcccattctctttggcaagaagtccccttctcgcccccaaaccagcaagggactcccccacctgggtctgtgccctgccccgcgctgggggccgagtccttgaatgtggcttcaggggctcctgtcctgggccagggcctgatgggcaccacgtgaggggcacttggtggacagggcggggctgacgtggcctcctctggggtcgcctgcttttgacccaaaggtcctgacggttgcgtccgggggaggggaaggaagggccgctgtcgccaaggttttctctcccagaacccacagtgggaaagcggtcttgccaggcgttgtccattgtcagtgtgctcgtgggctggtgactgggtcttgggatcccaggccacgcgccagccaggctgtgggcagggcggggccagggacgccaaagagaggttgcagtcagaaccgtggacggggtgggttgaggcctctctgccacccgtcttcctggtcagcagaagtgcatctcggcttgggtttggggtggtccgcatcccctgcttgccactatgcgcaccaaggtttccccacatccttcccagcacccttaggaaggcccaggcagggcctggaagcagcggacctgggctgttctgtgttgaaggagtgtgcccagtgcccttgggcaggacctgtgagagccacctcacaggcagagcccccaccaggcagggcaaggagactccgctcactccccacggccagcgtgggcacaggactgacccttcttcagagataatgacattttatcttctccttttgatgaaaactgtcactttagcatgtaatccattacagaatcccatgcagtgattccaggatttgaaattgtatgatgtgttacataagaatttatttgctatcgacattcccgtataaagagagagacatatcacgctgctgtnggtttncaanttattaacaaccctccgtggttgggacggannanntaaggttcgccaaaataaaacggtttacc

SEQ ID NO: 379012 - DNA, 3740 bp, Homo sapiens
ccaagcctgagtgttaatttaactctatgttgtccgccgtgtaaacatccgaggtcatttgttgcgttgaattatctgaccatccttttttactgtgactcttcccattctctttggcaagaagtccccttctcgcccccaaaccagcaagggactcccccacctgggtctgtgccctgccccgcgctgggggccgagtccttgaatgtggcttcaggggctcctgtcctgacggttgcgtccgggggaggggaaggaagggccgctgtcgccaaggttttctctcccagaaccccgtgggccgccgcgatggccctcaagatggtgaagggcagcatcgaccgcatgttcgacaagaatctgcaggacttggtccgcggcatccgtaaccacaaggaggacgaggcaaaatacatatctcagtgcattgatgagatcaagcaggagctgaagcaggacaacatagcggtgaaggcgaacgcggtctgcaagctgacgtatttacagatgttgggatacgacatcagctgggccgccttcaacatcatagaagtgatgagtgcctccaagttcaccttcaagcgaattggctacctcgctgcttcccagagctttcacgaaggcaccgacgtcatcatgctgaccaccaatcagatccgtaaggacttgagcagccccagccagtacgacacaggtgttgcactgacgggtctgtcctgcttcgtcaccccagaccttgccagagacctggcaaatgacatcatgacactgatgtcacacaccaagccctacatcaggaagaaggctgtgctgatcatgtacaaggtgttcctgaagtaccccgagtcgctgcgccctgcctttccccggctgaaggagaagctggaggaccccgaccccggggttcagtcggctgccgtcaatgtcatctgcgagctggccagacgcaaccctaagaactacctgtccctggccccgctctttttcaagctgatgacgtcctccaccaacaactgggtcctcatcaagatcatcaagctgttcggtgctcttactcctttggaaccgcggctgggcaagaagctgatcgagcccctcaccaatctcatccacagcacgtctgccatgtctctcctctatgaatgtgtgaacaccgtgattgcagtgctcatctcgctgtcctccggcatgcccaaccacagcgccagcatccagctttgtgttcagaaattaaggatattgatcgaggactccgatcagaacttgaagtacctggggctgctggcaatgtccaagatcctgaagacccaccccaagtccgtgcagtcccacaaggacctcatcctgcagtgcctggacgacaaggacgagtccatccggctgcgggccctggacctgctctatgggatggtgtccaagaagaacctgatggagatcgtgaagaagctgatgacccacgtagacaaggcagagggtaccacctaccgtgacgagctgctcaccaagatcattgacatctgcagccagtccaactaccagtacatcaccaacttcgagtggtacatcagcatcctggtggagctgacccggctggagggcacacggcacggccacctcatcgccgcccaaatgctggacgtggccatccgcgtgaaggccatccgcaagttcgccgtgtcccagatgtctgcgctgcttgacagtgcacacctgctggccagcagcacccagcggaacgggatctgtgaggtgctgtacgctgccgcctggatctgcggggagttctcagagcatctgcaggaaccacaccacactttggaggccatgctgcggcccagagtcaccacgctgccaggccacatccaggccgtgtatgtgcagaacgtggtcaagctctacgcctccatcctgcagcagaaggagcaggccggggaggcagagggcgctcaggccgtcacccagctcatggtggaccggctgccccagtttgtgcagagcgcagacctggaggtgcaggagcgggcgtcctgcatcctgcagctggtcaagcacatccagaagcttcaggccaaggacgtgcctgtggcagaggaggtcagcgctctctttgctggggagctgaacccagtggcccccaaggcccagaagaaggttccagtccccgaaggcctggacctggacgcctggatcaatgagccactctcggacagcgagtcagaggacgagaggcccagggccgtcttccacgaggaggagcagcggcgtcccaagcaccggccgtcggaggcggacgaggaagagctggctcggcgccgagaggcccggaagcaggagcaggccaacaaccccttctacatcaagagctcgccatcgccacagaagcggtaccaggacaccccgggcgtggagcacattcccgtggtgcagattgacctctccgtccccttgaaggttccagggctgcctatgtcagatcagtatgtgaagctggaggaggagcggcggcaccggcagaagctggagaaggacaagagatgaaggcgacgctggccaagtgttgagagctgcctgcgagccccgcaccaccccgcggagcacgtacccagggaccgcagccctgacgtgtctcgcctctcctcagtcgtgtgtactgtacccaagcctgagtgttaatttaactctatgttgtccgccgtgtagacatccgaggtcatttgttgcgttgaattatctgaccatccttttttactgtgactcttcccattctctttggcaagaagtccccttctcgcccccaaaccagcaagggactcccccacctgggtctgtgccctgccccgcgctgggggccgagtccttgaatgtggcttcaggggctcctgtcctgggccagggcctgatgggcaccacgtgaggggcacttggtggacagggcggggctgacgtggcctcctctggggtcgcctgcttttgacccaaaggtcctgacggttgcgtccgggggaggggaaggaagggccgctgtcgccaaggttttctctcccagaacccacagtgggaaagcggtcttgccaggcgttgtccattgtcagtgtgctcgtgggctggtgactgggtcttgggatcccaggccacgcgccagccaggctgtgggcagggcggggccagggacgccaaagagaggttgcagtcagaaccgtggacggggtgggttgaggcctctctgccacccgtcttcctggtcagcagaagtgcatctcggcttgggtttggggtggtccgcatcccctgcttgccactatgcgcaccaaggtttccccacatccttcccagcacccttaggaaggcccaggcagggcctggaagcagcggacctgggctgttctgtgttgaaggagtgtgcccagtgcccttgggcaggacctgtgagagccacctcacaggcagagcccccaccaggcagggcaaggagactccgctcactccccacggccagcgtgggcacaggactgacccttcttcagagataatgacattttatcttctccttttgatgaaaactgtcactttagcatgtaatccattacagaatcccatgcagtgattccaggatttgaaattgtatgatgtgttacataagaatttatttgctatcgacattcccgtataaagagagagacatatcacgctgctgtcatgattttgtgtcaagatgatccaataaagttgtaaaacaggca

SEQ ID NO: 379013 - DNA, 2644 bp, Homo sapiens
acgcccagtccttccccgcggccgaggccggcggaggggcagaagcaggaagcagaaagcggcagaagcaggaagcaggaggaaaaagaggaaggagaaggagaagaagggcaagcgccgccacagctcgctgcccacggagagcgacgaggacatcgcccctgcccagcaggtggacatcgtcacagaggagatgcctgagaatgctctgcccagcgacgaggatgacaaagaccccaacgacccctacagggctctggatattgacctggataagcccttagccgacagcgagaaactgcctattcagaaacacagaaacaccgagacctcaaaatcccctgagaaggacgttcccatggtagaaaagaagagcaagaaacccaagaagaaagagaaaaaacacaaagagaaagagagagacaaggagaagaagaaggagaaggagaagaaggctgaggacctggacttctggctgtctaccaccccaccgcctgcccccgcccccgcccccgcccccgttccatccacggacgagtgtgaggacgccaagacggaggcgcagggcgaggaggacgatgccgaggggcaagaccaggacaagaaatctcccaagcctaagaagaagaagcacaggaaggagaaggaggagcggaccaaaggcaagaagaagtccaagaagcagcctccaggcagcgaggaggcagcgggggagccggtgcagaatggcgcgccagaggaggagcagctcccgcctgagtccagctactccctcctcgctgaaaattcctatgttaaaatgacctgtgacatccggggcagtctgcaggaggacagccaggtcactgtggccatcgtgctggagaacaggagcagcagcatcctcaagggcatggagctcagcgtgctggactcactcaatgccaggatggcccggccgcagggctcctccgtccacgatggcgtccccgtgcctttccagctgcccccaggcgtctccaacgaagcccagtatgtgttcaccatccagagcatcgtcatggcgcagaagctcaaggggaccctgtccttcattgccaagaatgacgagggtgcgacccacgagaagctggacttcaggctgcacttcagctgcagctcctacttgatcaccactccctgctacagtgacgcctttgctaagttgctggagtctggggacttgagcatgagctcaatcaaagtcgatggcattcggatgtccttccagaatcttctggcgaagatctgttttcaccaccatttttccgttgtggagcgagtggactcctgcgcctccatgtacagccgctccatccagggccaccatgtctgcctcctggtgaaaaagggtgagaactctgtctcagtcgacgggaagtgcagtgactccacgctactgagcaacttgttagaagagatgaaggcgacgctggccaagtgttgagagctgcctgcgagccccgcaccaccccgcggagcacgtacccagggaccgcagccctgacgtgtctcgcctctcctcagtcgtgtgtactgtacccaagcctgagtgttaatttaactctatgttgtccgccgtgtagacatccgaggtcatttgttgcgttgaattatctgaccatccttttttactgtgactcttcccattctctttggcaagaagtccccttctcgcccccaaaccagcaagggactcccccacctgggtctgtgccctgccccgcgctgggggccgagtccttgaatgtggcttcaggggctcctgtcctgggccagggcctgatgggcaccacgtgaggggcacttggtggacagggcggggctgacgtggcctcctctggggtcgcctgcttttgacccaaaggtcctgacggttgcgtccgggggaggggaaggaagggccgctgtcgccaaggttttctctcccagaacccacagtgggaaagcggtcttgccaggcgttgtccattgtcagtgtgctcgtgggctggtgactgggtcttgggatcccaggccacgcgccagccaggctgtgggcagggcggggccagggacgccaaagagaggttgcagtcagaaccgtggacggggtgggttgaggcctctctgccacccgtcttcctggtcagcagaagtgcatctcggcttgggtttggggtggtccgcatcccctgcttgccactatgcgcaccaaggtttccccacatccttcccagcacccttaggaaggcccaggcagggcctggaagcagcggacctgggctgttctgtgttgaaggagtgtgcccagtgcccttgggcaggacctgtgagagccacctcacaggcagagcccccaccaggcagggcaaggagactccgctcactccccacggccagcgtgggcacaggactgacccttcttcagagataatgacattttatcttctccttttgatgaaaactgtcactttagcatgtaatccattacagaatcccatgcagtgattccaggatttgaaattgtatgatgtgttacataagaatttatttgctatcgacattcccgtataaagagagagacatatcacgctgctgtcatgattttgtgtcaagatgatccaataaagttgtaaaacaggca

SEQ ID NO: 379014 - DNA, 4523 bp, Homo sapiens
ccaagcctgagtgttaatttaactctatgttgtccgccgtgtaaacatccgaggtcatttgttgcgttgaattatctgaccatccttttttactgtgactcttcccattctctttggcaagaagtccccttctcgcccccaaaccagcaagggactcccccacctgggtctgtgccctgccccgcgctgggggccgagtccttgaatgtggcttcaggggctcctgtcctgacggttgcgtccgggggaggggaaggaagggccgctgtcgccaaggttttctctcccagaaccccgtgggccgccgcgatggccctcaagatggtgaagggcagcatcgaccgcatgttcgacaagaatctgcaggacttggtccgcggcatccgtaaccacaaggaggacgaggcaaaatacatatctcagtgcattgatgagatcaagcaggagctgaagcaggacaacatagcggtgaaggcgaacgcggtctgcaagctgacgtatttacagatgttgggatacgacatcagctgggccgccttcaacatcatagaagtgatgagtgcctccaagttcaccttcaagcgaattggctacctcgctgcttcccagagctttcacgaaggcaccgacgtcatcatgctgaccaccaatcagatccgtaaggacttgagcagccccagccagtacgacacaggtgttgcactgacgggtctgtcctgcttcgtcaccccagaccttgccagagacctggcaaatgacatcatgacactgatgtcacacaccaagccctacatcaggaagaaggctgtgctgatcatgtacaaggtgttcctgaagtaccccgagtcgctgcgccctgcctttccccggctgaaggagaagctggaggaccccgaccccggggttcagtcggctgccgtcaatgtcatctgcgagctggccagacgcaaccctaagaactacctgtccctggccccgctctttttcaagctgatgacgtcctccaccaacaactgggtcctcatcaagatcatcaagctgttcggtgctcttactcctttggaaccgcggctgggcaagaagctgatcgagcccctcaccaatctcatccacagcacgtctgccatgtctctcctctatgaatgtgtgaacaccgtgattgcagtgctcatctcgctgtcctccggcatgcccaaccacagcgccagcatccagctttgtgttcagaaattaaggatattgatcgaggactccgatcagaacttgaagtacctggggctgctggcaatgtccaagatcctgaagacccaccccaagtccgtgcagtcccacaaggacctcatcctgcagtgcctggacgacaaggacgagtccatccggctgcgggccctggacctgctctatgggatggtgtccaagaagaacctgatggagatcgtgaagaagctgatgacccacgtagacaaggcagagggtaccacctaccgtgacgagctgctcaccaagatcattgacatctgcagccagtccaactaccagtacatcaccaacttcgagtggtacatcagcatcctggtggagctgacccggctggagggcacacggcacggccacctcatcgccgcccaaatgctggacgtggccatccgcgtgaaggccatccgcaagttcgccgtgtcccagatgtctgcgctgcttgacagtgcacacctgctggccagcagcacccagcggaacgggatctgtgaggtgctgtacgctgccgcctggatctgcggggagttctcagagcatctgcaggaaccacaccacactttggaggccatgctgcggcccagagtcaccacgctgccaggccacatccaggccgtgtatgtgcagaacgtggtcaagctctacgcctccatcctgcagcagaaggagcaggccggggaggcagagggcgctcaggccgtcacccagctcatggtggaccggctgccccagtttgtgcagagcgcagacctggaggtgcaggagcgggcgtcctgcatcctgcagctggtcaagcacatccagaagcttcaggccaaggacgtgcctgtggcagaggaggtcagcgctctctttgctggggagctgaacccagtggcccccaaggcccagaagaaggttccagtccccgaaggcctggacctggacgcctggatcaatgagccactctcggacagcgagtcagaggacgagaggcccagggccgtcttccacgaggaggagcagcggcgtcccaagcaccggccgtcggaggcggacgaggaagagctggctcggcgccgagaggcccggaagcaggagcaggccaacaaccccttctacatcaagagctcgccatcgccacagaagcggtaccaggacaccccgggcgtggagcacattcccgtggtgcagattgacctctccgtccccttgaaggttccagggctgcctatgtcagatcagtatgtgaagctggaggaggagcggcggcaccggcagaagctggagaaggacaagaggaggaaaaagaggaaggagaaggagaagaagggcaagcgccgccacagctcgctgcccacggagagcgacgaggacatcgcccctgcccagcaggtggacatcgtcacagaggagatgcctgagaatgctctgcccagcgacgaggatgacaaagaccccaacgacccctacagggctctggatattgacctggataagcccttagccgacagcgagaaactgcctattcagaaacacagaaacaccgagacctcaaaatcccctgagaaggacgttcccatggtagaaaagaagagcaagaaacccaagaagaaagagaaaaaacacaaagagaaagagagagacaaggagaagaagaaggagaaggagaagaaggctgaggacctggacttctggctgtctaccaccccaccgcctgcccccgcccccgcccccgcccccgttccatccacggacgagtgtgaggacgccaagacggaggcgcagggcgaggaggacgatgccgaggggcaagaccaggacaagaaatctcccaagcctaagaagaagaagcacaggaaggagaaggaggagcggaccaaaggcaagaagaagtccaagaagcagcctccaggcagcgaggaggcagcgggggagccggtgcagaatggcgcgccagaggaggagcagctcccgcctgagtccagctactccctcctcgctgaaaattcctatgttaaaatgacctgtgacatccggggcagtctgcaggaggacagccaggtcactgtggccatcgtgctggagaacaggagcagcagcatcctcaagggcatggagctcagcgtgctggactcactcaatgccaggatggcccggccgcagggctcctccgtccacgatggcgtccccgtgcctttccagctgcccccaggcgtctccaacgaagcccagtatgtgttcaccatccagagcatcgtcatggcgcagaagctcaaggggaccctgtccttcattgccaagaatgacgagggtgcgacccacgagaagctggacttcaggctgcacttcagctgcagctcctacttgatcaccactccctgctacagtgacgcctttgctaagttgctggagtctggggacttgagcatgagctcaatcaaagtcgatggcattcggatgtccttccagaatcttctggcgaagatctgttttcaccaccatttttccgttgtggagcgagtggactcctgcgcctccatgtacagccgctccatccagggccaccatgtctgcctcctggtgaaaaagggtgagaactctgtctcagtcgacgggaagtgcagtgactccacgctactgagcaacttgttagaagagatgaaggcgacgctggccaagtgttgagagctgcctgcgagccccgcaccaccccgcggagcacgtacccagggaccgcagccctgacgtgtctcgcctctcctcagtcgtgtgtactgtacccaagcctgagtgttaatttaactctatgttgtccgccgtgtagacatccgaggtcatttgttgcgttgaattatctgaccatccttttttactgtgactcttcccattctctttggcaagaagtccccttctcgcccccaaaccagcaagggactcccccacctgggtctcagtgcccttgggcaggacctgtgagagccacctcacaggcagagcccccaccaggcagggcaaggagactccgctcactccccacggccagcgtgggcacaggactgacccttcttcagagataatgacattttatcttctccttttgatgaaaactgtcactttagcatgtaatccattacagaatcccatgcagtgattccaggatttgaaattgtatgatgtgttacataagaatttatttgctatcgacattcccgtataaagagagagacatatcacgctgctgtcatgattttgtgtcaagatgatccaataaagttgtaaaacaggca

SEQ ID NO: 379015 - DNA, 1460 bp, Homo sapiens
tagcgaaggccctgggcgtcggcagaacttccgggccaaccgacgagaacgatattcctttcctgcggcggataagaattcctgtctttcaccaccatttttccgttgtggagcgagtggactcctgcgcctccatgtacagccgctccatccagggccaccatgtctgcctcctggtgaaaaagggtgagaactctgtctcagtcgacgggaagtgcagtgactccacgctactgagcaacttgttagaagagatgaaggcgacgctggccaagtgttgagagctgcctgcgagccccgcaccaccccgcggagcacgtacccagggaccgcagccctgacgtgtctcgcctctcctcagtcgtgtgtactgtacccaagcctgagtgttaatttaactctatgttgtccgccgtgtagacatccgaggtcatttgttgcgttgaattatctgaccatccttttttactgtgactcttcccattctctttggcaagaagtccccttctcgcccccaaaccagcaagggactcccccacctgggtctgtgccctgccccgcgctgggggccgagtccttgaatgtggcttcaggggctcctgtcctgggccagggcctgatgggcaccacgtgaggggcacttggtggacagggcggggctgacgtggcctcctctggggtcgcctgcttttgacccaaaggtcctgacggttgcgtccgggggaggggaaggaagggccgctgtcgccaaggttttctctcccagaacccacagtgggaaagcggtcttgccaggcgttgtccattgtcagtgtgctcgtgggctggtgactgggtcttgggatcccaggccacgcgccagccaggctgtgggcagggcggggccagggacgccaaagagaggttgcagtcagaaccgtggacggggtgggttgaggcctctctgccacccgtcttcctggtcagcagaagtgcatctcggcttgggtttggggtggtccgcatcccctgcttgccactatgcgcaccaaggtttccccacatccttcccagcacccttaggaaggcccaggcagggcctggaagcagcggacctgggctgttctgtgttgaaggagtgtgcccagtgcccttgggcaggacctgtgagagccacctcacaggcagagcccccaccaggcagggcaaggagactccgctcactccccacggccagcgtgggcacaggactgacccttcttcagagataatgacattttatcttctccttttgatgaaaactgtcactttagcatgtaatccattacagaatcccatgcagtgattccaggatttgaaattgtatgatgtgttacataagaatttatttgctatcgacattcccgtataaagagagagacatatcacgctgctgtcatgattttgtgtcaagatgatccaataaagttgtaaaacaggca

SEQ ID NO: 379016 - DNA, 3940 bp, Homo sapiens
ccaagcctgagtgttaatttaactctatgttgtccgccgtgtaaacatccgaggtcatttgttgcgttgaattatctgaccatccttttttactgtgactcttcccattctctttggcaagaagtccccttctcgcccccaaaccagcaagggactcccccacctgggtctgtgccctgccccgcgctgggggccgagtccttgaatgtggcttcaggggctcctgtcctgacggttgcgtccgggggaggggaaggaagggccgctgtcgccaaggttttctctcccagaaccccgtgggccgccgcgatggccctcaagatggtgaagggcagcatcgaccgcatgttcgacaagaatctgcaggacttggtccgcggcatccgtaaccacaaggaggacgaggcaaaatacatatctcagtgcattgatgagatcaagcaggagctgaagcaggacaacatagcggtgaaggcgaacgcggtctgcaagctgacgtatttacagatgttgggatacgacatcagctgggccgccttcaacatcatagaagtgatgagtgcctccaagttcaccttcaagcgaattggctacctcgctgcttcccagagctttcacgaaggcaccgacgtcatcatgctgaccaccaatcagatccgtaaggacttgagcagccccagccagtacgacacaggtgttgcactgacgggtctgtcctgcttcgtcaccccagaccttgccagagacctggcaaatgacatcatgacactgatgtcacacaccaagccctacatcaggaagaaggctgtgctgatcatgtacaaggtgttcctgaagtaccccgagtcgctgcgccctgcctttccccggctgaaggagaagctggaggaccccgaccccggggttcagtcggctgccgtcaatgtcatctgcgagctggccagacgcaaccctaagaactacctgtccctggccccgctctttttcaagctgatgacgtcctccaccaacaactgggtcctcatcaagatcatcaagctgttcggtgctcttactcctttggaaccgcggctgggcaagaagctgatcgagcccctcaccaatctcatccacagcacgtctgccatgtctctcctctatgaatgtgtgaacaccgtgattgcagtgctcatctcgctgtcctccggcatgcccaaccacagcgccagcatccagctttgtgttcagaaattaaggatattgatcgaggactccgatcagaacttgaagtacctggggctgctggcaatgtccaagatcctgaagacccaccccaagtccgtgcagtcccacaaggacctcatcctgcagtgcctggacgacaaggacgagtccatccggctgcgggccctggacctgctctatgggatggtgtccaagaagaacctgatggagatcgtgaagaagctgatgacccacgtagacaaggcagagggtaccacctaccgtgacgagctgctcaccaagatcattgacatctgcagccagtccaactaccagtacatcaccaacttcgagtggtacatcagcatcctggtggagctgacccggctggagggcacacggcacggccacctcatcgccgcccaaatgctggacgtggccatccgcgtgaaggccatccgcaagttcgccgtgtcccagatgtctgcgctgcttgacagtgcacacctgctggccagcagcacccagcggaacgggatctgtgaggtgctgtacgctgccgcctggatctgcggggagttctcagagcatctgcaggaaccacaccacactttggaggccatgctgcggcccagagtcaccacgctgccaggccacatccaggccgtgtatgtgcagaacgtggtcaagctctacgcctccatcctgcagcagaaggagcaggccggggaggcagagggcgctcaggccgtcacccagctcatggtggaccggctgccccagtttgtgcagagcgcagacctggaggtgcaggagcgggcgtcctgcatcctgcagctggtcaagcacatccagaagcttcaggccaaggacgtgcctgtggcagaggaggtcagcgctctctttgctggggagctgaacccagtggcccccaaggcccagaagaaggttccagtccccgaaggcctggacctggacgcctggatcaatgagccactctcggacagcgagtcagaggacgagaggcccagggccgtcttccacgaggaggagcagcggcgtcccaagcaccggccgtcggaggcggacgaggaagagctggctcggcgccgagaggcccggaagcaggagcaggccaacaaccccttctacatcaagagctcgccatcgccacagaagcggtaccaggacaccccgggcgtggagcacattcccgtggtgcagattgacctctccgtccccttgaaggttccagggctgcctatgtcagatcagtatgtgaagctggaggaggagcggcggcaccggcagaagctggagaaggacaagaggaggaaaaagaggaaggagaaggagaagaagggcaagcgccgccacagctcgctgcccacggagagcgacgaggacatcgcccctgcccagcaggtggacatcgtcacagaggagatgcctgagaatgctctgcccagcgacgaggatgacaaagaccccaacgacccctacagggctctggatattgacctggataagcccttagccgacagcgagaaactgcctattcagaaacacagaaacaccgagacctcaaaatcccctgagaaggacgttcccatggtagaaaagaagagcaagaaacccaagaagaaagagaaaaaacacaaagagaaagagagagacaaggagaagaagaaggagaaggagaagaaggctgaggacctggacttctggctgtctaccaccccaccgcctgcccccgcccccgcccccgcccccgttccatccacggacgagtgtgaggacgccaagacggaggcgcagggcgaggaggacgatgccgaggggcaagaccaggacaagaaatctcccaagcctaagaagaagaagcacaggaaggagaaggaggagcggaccaaaggcaagaagaagtccaagaagcagcctccaggcagcgaggaggcagcgggggagccggtgcagaatggcgcgccagaggaggagcagctcccgcctgagtccagctactccctcctcgctgaaaattcctatgttaaaatggtgagtggcagccgctcccaggggcagggtgggccagcccacactctttggcatgggatcgcgcggaacccgggcagcccccacagctcccggatgttggtatacccagggcctgtgattcctggcaggggcgttgcttgggcagcacctctggcttggggtaaggttggagacatgccctgagacttggactggcaggagggtccccgccatgcactcaaagagcagccataggaggcgcttggcctgcggctagggggcgcccctctccgtgccttcctgtgcctgtgggacccctgctgcctctgtggtcattaagagacaggtggctgtgcctgttccctgtggcgggcccgcctgccctgctaacactggccatgccctgcagacctgtgacatccggggcagtctgcaggaggacagccaggtcactgtggccatcgtgctggagaacaggagcagcagcatcctcaagggcatggagctcagcgtgctggactcactcaatgccaggatggcccggccgcagggctcctccgtccacgatggcgtccccgtgcctttccagctgcccccaggcgtctccaacgaagcccagtatgtgttcaccatccagagcatcgtcatggcgcagaagctcaaggggaccctgtccttcattgccaaggtatgcagggctcca

SEQ ID NO: 379017 - DNA, 1515 bp, Homo sapiens
ccaagcctgagtgttaatttaactctatgttgtccgccgtgtaaacatccgaggtcatttgttgcgttgaattatctgaccatccttttttactgtgactcttcccattctctttggcaagaagtccccttctcgcccccaaaccagcaagggactcccccacctgggtctgtgccctgccccgcgctgggggccgagtccttgaatgtggcttcaggggctcctgtcctgacggttgcgtccgggggaggggaaggaagggccgctgtcgccaaggttttctctcccagaaccccgtgggccgccgcgatggccctcaagatggtgaagggcagcatcgaccgcatgttcgacaagaatctgcaggacttggtccgcggcatccgtaaccacaaggaggacgaggcaaaatacatatctcagtgcattgatgagatcaagcaggagctgaagcaggacaacatagcggtgaaggcgaacgcggtctgcaagctgacgtatttacagatgttgggatacgacatcagctgggccgccttcaacatcatagaagtgatgagtgcctccaagttcaccttcaagcgaattggctacctcgctgcttcccagagctttcacgaaggcaccgacgtcatcatgctgaccaccaatcagatccgtaaggacttgagcagccccagccagtacgacacaggtgttgcactgacgggtctgtcctgcttcgtcaccccagaccttgccagagacctggcaaatgacatcatgacactgatgtcacacaccaagccctacatcaggaagaaggctgtgctgatcatgtacaaggtgttcctgaagtaccccgagtcgctgcgccctgcctttccccggctgaaggagaagctggaggaccccgaccccggggttcagtcggctgccgtcaatgtcatctgcgagctggccaggacgccaaagagaggttgcagtcagaaccgtggacggggtgggttgaggcctctctgccacccgtcttcctggtcagcagaagtgcatctcggcttgggtttggggtggtccgcatcccctgcttgccactatgcgcaccaaggtttccccacatccttcccagcacccttaggaaggcccaggcagggcctggaagcagcggacctgggctgttctgtgttgaaggagtgtgcccagtgcccttgggcaggacctgtgagagccacctcacaggcagagcccccaccaggcagggcaaggagactccgctcactccccacggccagcgtgggcacaggactgacccttcttcagagataatgacattttatcttctccttttgatgaaaactgtcactttagcatgtaatccattacagaatcccatgcagtgattccaggatttgaaattgtatgatgtgttacataagaatttatttgctatcgacattcccgtataaagagagagacatatcacgctgctgtcatgattttgtgtcaagatgatccaataaagttgtaaaacaggca

SEQ ID NO: 379018 - DNA, 2159 bp, Homo sapiens
ccaagcctgagtgttaatttaactctatgttgtccgccgtgtaaacatccgaggtcatttgttgcgttgaattatctgaccatccttttttactgtgactcttcccattctctttggcaagaagtccccttctcgcccccaaaccagcaagggactcccccacctgggtctgtgccctgccccgcgctgggggccgagtccttgaatgtggcttcaggggctcctgtcctgacggttgcgtccgggggaggggaaggaagggccgctgtcgccaaggttttctctcccagaaccccgtgggccgccgcgatggccctcaagatggtgaagggcagcatcgaccgcatgttcgacaagaatctgcaggacttggtccgcggcatccgtaaccacaaggaggacgaggcaaaatacatatctcagtgcattgatgagatcaagcaggagctgaagcaggacaacatagcggtgaaggcgaacgcggtctgcaagctgacgtatttacagatgttgggatacgacatcagctgggccgccttcaacatcatagaagtgatgagtgcctccaagttcaccttcaagcgaattggctacctcgctgcttcccagagctttcacgaaggcaccgacgtcatcatgctgaccaccaatcagatccgtaaggacttgagcagccccagccagtacgacacaggtgttgcactgacgggtctgtcctgcttcgtcaccccagaccttgccagagacctggcaaatgacatcatgacactgatgtcacacaccaagccctacatcaggaagaaggctgtgctgatcatgtacaaggtgttcctgaagtaccccgagtcgctgcgccctgcctttccccggctgaaggagaagctggaggaccccgaccccggggttcagtcggctgccgtcaatgtcatctgcgagctggccagacgcaaccctaagaactacctgtccctggccccgctctttttcaagctgatgacgtcctccaccaacaactgggtcctcatcaagatcatcaagctgttcggtgctcttactcctttggaaccgcggctgggcaagaagctgatcgagcccctcaccaatctcatccacagcacgtctgccatgtctctcctctatgaatgtgtgaacaccgtgattgcagtgctcatctcgctgtcctccggcatgcccaaccacagcgccagcatccagctttgtgttcagaaattaaggatattgatcgaggactccgatcagaacttgaagtacctggggctgctggcaatgtccaagatcctgaagacccaccccaagtccgtgcagtcccacaaggacctcatcctgcagtgcctggacgacaaggacgagtccatccggctgcgggccctggacctgctctatgggatggtgtccaagaagaacctgatggagatcgtgaagaagctgatgacccacgtagacaaggcagagggtaccacctaccgtgacgagctgctcaccaagatcattgacatctgcagccagtccaactaccagtacatcaccaacttcgagtggtacatcagcatcctggtggagctgacccggctggagggcacacggcacggccacctcatcgccgcccaaatgctggacgtggccatccgcgtgaaggccatccgcaagttcgccgtgtcccagatgtctgcgctgcttgacagtgcacacctgctggccagcagcacccagcggaacgggatctgtgaggtgctgtacgctgccgcctggatctgcggggagttctcagagcatctgcaggaaccacaccacactttggaggccatgctgcggcccagagtcaccacgctgccaggccacatccaggccgtgtatgtgcagaacgtggtcaagctctacgcctccatcctgcagcagaaggagcaggccggggaggcagagggcgctcaggccgtcacccagctcatggtggaccggctgccccagtttgtgcagagcgcagacctggaggtgcaggagcgggcgtcctgcatcctgcagctggtcaagcacatccagaagcttcaggccaaggacgtgcctgtggcagaggaggtctttgtgcattgctgctatgaactttgacctgagtcgggggagaggatggcagagactttatt

SEQ ID NO: 379019 - DNA, 2513 bp, Homo sapiens
ccaagcctgagtgttaatttaactctatgttgtccgccgtgtaaacatccgaggtcatttgttgcgttgaattatctgaccatccttttttactgtgactcttcccattctctttggcaagaagtccccttctcgcccccaaaccagcaagggactcccccacctgggtctgtgccctgccccgcgctgggggccgagtccttgaatgtggcttcaggggctcctgtcctgacggttgcgtccgggggaggggaaggaagggccgctgtcgccaaggttttctctcccagaaccccgtgggccgccgcgatggccctcaagatggtgaagggcagcatcgaccgcatgttcgacaagaatctgcaggacttggtccgcggcatccgtaaccacaaggaggacgaggcaaaatacatatctcagtgcattgatgagatcaagcaggagctgaagcaggacaacatagcggtgaaggcgaacgcggtctgcaagctgacgtatttacagatgttgggatacgacatcagctgggccgccttcaacatcatagaagtgatgagtgcctccaagttcaccttcaagcgaattggctacctcgctgcttcccagagctttcacgaaggcaccgacgtcatcatgctgaccaccaatcagatccgtaaggacttgagcagccccagccagtacgacacaggtgttgcactgacgggtctgtcctgcttcgtcaccccagaccttgccagagacctggcaaatgacatcatgacactgatgtcacacaccaagccctacatcaggaagaaggctgtgctgatcatgtacaaggtgttcctgaagtaccccgagtcgctgcgccctgcctttccccggctgaaggagaagctggaggaccccgaccccggggttcagtcggctgccgtcaatgtcatctgcgagctggccagacgcaaccctaagaactacctgtccctggccccgctctttttcaagctgatgacgtcctccaccaacaactgggtcctcatcaagatcatcaagctgttcggtgctcttactcctttggaaccgcggctgggcaagaagctgatcgagcccctcaccaatctcatccacagcacgtctgccatgtctctcctctatgaatgtgtgaacaccgtgattgcagtgctcatctcgctgtcctccggcatgcccaaccacagcgccagcatccagctttgtgttcagaaattaaggatattgatcgaggactccgatcagaacttgaagtacctggggctgctggcaatgtccaagatcctgaagacccaccccaagtccgtgcagtcccacaaggacctcatcctgcagtgcctggacgacaaggacgagtccatccggctgcgggccctggacctgctctatgggatggtgtccaagaagaacctgatggagatcgtgaagaagctgatgacccacgtagacaaggcagagggtaccacctaccgtgacgagctgctcaccaagatcattgacatctgcagccagtccaactaccagtacatcaccaacttcgagtggtacatcagcatcctggtggagctgacccggctggagggcacacggcacggccacctcatcgccgcccaaatgctggacgtggccatccgcgtgaaggccatccgcaagttcgccgtgtcccagatgtctgcgctgcttgacagtgcacacctgctggccagcagcacccagcggaacgggatctgtgaggtgctgtacgctgccgcctggatctgcggggagttctcagagcatctgcaggaaccacaccacactttggaggccatgctgcggcccagagtcaccacgctgccaggccacatccaggccgtgtatgtgcagaacgtggtcaagctctacgcctccatcctgcagcagaaggagcaggccggggaggcagagggcgctcaggccgtcacccagctcatggtggaccggctgccccagtttgtgcagagcgcagacctggaggtgcaggagcgggcgtcctgcatcctgcagctggtcaagcacatccagaagcttcaggccaaggacgtgcctgtggcagaggaggtcagcgctctctttgctggggagctgaacccagtggcccccaaggcccagaagaaggttccagtccccgaaggcctggacctggacgcctggatcaatgagccactctcggacagcgagtcagaggacgagaggcccagggccgtcttccacgaggaggagcagcggcgtcccaagcaccggccgtcggaggcggacgaggaagagctggctcggcgccgagaggcccggaagcaggagcaggccaacaaccccttctacatcaagagctcgccatcgccacagaagcggtaccaggacaccccgggcgtggagcacattcccgtggtgcagattgacctctccgtccccttgaaggttccagggctgcctatgtcagatctttgtacgtaattaaaaatattgtggcaggattaata

SEQ ID NO: 379020 - DNA, 965 bp, Homo sapiens
ccaagcctgagtgttaatttaactctatgttgtccgccgtgtaaacatccgaggtcatttgttgcgttgaattatctgaccatccttttttactgtgactcttcccattctctttggcaagaagtccccttctcgcccccaaaccagcaagggactcccccacctgggtctgtgccctgccccgcgctgggggccgagtccttgaatgtggcttcaggggctcctgtcctgacggttgcgtccgggggaggggaaggaagggccgctgtcgccaaggttttctctcccagaaccccgtgggccgccgcgatggccctcaagatggtgaagggcagcatcgaccgcatgttcgacaagaatctgcaggacttggtccgcggcatccgtaaccacaaggaggacgaggcaaaatacatatctcagtgcattgatgagatcaagcaggagctgaagcaggacaacatagcggtgaaggcgaacgcggtctgcaagctgacgtatttacagatgttgggatacgacatcagctgggccgccttcaacatcatagaagtgatgagtgcctccaagttcaccttcaagcgaattggctacctcgctgcttcccagagctttcacgaaggcagggcctggaagcagcggacctgggctgttctgtgttgaaggagtgtgcccagtgcccttgggcaggacctgtgagagccacctcacaggcagagcccccaccaggcagggcaaggagactccgctcactccccacggccagcgtgggcacaggactgacccttcttcagagataatgacattttatcttctccttttgatgaaaactgtcactttagcatgtaatccattacagaatcccatgcagtgattccaggatttgaaattgtatgatgtgttacataagaatttatttgctatcgacattcccgtataaagagagagacatatcacgctgctgt

SEQ ID NO: 379021 - DNA, 459 bp, Homo sapiens
agtagagacggggtttcaccctgttagccaggatggtctcaatatcctgacctggtgatctgcctgcctcagcctcctaaagtgctgggattacaggcgtgagccaccgcacccggccattttttgtatttttagtagagacagggtttcaccgtgttgaccaggctggttttgaactcctgacctcaggtgatccacccaccttggcctcccaaaatgctgggatcacagacttgagccaccgtgcctagcccctgcacacacttttaaaatatccatcttttttccttacacagggtgagaactctgtctcagtcgacgggaagtgcagtgactccacgctactgagcaacttgttagaagagatgaaggcgacgctggccaagtgttgagagctgcctgcgagccccgcaccaccccgcggagcacgtacccagggaccgcagccctgacgtgtct

SEQ ID NO: 379022 - DNA, 457 bp, Homo sapiens
tcctccctctggcccgtttccccgtgggaggacgagacaaagggctcgtccagggtcccccatgctgctgctcgtctcgtaactatttcaaggagccgattcgccaagggttggtaggggaatgtagccagtacccgtaagcgccagttaaccaattgcagacattgagtctctttttagtgcctgttactaacttgtccctgtagcttttaaatgtcagagtcgtttgtcaaaagaagaaattaaaggccccaggggtacgtattgggtggtttgctgacagtgaatgagtctgttccagcaccgtgtgctgggagggagcgcttgatgccgcggctcaaaacctttctctctgctttggcttgtgagtgcaatttcctgtgcgtcccttaacagttacagatgttgggatacgacatcagctgggccgccttcaacatcatagaagtgatgagtg

SEQ ID NO: 379023 - DNA, 481 bp, Homo sapiens
ttacagatgttgggatacgacatcagctgggccgccttcaacatcatagaagtgatgagtgcctccaagttcaccttcaaggtgaggttctgggacggcaaggctggtggggtggggagtgattacaggtgtgaggcaccgtgactggccaatttttattattattattcttgagacagagtctagctctgttacccaaggtggattcagtggcctgtaatcccagcactttgggaggctgagacaggcggatcacctgaggttgggagttggagaccaggctggccaacatggtgaaaccccatctctactaaaaatacaaaatttagtggggcgtggtggcgcacgcggctataatcctagctacttgggaggctcagacaggagaattgcttgaacccgggaggtggaagttgcagtgagctgagatcgtgccattgcactccagcctgggcaacagagcgagactttgtctccaaga

SEQ ID NO: 379024 - DNA, 676 bp, Homo sapiens
cttgggcaggacctgtgagagccacctcacaggcagagcccccaccaggcagggcaaggagactccgctcactccccacggccagcgtgggcacaggactgacccttcttcagagataatgacattttatcttctccttttgatgaaaactgtcactttagcatgtaatccattacagaatcccatgcagtgattccaggatttgaaattgtatgatgtgttacataagaatttatttgctatcgacattcccgtataaagagagagacatatcacgctgctgtcatgattttgtgtcaagatgatccaataaagttgtaaaacaggcaatttccacatgggtcttctgcctggcctgggtcatgcagcgctgcaggactggagcctctgcacctcagctcacgggcccttgggagggggcctcggtccccagcaccatccaggcctggggctcgggcagtcacaggccagggagtcccccaccccgtggtggcctcggtccccagcatctccacccaaggccgtgcaggggagcaggtgcctgctttccctccccttccccaggagcccccggggcaggggcagatccagaattgagaaccgcggaagagcagccaccccacccctgggtgaatttgcctcctttacaccagccttacaccttgaagacgggagc

SEQ ID NO: 379025 - DNA, 4634 bp, Homo sapiens
ccttcaacatcatagaaggcggccagctgatgtcgtatcccaacatctgtaaatacatcagctgggccgccttcaacatcatagaagtgatgagtgcctccaagttcaccttcaagcgaattggctacctcgctgcttcccagagctttcacgaaggcaccgacgtcatcatgctgaccaccaatcagatccgtaaggacttgagcagccccagccagtacgacacaggtgttgcactgacgggtctgtcctgcttcgtcaccccagaccttgccagagacctggcaaatgacatcatgacactgatgtcacacaccaagccctacatcaggaagaaggctgtgctgatcatgtacaaggtgttcctgaagtaccccgagtcgctgcgccctgcctttccccggctgaaggagaagctggaggaccccgaccccggggttcagtcggctgccgtcaatgtcatctgcgagctggccagacgcaaccctaagaactacctgtccctggccccgctctttttcaagctgatgacgtcctccaccaacaactgggtcctcatcaagatcatcaagctgttcggtgctcttactcctttggaaccgcggctgggcaagaagctgatcgagcccctcaccaatctcatccacagcacgtctgccatgtctctcctctatgaatgtgtgaacaccgtgattgcagtgctcatctcgctgtcctccggcatgcccaaccacagcgccagcatccagctttgtgttcagaaattaaggatattgatcgaggactccgatcagaacttgaagtacctggggctgctggcaatgtccaagatcctgaagacccaccccaagtccgtgcagtcccacaaggacctcatcctgcagtgcctggacgacaaggacgagtccatccggctgcgggccctggacctgctctatgggatggtgtccaagaagaacctgatggagatcgtgaagaagctgatgacccacgtagacaaggcagagggtaccacctaccgtgacgagctgctcaccaagatcattgacatctgcagccagtccaactaccagtacatcaccaacttcgagtggtacatcagcatcctggtggagctgacccggctggagggcacacggcacggccacctcatcgccgcccaaatgctggacgtggccatccgcgtgaaggccatccgcaagttcgccgtgtcccagatgtctgcgctgcttgacagtgcacacctgctggccagcagcacccagcggaacgggatctgtgaggtgctgtacgctgccgcctggatctgcggggagttctcagagcatctgcaggaaccacaccacactttggaggccatgctgcggcccagagtcaccacgctgccaggccacatccaggccgtgtatgtgcagaacgtggtcaagctctacgcctccatcctgcagcagaaggagcaggccggggaggcagagggcgctcaggccgtcacccagctcatggtggaccggctgccccagtttgtgcagagcgcagacctggaggtgcaggagcgggcgtcctgcatcctgcagctggtcaagcacatccagaagcttcaggccaaggacgtgcctgtggcagaggaggtcagcgctctctttgctggggagctgaacccagtggcccccaaggcccagaagaaggttccagtccccgaaggcctggacctggacgcctggatcaatgagccactctcggacagcgagtcagaggacgagaggcccagggccgtcttccacgaggaggagcagcggcgtcccaagcaccggccgtcggaggcggacgaggaagagctggctcggcgccgagaggcccggaagcaggagcaggccaacaaccccttctacatcaagagctcgccatcgccacagaagcggtaccaggacaccccgggcgtggagcacattcccgtggtgcagattgacctctccgtccccttgaaggttccagggctgcctatgtcagatcagtatgtgaagctggaggaggagcggcggcaccggcagaagctggagaaggacaagaggaggaaaaagaggaaggagaaggagaagaagggcaagcgccgccacagctcgctgcccacggagagcgacgaggacatcgcccctgcccagcaggtggacatcgtcacagaggagatgcctgagaatgctctgcccagcgacgaggatgacaaagaccccaacgacccctacagggctctggatattgacctggataagcccttagccgacagcgagaaactgcctattcagaaacacagaaacaccgagacctcaaaatcccctgagaaggacgttcccatggtagaaaagaagagcaagaaacccaagaagaaagagaaaaaacacaaagagaaagagagagacaaggagaagaagaaggagaaggagaagaaggctgaggacctggacttctggctgtctaccaccccaccgcctgcccccgcccccgcccccgcccccgttccatccacggacgagtgtgaggacgccaagacggaggcgcagggcgaggaggacgatgccgaggggcaagaccaggacaagaaatctcccaagcctaagaagaagaagcacaggaaggagaaggaggagcggaccaaaggcaagaagaagtccaagaagcagcctccaggcagcgaggaggcagcgggggagccggtgcagaatggcgcgccagaggaggagcagctcccgcctgagtccagctactccctcctcgctgaaaattcctatgttaaaatgacctgtgacatccggggcagtctgcaggaggacagccaggtcactgtggccatcgtgctggagaacaggagcagcagcatcctcaagggcatggagctcagcgtgctggactcactcaatgccaggatggcccggccgcagggctcctccgtccacgatggcgtccccgtgcctttccagctgcccccaggcgtctccaacgaagcccagtatgtgttcaccatccagagcatcgtcatggcgcagaagctcaaggggaccctgtccttcattgccaagaatgacgagggtgcgacccacgagaagctggacttcaggctgcacttcagctgcagctcctacttgatcaccactccctgctacagtgacgcctttgctaagttgctggagtctggggacttgagcatgagctcaatcaaagtcgatggcattcggatgtccttccagaatcttctggcgaagatctgttttcaccaccatttttccgttgtggagcgagtggactcctgcgcctccatgtacagccgctccatccagggccaccatgtctgcctcctggtgaaaaagggtgagaactctgtctcagtcgacgggaagtgcagtgactccacgctactgagcaacttgttagaagagatgaaggcgacgctggccaagtgttgagagctgcctgcgagccccgcaccaccccgcggagcacgtacccagggaccgcagccctgacgtgtctcgcctctcctcagtcgtgtgtactgtacccaagcctgagtgttaatttaactctatgttgtccgccgtgtagacatccgaggtcatttgttgcgttgaattatctgaccatccttttttactgtgactcttcccattctctttggcaagaagtccccttctcgcccccaaaccagcaagggactcccccacctgggtctgtgccctgccccgcgctgggggccgagtccttgaatgtggcttcaggggctcctgtcctgggccagggcctgatgggcaccacgtgaggggcacttggtggacagggcggggctgacgtggcctcctctggggtcgcctgcttttgacccaaaggtcctgacggttgcgtccgggggaggggaaggaagggccgctgtcgccaaggttttctctcccagaacccacagtgggaaagcggtcttgccaggcgttgtccattgtcagtgtgctcgtgggctggtgactgggtcttgggatcccaggccacgcgccagccaggctgtgggcagggcggggccagggacgccaaagagaggttgcagtcagaaccgtggacggggtgggttgaggcctctctgccacccgtcttcctggtcagcagaagtgcatctcggcttgggtttggggtggtccgcatcccctgcttgccactatgcgcaccaaggtttccccacatccttcccagcacccttaggaaggcccaggcagggcctggaagcagcggacctgggctgttctgtgttgaaggagtgtgcccagtgcccttgggcaggacctgtgagagccacctcacaggcagagcccccaccaggcagggcaaggagactccgctcactccccacggccagcgtgggcacaggactgacccttcttcagagataatgacattttatcttctccttttgatgaaaactgtcactttagcatgtaatccattacagaatcccatgcagtgattccaggatttgaaattgtatgatgtgttacataagaatttatttgctatcgacattcccgtataaagagagagacatatcacgctgctgtcatgattttgtgtcaagatgatccaataaagttgtaaaacaggca

SEQ ID NO: 379026 - DNA, 5210 bp, Homo sapiens
ccaagcctgagtgttaatttaactctatgttgtccgccgtgtaaacatccgaggtcatttgttgcgttgaattatctgaccatccttttttactgtgactcttcccattctctttggcaagaagtccccttctcgcccccaaaccagcaagggactcccccacctgggtctgtgccctgccccgcgctgggggccgagtccttgaatgtggcttcaggggctcctgtcctgacggttgcgtccgggggaggggaaggaagggccgctgtcgccaaggttttctctcccagaaccccgtgggccgccgcgatggccctcaagatggtgaagggcagcatcgaccgcatgttcgacaagaatctgcaggacttggtccgcggcatccgtaaccacaaggaggacgaggcaaaatacatatctcagtgcattgatgagatcaagcaggagctgaagcaggacaacatagcggtgaaggcgaacgcggtctgcaagctgacgtatttacagatgttgggatacgacatcagctgggccgccttcaacatcatagaagtgatgagtgcctccaagttcaccttcaagcgaattggctacctcgctgcttcccagagctttcacgaaggcaccgacgtcatcatgctgaccaccaatcagatccgtaaggacttgagcagccccagccagtacgacacaggtgttgcactgacgggtctgtcctgcttcgtcaccccagaccttgccagagacctggcaaatgacatcatgacactgatgtcacacaccaagccctacatcaggaagaaggctgtgctgatcatgtacaaggtgttcctgaagtaccccgagtcgctgcgccctgcctttccccggctgaaggagaagctggaggaccccgaccccggggttcagtcggctgccgtcaatgtcatctgcgagctggccagacgcaaccctaagaactacctgtccctggccccgctctttttcaagctgatgacgtcctccaccaacaactgggtcctcatcaagatcatcaagctgttcggtgctcttactcctttggaaccgcggctgggcaagaagctgatcgagcccctcaccaatctcatccacagcacgtctgccatgtctctcctctatgaatgtgtgaacaccgtgattgcagtgctcatctcgctgtcctccggcatgcccaaccacagcgccagcatccagctttgtgttcagaaattaaggatattgatcgaggactccgatcagaacttgaagtacctggggctgctggcaatgtccaagatcctgaagacccaccccaagtccgtgcagtcccacaaggacctcatcctgcagtgcctggacgacaaggacgagtccatccggctgcgggccctggacctgctctatgggatggtgtccaagaagaacctgatggagatcgtgaagaagctgatgacccacgtagacaaggcagagggtaccacctaccgtgacgagctgctcaccaagatcattgacatctgcagccagtccaactaccagtacatcaccaacttcgagtggtacatcagcatcctggtggagctgacccggctggagggcacacggcacggccacctcatcgccgcccaaatgctggacgtggccatccgcgtgaaggccatccgcaagttcgccgtgtcccagatgtctgcgctgcttgacagtgcacacctgctggccagcagcacccagcggaacgggatctgtgaggtgctgtacgctgccgcctggatctgcggggagttctcagagcatctgcaggaaccacaccacactttggaggccatgctgcggcccagagtcaccacgctgccaggccacatccaggccgtgtatgtgcagaacgtggtcaagctctacgcctccatcctgcagcagaaggagcaggccggggaggcagagggcgctcaggccgtcacccagctcatggtggaccggctgccccagtttgtgcagagcgcagacctggaggtgcaggagcgggcgtcctgcatcctgcagctggtcaagcacatccagaagcttcaggccaaggacgtgcctgtggcagaggaggtcagcgctctctttgctggggagctgaacccagtggcccccaaggcccagaagaaggttccagtccccgaaggcctggacctggacgcctggatcaatgagccactctcggacagcgagtcagaggacgagaggcccagggccgtcttccacgaggaggagcagcggcgtcccaagcaccggccgtcggaggcggacgaggaagagctggctcggcgccgagaggcccggaagcaggagcaggccaacaaccccttctacatcaagagctcgccatcgccacagaagcggtaccaggacaccccgggcgtggagcacattcccgtggtgcagattgacctctccgtccccttgaaggttccagggctgcctatgtcagatcagtatgtgaagctggaggaggagcggcggcaccggcagaagctggagaaggacaagaggaggaaaaagaggaaggagaaggagaagaagggcaagcgccgccacagctcgctgcccacggagagcgacgaggacatcgcccctgcccagcaggtggacatcgtcacagaggagatgcctgagaatgctctgcccagcgacgaggatgacaaagaccccaacgacccctacagggctctggatattgacctggataagcccttagccgacagcgagaaactgcctattcagaaacacagaaacaccgagacctcaaaatcccctgagaaggacgttcccatggtagaaaagaagagcaagaaacccaagaagaaagagaaaaaacacaaagagaaagagagagacaaggagaagaagaaggagaaggagaagaaggctgaggacctggacttctggctgtctaccaccccaccgcctgcccccgcccccgcccccgcccccgttccatccacggacgagtgtgaggacgccaagacggaggcgcagggcgaggaggacgatgccgaggggcaagaccaggacaagaaatctcccaagcctaagaagaagaagcacaggaaggagaaggaggagcggaccaaaggcaagaagaagtccaagaagcagcctccaggcagcgaggaggcagcgggggagccggtgcagaatggcgcgccagaggaggagcagctcccgcctgagtccagctactccctcctcgctgaaaattcctatgttaaaatgacctgtgacatccggggcagtctgcaggaggacagccaggtcactgtggccatcgtgctggagaacaggagcagcagcatcctcaagggcatggagctcagcgtgctggactcactcaatgccaggatggcccggccgcagggctcctccgtccacgatggcgtccccgtgcctttccagctgcccccaggcgtctccaacgaagcccagtatgtgttcaccatccagagcatcgtcatggcgcagaagctcaaggggaccctgtccttcattgccaagaatgacgagggtgcgacccacgagaagctggacttcaggctgcacttcagctgcagctcctacttgatcaccactccctgctacagtgacgcctttgctaagttgctggagtctggggacttgagcatgagctcaatcaaagtcgatggcattcggatgtccttccagaatcttctggcgaagatctgttttcaccaccatttttccggcctcctgaagctgtggccaagggcagcccaagaaggtggcccctgctctgggggtggggctgcagccatgcaatgtccgggaagcctaacactgcccgctctgttgcagttgtggagcgagtggactcctgcgcctccatgtacagccgctccatccagggccaccatgtctgcctcctggtgaaaaagggtgagaactctgtctcagtcgacgggaagtgcagtgactccacgctactgagcaacttgttagaagagatgaaggcgacgctggccaagtgttgagagctgcctgcgagccccgcaccaccccgcggagcacgtacccagggaccgcagccctgacgtgtctcgcctctcctcagtcgtgtgtactgtacccaagcctgagtgttaatttaactctatgttgtccgccgtgtagacatccgaggtcatttgttgcgttgaattatctgaccatccttttttactgtgactcttcccattctctttggcaagaagtccccttctcgcccccaaaccagcaagggactcccccacctgggtctgtgccctgccccgcgctgggggccgagtccttgaatgtggcttcaggggctcctgtcctgggccagggcctgatgggcaccacgtgaggggcacttggtggacagggcggggctgacgtggcctcctctggggtcgcctgcttttgacccaaaggtcctgacggttgcgtccgggggaggggaaggaagggccgctgtcgccaaggttttctctcccagaacccacagtgggaaagcggtcttgccaggcgttgtccattgtcagtgtgctcgtgggctggtgactgggtcttgggatcccaggccacgcgccagccaggctgtgggcagggcggggccagggacgccaaagagaggttgcagtcagaaccgtggacggggtgggttgaggcctctctgccacccgtcttcctggtcagcagaagtgcatctcggcttgggtttggggtggtccgcatcccctgcttgccactatgcgcaccaaggtttccccacatccttcccagcacccttaggaaggcccaggcagggcctggaagcagcggacctgggctgttctgtgttgaaggagtgtgcccagtgcccttgggcaggacctgtgagagccacctcacaggcagagcccccaccaggcagggcaaggagactccgctcactccccacggccagcgtgggcacaggactgacccttcttcagagataatgacattttatcttctccttttgatgaaaactgtcactttagcatgtaatccattacagaatcccatgcagtgattccaggatttgaaattgtatgatgtgttacataagaatttatttgctatcgacattcccgtataaagagagagacatatcacgctgctgtcatgattttgtgtcaagatgatccaataaagttgtaaaacaggca

SEQ ID NO: 379027 - DNA, 5075 bp, Homo sapiens
ccaagcctgagtgttaatttaactctatgttgtccgccgtgtaaacatccgaggtcatttgttgcgttgaattatctgaccatccttttttactgtgactcttcccattctctttggcaagaagtccccttctcgcccccaaaccagcaagggactcccccacctgggtctgtgccctgccccgcgctgggggccgagtccttgaatgtggcttcaggggctcctgtcctgacggttgcgtccgggggaggggaaggaagggccgctgtcgccaaggttttctctcccagaaccccgtgggccgccgcgatggccctcaagatggtgaagggcagcatcgaccgcatgttcgacaagaatctgcaggacttggtccgcggcatccgtaaccacaaggaggacgaggcaaaatacatatctcagtgcattgatgagatcaagcaggagctgaagcaggacaacatagcggtgaaggcgaacgcggtctgcaagctgacgtatttacagatgttgggatacgacatcagctgggccgccttcaacatcatagaagtgatgagtgcctccaagttcaccttcaagcgaattggctacctcgctgcttcccagagctttcacgaaggcaccgacgtcatcatgctgaccaccaatcagatccgtaaggacttgagcagccccagccagtacgacacaggtgttgcactgacgggtctgtcctgcttcgtcaccccagaccttgccagagacctggcaaatgacatcatgacactgatgtcacacaccaagccctacatcaggaagaaggctgtgctgatcatgtacaaggtgttcctgaagtaccccgagtcgctgcgccctgcctttccccggctgaaggagaagctggaggaccccgaccccggggttcagtcggctgccgtcaatgtcatctgcgagctggccagacgcaaccctaagaactacctgtccctggccccgctctttttcaagctgatgacgtcctccaccaacaactgggtcctcatcaagatcatcaagctgttcggtgctcttactcctttggaaccgcggctgggcaagaagctgatcgagcccctcaccaatctcatccacagcacgtctgccatgtctctcctctatgaatgtgtgaacaccgtgattgcagtgctcatctcgctgtcctccggcatgcccaaccacagcgccagcatccagctttgtgttcagaaattaaggatattgatcgaggactccgatcagaacttgaagtacctggggctgctggcaatgtccaagatcctgaagacccaccccaagtccgtgcagtcccacaaggacctcatcctgcagtgcctggacgacaaggacgagtccatccggctgcgggccctggacctgctctatgggatggtgtccaagaagaacctgatggagatcgtgaagaagctgatgacccacgtagacaaggcagagggtaccacctaccgtgacgagctgctcaccaagatcattgacatctgcagccagtccaactaccagtacatcaccaacttcgagtggtacatcagcatcctggtggagctgacccggctggagggcacacggcacggccacctcatcgccgcccaaatgctggacgtggccatccgcgtgaaggccatccgcaagttcgccgtgtcccagatgtctgcgctgcttgacagtgcacacctgctggccagcagcacccagcggaacgggatctgtgaggtgctgtacgctgccgcctggatctgcggggagttctcagagcatctgcaggaaccacaccacactttggaggccatgctgcggcccagagtcaccacgctgccaggccacatccaggccgtgtatgtgcagaacgtggtcaagctctacgcctccatcctgcagcagaaggagcaggccggggaggcagagggcgctcaggccgtcacccagctcatggtggaccggctgccccagtttgtgcagagcgcagacctggaggtgcaggagcgggcgtcctgcatcctgcagctggtcaagcacatccagaagcttcaggccaaggacgtgcctgtggcagaggaggtcagcgctctctttgctggggagctgaacccagtggcccccaaggcccagaagaaggttccagtccccgaaggcctggacctggacgcctggatcaatgagccactctcggacagcgagtcagaggacgagaggcccagggccgtcttccacgaggaggagcagcggcgtcccaagcaccggccgtcggaggcggacgaggaagagctggctcggcgccgagaggcccggaagcaggagcaggccaacaaccccttctacatcaagagctcgccatcgccacagaagcggtaccaggacaccccgggcgtggagcacattcccgtggtgcagattgacctctccgtccccttgaaggttccagggctgcctatgtcagatcagtatgtgaagctggaggaggagcggcggcaccggcagaagctggagaaggacaagaggaggaaaaagaggaaggagaaggagaagaagggcaagcgccgccacagctcgctgcccacggagagcgacgaggacatcgcccctgcccagcaggtggacatcgtcacagaggagatgcctgagaatgctctgcccagcgacgaggatgacaaagaccccaacgacccctacagggctctggatattgacctggataagcccttagccgacagcgagaaactgcctattcagaaacacagaaacaccgagacctcaaaatcccctgagaaggacgttcccatggtagaaaagaagagcaagaaacccaagaagaaagagaaaaaacacaaagagaaagagagagacaaggagaagaagaaggagaaggagaagaaggctgaggacctggacttctggctgtctaccaccccaccgcctgcccccgcccccgcccccgcccccgttccatccacggacgagtgtgaggacgccaagacggaggcgcagggcgaggaggacgatgccgaggggcaagaccaggacaagaaatctcccaagcctaagaagaagaagcacaggaaggagaaggaggagcggaccaaaggcaagaagaagtccaagaagcagcctccaggcagcgaggaggcagcgggggagccggtgcagaatggcgcgccagaggaggagcagctcccgcctgagtccagctactccctcctcgctgaaaattcctatgttaaaatgacctgtgacatccggggcagtctgcaggaggacagccaggtcactgtggccatcgtgctggagaacaggagcagcagcatcctcaagggcatggagctcagcgtgctggactcactcaatgccaggatggcccggccgcagggctcctccgtccacgatggcgtccccgtgcctttccagctgcccccaggcgtctccaacgaagcccagtatgtgttcaccatccagagcatcgtcatggcgcagaagctcaaggggaccctgtccttcattgccaagaatgacgagggtgcgacccacgagaagctggacttcaggctgcacttcagctgcagctcctacttgatcaccactccctgctacagtgacgcctttgctaagttgctggagtctggggacttgagcatgagctcaatcaaagtcgatggcattcggatgtccttccagaatcttctggcgaagatctgttttcaccaccatttttccgttgtggagcgagtggactcctgcgcctccatgtacagccgctccatccagggccaccatgtctgcctcctggtgaaaaagggtgagaactctgtctcagtcgacgggaagtgcagtgactccacgctactgagcaacttgttagaagagatgaaggcgacgctggccaagtgttgagagctgcctgcgagccccgcaccaccccgcggagcacgtacccgcctctcctcagtcgtgtgtactgtacccaagcctgagtgttaatttaactctatgttgtccgccgtgtagacatccgaggtcatttgttgcgttgaattatctgaccatccttttttactgtgactcttcccattctctttggcaagaagtccccttctcgcccccaaaccagcaagggactcccccacctgggtctgtgccctgccccgcgctgggggccgagtccttgaatgtggcttcaggggctcctgtcctgggccagggcctgatgggcaccacgtgaggggcacttggtggacagggcggggctgacgtggcctcctctggggtcgcctgcttttgacccaaaggtcctgacggttgcgtccgggggaggggaaggaagggccgctgtcgccaaggttttctctcccagaacccacagtgggaaagcggtcttgccaggcgttgtccattgtcagtgtgctcgtgggctggtgactgggtcttgggatcccaggccacgcgccagccaggctgtgggcagggcggggccagggacgccaaagagaggttgcagtcagaaccgtggacggggtgggttgaggcctctctgccacccgtcttcctggtcagcagaagtgcatctcggcttgggtttggggtggtccgcatcccctgcttgccactatgcgcaccaaggtttccccacatccttcccagcacccttaggaaggcccaggcagggcctggaagcagcggacctgggctgttctgtgttgaaggagtgtgcccagtgcccttgggcaggacctgtgagagccacctcacaggcagagcccccaccaggcagggcaaggagactccgctcactccccacggccagcgtgggcacaggactgacccttcttcagagataatgacattttatcttctccttttgatgaaaactgtcactttagcatgtaatccattacagaatcccatgcagtgattccaggatttgaaattgtatgatgtgttacataagaatttatttgctatcgacattcccgtataaagagagagacatatcacgctgctgtcatgattttgtgtcaagatgatccaataaagttgtaaaacaggca

SEQ ID NO: 379028 - DNA, 5395 bp, Homo sapiens
ccaagcctgagtgttaatttaactctatgttgtccgccgtgtaaacatccgaggtcatttgttgcgttgaattatctgaccatccttttttactgtgactcttcccattctctttggcaagaagtccccttctcgcccccaaaccagcaagggactcccccacctgggtctgtgccctgccccgcgctgggggccgagtccttgaatgtggcttcaggggctcctgtcctgacggttgcgtccgggggaggggaaggaagggccgctgtcgccaaggttttctctcccagaaccccgtgggccgccgcgatggccctcaagatggtgaagggcagcatcgaccgcatgttcgacaagaatctgcaggacttggtccgcggcatccgtaaccacaaggaggacgaggcaaaatacatatctcagtgcattgatgagatcaagcaggagctgaagcaggacaacatagcggtgaaggcgaacgcggtctgcaagctgacgtatttacagatgttgggatacgacatcagctgggccgccttcaacatcatagaagtgatgagtgcctccaagttcaccttcaagcgaattggctacctcgctgcttcccagagctttcacgaaggcaccgacgtcatcatgctgaccaccaatcagatccgtaaggacttgagcagccccagccagtacgacacaggtgttgcactgacgggtctgtcctgcttcgtcaccccagaccttgccagagacctggcaaatgacatcatgacactgatgtcacacaccaagccctacatcaggaagaaggctgtgctgatcatgtacaaggtgttcctgaagtaccccgagtcgctgcgccctgcctttccccggctgaaggagaagctggaggaccccgaccccggggttcagtcggctgccgtcaatgtcatctgcgagctggccagacgcaaccctaagaactacctgtccctggccccgctctttttcaagctgatgacgtcctccaccaacaactgggtcctcatcaagatcatcaagctgttcggtgctcttactcctttggaaccgcggctgggcaagaagctgatcgagcccctcaccaatctcatccacagcacgtctgccatgtctctcctctatgaatgtgtgaacaccgtgattgcagtgctcatctcgctgtcctccggcatgcccaaccacagcgccagcatccagctttgtgttcagaaattaaggatattgatcgaggactccgatcagaacttgaagtacctggggctgctggcaatgtccaagatcctgaagacccaccccaagtccgtgcagtcccacaaggacctcatcctgcagtgcctggacgacaaggacgagtccatccggctgcgggccctggacctgctctatgggatggtgtccaagaagaacctgatggagatcgtgaagaagctgatgacccacgtagacaaggcagagggtaccacctaccgtgacgagctgctcaccaagatcattgacatctgcagccagtccaactaccagtacatcaccaacttcgagtggtacatcagcatcctggtggagctgacccggctggagggcacacggcacggccacctcatcgccgcccaaatgctggacgtggccatccgcgtgaaggccatccgcaagttcgccgtgtcccagatgtctgcgctgcttgacagtgcacacctgctggccagcagcacccagcggaacgggatctgtgaggtgctgtacgctgccgcctggatctgcggggagttctcagagcatctgcaggaaccacaccacactttggaggccatgctgcggcccagagtcaccacgctgccaggccacatccaggccgtgtatgtgcagaacgtggtcaagctctacgcctccatcctgcagcagaaggagcaggccggggaggcagagggcgctcaggccgtcacccagctcatggtggaccggctgccccagtttgtgcagagcgcagacctggaggtgcaggagcgggcgtcctgcatcctgcagctggtcaagcacatccagaagcttcaggccaaggacgtgcctgtggcagaggaggtcagcgctctctttgctggggagctgaacccagtggcccccaaggcccagaagaaggttccagtccccgaaggcctggacctggacgcctggatcaatgagccactctcggacagcgagtcagaggacgagaggcccagggccgtcttccacgaggaggagcagcggcgtcccaagcaccggccgtcggaggcggacgaggaagagctggctcggcgccgagaggcccggaagcaggagcaggccaacaaccccttctacatcaagagctcgccatcgccacagaagcggtaccaggacaccccgggcgtggagcacattcccgtggtgcagattgacctctccgtccccttgaaggttccagggctgcctatgtcagatcagtatgtgaagctggaggaggagcggcggcaccggcagaagctggagaaggacaagaggaggaaaaagaggaaggagaaggagaagaagggcaagcgccgccacagctcgctgcccacggagagcgacgaggacatcgcccctgcccagcaggtggacatcgtcacagaggagatgcctgagaatgctctgcccagcgacgaggatgacaaagaccccaacgacccctacagggctctggatattgacctggataagcccttagccgacagcgagaaactgcctattcagaaacacagaaacaccgagacctcaaaatcccctgagaaggacgttcccatggtagaaaagaagagcaagaaacccaagaagaaagagaaaaaacacaaagagaaagagagagacaaggagaagaagaaggagaaggagaagaaggctgaggacctggacttctggctgtctaccaccccaccgcctgcccccgcccccgcccccgcccccgttccatccacggacgagtgtgaggacgccaagacggaggcgcagggcgaggaggacgatgccgaggggcaagaccaggacaagaaatctcccaagcctaagaagaagaagcacaggaaggagaaggaggagcggaccaaaggcaagaagaagtccaagaagcagcctccaggcagcgaggaggcagcgggggagccggtgcagaatggcgcgccagaggaggagcagctcccgcctgagtccagctactccctcctcgctgaaaattcctatgttaaaatgacctgtgacatccggggcagtctgcaggaggacagccaggtcactgtggccatcgtgctggagaacaggagcagcagcatcctcaagggcatggagctcagcgtgctggactcactcaatgccaggatggcccggccgcagggctcctccgtccacgatggcgtccccgtgcctttccagctgcccccaggcgtctccaacgaagcccagtatgtgttcaccatccagagcatcgtcatggcgcagaagctcaaggggaccctgtccttcattgccaagaatgacgagggtgcgacccacgagaagctggacttcaggctgcacttcagctgcagctcctacttgatcaccactccctgctacagtgacgcctttgctaagttgctggagtctggggacttgagcatgagctcaatcaaagtcgatggcattcggatgtccttccagaatcttctggcgaagatctgttttcaccaccatttttccgttgtggagcgagtggactcctgcgcctccatgtacagccgctccatccagggccaccatgtctgcctcctggtgaaaaagggtgagaactctgtctcagtcgacgggaagtgcagtgactccacgctactgagcaacttgttagaagagatgaaggcgacgctggccaagtgttgagagctgcctgcgagccccgcaccaccccgcggagcacgtacccagggaccgcagccctgacgtgtctcgcctctcctcagtcgtgtgtactgtacccaagcctgagtgttaatttaactctatgttgtccgccgtgtagacatccgaggtcatttgttgcgttgaattatctgaccatccttttttactgtgactcttcccattctctttggcaagaagtccccttctcgcccccaaaccagcaagggactcccccacctgggtctgtgccctgccccgcgctgggggccgagtccttgaatgtggcttcaggggctcctgtcctgggccagggcctgatgggcaccacgtgaggggcacttggtggacagggcggggctgacgtggcctcctctggggtcgcctgcttttgacccaaaggtcctgacggttgcgtccgggggaggggaaggaagggccgctgtcgccaaggttttctctcccagaacccacagtgggaaagcggtcttgccaggcgttgtccattgtcagtgtgctcgtgggctggtgactgggtcttgggatcccaggccacgcgccagccaggctgtgggcagggcggggccagggacgccaaagagaggttgcagtcagaaccgtggacggggtgggttgaggcctctctgccacccgtcttcctggtcagcagaagtgcatctcggcttgggtttggggtggtccgcatcccctgcttgccactatgcgcaccaaggtttccccacatccttcccagcacccttaggaaggcccaggcagggcctggaagcagcggacctgggctgttctgtgttgaaggagtgtgcccagtgcccttgggcaggacctgtgagagccacctcacaggcagagcccccaccaggcagggcaaggagactccgctcactccccacggccagcgtgggcacaggactgacccttcttcagagataatgacattttatcttctccttttgatgaaaactgtcactttagcatgtaatccattacagaatcccatgcagtgattccaggatttgaaattgtatgatgtgttacataagaatttatttgctatcgacattcccgtataaagagagagacatatcacgctgctgtcatgattttgtgtcaagatgatccaataaagttgtaaaacaggcaaaaaaaaaaaaaaaaaaaaaaaaaaaaaaaaaaaaaccgggcagatcaatatgtgccgcgggcgcggcgcaacaagagcgcgttaaggaatgtgcgcagtgggggtcacagcgttggttccactgatccccggctttctgtgaccagggggggacaccccggggggcccccataaggggggcgcgaaatacgaaaacccgggtccctggattcttctcgtaagcaacacaacacacccagacatgactgaattcgatatcagacacacaacctcacgcacgccagacgccagccg

SEQ ID NO: 379029 - DNA, 5167 bp, Homo sapiens
ccaagcctgagtgttaatttaactctatgttgtccgccgtgtaaacatccgaggtcatttgttgcgttgaattatctgaccatccttttttactgtgactcttcccattctctttggcaagaagtccccttctcgcccccaaaccagcaagggactcccccacctgggtctgtgccctgccccgcgctgggggccgagtccttgaatgtggcttcaggggctcctgtcctgacggttgcgtccgggggaggggaaggaagggccgctgtcgccaaggttttctctcccagaaccccgtgggccgccgcgatggccctcaagatggtgaagggcagcatcgaccgcatgttcgacaagaatctgcaggacttggtccgcggcatccgtaaccacaaggaggacgaggcaaaatacatatctcagtgcattgatgagatcaagcaggagctgaagcaggacaacatagcggtgaaggcgaacgcggtctgcaagctgacgtatttacagatgttgggatacgacatcagctgggccgccttcaacatcatagaagtgatgagtgcctccaagttcaccttcaagcgaattggctacctcgctgcttcccagagctttcacgaaggcaccgacgtcatcatgctgaccaccaatcagatccgtaaggacttgagcagccccagccagtacgacacaggtgttgcactgacgggtctgtcctgcttcgtcaccccagaccttgccagagacctggcaaatgacatcatgacactgatgtcacacaccaagccctacatcaggaagaaggctgtgctgatcatgtacaaggtgttcctgaagtaccccgagtcgctgcgccctgcctttccccggctgaaggagaagctggaggaccccgaccccggggttcagtcggctgccgtcaatgtcatctgcgagctggccagacgcaaccctaagaactacctgtccctggccccgctctttttcaagctgatgacgtcctccaccaacaactgggtcctcatcaagatcatcaagctgttcggtgctcttactcctttggaaccgcggctgggcaagaagctgatcgagcccctcaccaatctcatccacagcacgtctgccatgtctctcctctatgaatgtgtgaacaccgtgattgcagtgctcatctcgctgtcctccggcatgcccaaccacagcgccagcatccagctttgtgttcagaaattaaggatattgatcgaggactccgatcagaacttgaagtacctggggctgctggcaatgtccaagatcctgaagacccaccccaagtccgtgcagtcccacaaggacctcatcctgcagtgcctggacgacaaggacgagtccatccggctgcgggccctggacctgctctatgggatggtgtccaagaagaacctgatggagatcgtgaagaagctgatgacccacgtagacaaggcagagggtaccacctaccgtgacgagctgctcaccaagatcattgacatctgcagccagtccaactaccagtacatcaccaacttcgagtggtacatcagcatcctggtggagctgacccggctggagggcacacggcacggccacctcatcgccgcccaaatgctggacgtggccatccgcgtgaaggccatccgcaagttcgccgtgtcccagatgtctgcgctgcttgacagtgcacacctgctggccagcagcacccagcggaacgggatctgtgaggtgctgtacgctgccgcctggatctgcggggagttctcagagcatctgcaggaaccacaccacactttggaggccatgctgcggcccagagtcaccacgctgccaggccacatccaggccgtgtatgtgcagaacgtggtcaagctctacgcctccatcctgcagcagaaggagcaggccggggaggcagagggcgctcaggccgtcacccagctcatggtggaccggctgccccagtttgtgcagagcgcagacctggaggtgcaggagcgggcgtcctgcatcctgcagctggtcaagcacatccagaagcttcaggccaaggacgtgcctgtggcagaggaggtcagcgctctctttgctggggagctgaacccagtggcccccaaggcccagaagaaggttccagtccccgaaggcctggacctggacgcctggatcaatgagccactctcggacagcgagtcagaggacgagaggcccagggccgtcttccacgaggaggagcagcggcgtcccaagcaccggccgtcggaggcggacgaggaagagctggctcggcgccgagaggcccggaagcaggagcaggccaacaaccccttctacatcaagagctcgccatcgccacagaagcggtaccaggacaccccgggcgtggagcacattcccgtggtgcagattgacctctccgtccccttgaaggttccagggctgcctatgtcagatcagtatgtgaagctggaggaggagcggcggcaccggcagaagctggagaaggacaagaggaggaaaaagaggaaggagaaggagaagaagggcaagcgccgccacagctcgctgcccacggagagcgacgaggacatcgcccctgcccagcaggtggacatcgtcacagaggagatgcctgagaatgctctgcccagcgacgaggatgacaaagaccccaacgacccctacagggctctggatattgacctggataagcccttagccgacagcgagaaactgcctattcagaaacacagaaacaccgagacctcaaaatcccctgagaaggacgttcccatggtagaaaagaagagcaagaaacccaagaagaaagagaaaaaacacaaagagaaagagagagacaaggagaagaagaaggagaaggagaagaaggctgaggacctggacttctggctgtctaccaccccaccgcctgcccccgcccccgcccccgcccccgttccatccacggacgagtgtgaggacgccaagacggaggcgcagggcgaggaggacgatgccgaggggcaagaccaggacaagaaatctcccaagcctaagaagaagaagcacaggaaggagaaggaggagcggaccaaaggcaagaagaagtccaagaagcagcctccaggcagcgaggaggcagcgggggagccggtgcagaatggcgcgccagaggaggagcagctcccgcctgagtccagctactccctcctcgctgaaaattcctatgttaaaatgacctgtgacatccggggcagtctgcaggaggacagccaggtcactgtggccatcgtgctggagaacaggagcagcagcatcctcaagggcatggagctcagcgtgctggactcactcaatgccaggatggcccggccgcagggctcctccgtccacgatggcgtccccgtgcctttccagctgcccccaggcgtctccaacgaagcccagtatgtgttcaccatccagagcatcgtcatggcgcagaagctcaaggggaccctgtccttcattgccaagaatgacgagggtgcgacccacgagaagctggacttcaggctgcacttcagctgcagctcctacttgatcaccactccctgctacagtgacgcctttgctaagttgctggagtctggggacttgagcatgagctcaatcaaagtcgatggcattcggatgtccttccagaatcttctggcgaagatctgttttcaccaccatttttccgttgtggagcgagtggactcctgcgcctccatgtacagccgctccatccagggccaccatgtctgcctcctggtgaaaaagggtgagaactctgtctcagtcgacgggaagtgcagtgactccacgctactgagcaacttgttagaagagatgaaggcgacgctggccaagtgttgagagctgcctgcgagccccgcaccaccccgcggagcacgtacccagggaccgcagccctgacgtgtctcgcctctcctcagtcgtgtgtactgtacccaagcctgagtgttaatttaactctatgttgtccgccgtgtagacatccgaggtcatttgttgcgttgaattatctgaccatccttttttactgtgactcttcccattctctttggcaagaagtccccttctcgcccccaaaccagcaagggactcccccacctgggtctgtgccctgccccgcgctgggggccgagtccttgaatgtggcttcaggggctcctgtcctgggccagggcctgatgggcaccacgtgaggggcacttggtggacagggcggggctgacgtggcctcctctggggtcgcctgcttttgacccaaaggtcctgacggttgcgtccgggggaggggaaggaagggccgctgtcgccaaggttttctctcccagaacccacagtgggaaagcggtcttgccaggcgttgtccattgtcagtgtgctcgtgggctggtgactgggtcttgggatcccaggccacgcgccagccaggctgtgggcagggcggggccagggacgccaaagagaggttgcagtcagaaccgtggacggggtgggttgaggcctctctgccacccgtcttcctggtcagcagaagtgcatctcggcttgggtttggggtggtccgcatcccctgcttgccactatgcgcaccaaggtttccccacatccttcccagcacccttaggaaggcccaggcagggcctggaagcagcggacctgggctgttctgtgttgaaggagtgtgcccagtgcccttgggcaggacctgtgagagccacctcacaggcagagcccccaccaggcagggcaaggagactccgctcactccccacggccagcgtgggcacaggactgacccttcttcagagataatgacattttatcttctccttttgatgaaaactgtcactttagcatgtaatccattacagaatcccatgcagtgattccaggatttgaaattgtatgatgtgttacataagaatttatttgctatcgacattcccgtataaagagagagacatatcacgctgctgtcatgattttgtgtcaagatgatccaataaagttgtaaaacaggcagctataaatatatattttttttgtaaaaacctccatgggggggcccggtcccaaattcgcccttatg

SEQ ID NO: 379030 - DNA, 2943 bp, Homo sapiens
tgtgcgtctactactaggatgcaggagccaatcgtgcgaacggggagtgcaacgtgcacatcgtccgagctgggctgccagcgactacgaggtgtgcattctgaacgatcgagcgcaggcggaggtaccggaaggtacaaacttggttctcatcgccgagaggcccggaagcaggagcaggccaacaaccccttctacatcaagagctcgccatcgccacagaagcggtaccaggacaccccgggcgtggagcacattcccgtggtgcagattgacctctccgtccccttgaaggttccagggctgcctatgtcagatcagtatgtgaagctggaggaggagcggcggcaccggcagaagctggagaaggacaagaggaggaaaaagaggaaggagaaggagaagaagggcaagcgccgccacagctcgctgcccacggagagcgacgaggacatcgcccctgcccagcaggtggacatcgtcacagaggagatgcctgagaatgctctgcccagcgacgaggatgacaaagaccccaacgacccctacagggctctggatattgacctggataagcccttagccgacagcgagaaactgcctattcagaaacacagaaacaccgagacctcaaaatcccctgagaaggacgttcccatggtagaaaagaagagcaagaaacccaagaagaaagagaaaaaacacaaagagaaagagagagacaaggagaagaagaaggagaaggagaagaaggctgaggacctggacttctggctgtctaccaccccaccgcctgcccccgcccccgcccccgcccccgttccatccacggacgagtgtgaggacgccaagacggaggcgcagggcgaggaggacgatgccgaggggcaagaccaggacaagaaatctcccaagcctaagaagaagaagcacaggaaggagaaggaggagcggaccaaaggcaagaagaagtccaagaagcagcctccaggcagcgaggaggcagcgggggagccggtgcagaatggcgcgccagaggaggagcagctcccgcctgagtccagctactccctcctcgctgaaaattcctatgttaaaatgacctgtgacatccggggcagtctgcaggaggacagccaggtcactgtggccatcgtgctggagaacaggagcagcagcatcctcaagggcatggagctcagcgtgctggactcactcaatgccaggatggcccggccgcagggctcctccgtccacgatggcgtccccgtgcctttccagctgcccccaggcgtctccaacgaagcccagtatgtgttcaccatccagagcatcgtcatggcgcagaagctcaaggggaccctgtccttcattgccaagaatgacgagggtgcgacccacgagaagctggacttcaggctgcacttcagctgcagctcctacttgatcaccactccctgctacagtgacgcctttgctaagttgctggagtctggggacttgagcatgagctcaatcaaagtcgatggcattcggatgtccttccagaatcttctggcgaagatctgttttcaccaccatttttccgttgtggagcgagtggactcctgcgcctccatgtacagccgctccatccagggccaccatgtctgcctcctggtgaaaaagggtgagaactctgtctcagtcgacgggaagtgcagtgactccacgctactgagcaacttgttagaagagatgaaggcgacgctggccaagtgttgagagctgcctgcgagccccgcaccaccccgcggagcacgtacccagggaccgcagccctgacgtgtctcgcctctcctcagtcgtgtgtactgtacccaagcctgagtgttaatttaactctatgttgtccgccgtgtagacatccgaggtcatttgttgcgttgaattatctgaccatccttttttactgtgactcttcccattctctttggcaagaagtccccttctcgcccccaaaccagcaagggactcccccacctgggtctgtgccctgccccgcgctgggggccgagtccttgaatgtggcttcaggggctcctgtcctgggccagggcctgatgggcaccacgtgaggggcacttggtggacagggcggggctgacgtggcctcctctggggtcgcctgcttttgacccaaaggtcctgacggttgcgtccgggggaggggaaggaagggccgctgtcgccaaggttttctctcccagaacccacagtgggaaagcggtcttgccaggcgttgtccattgtcagtgtgctcgtgggctggtgactgggtcttgggatcccaggccacgcgccagccaggctgtgggcagggcggggccagggacgccaaagagaggttgcagtcagaaccgtggacggggtgggttgaggcctctctgccacccgtcttcctggtcagcagaagtgcatctcggcttgggtttggggtggtccgcatcccctgcttgccactatgcgcaccaaggtttccccacatccttcccagcacccttaggaaggcccaggcagggcctggaagcagcggacctgggctgttctgtgttgaaggagtgtgcccagtgcccttgggcaggacctgtgagagccacctcacaggcagagcccccaccaggcagggcaaggagactccgctcactccccacggccagcgtgggcacaggactgacccttcttcagagataatgacattttatcttctccttttgatgaaaactgtcactttagcatgtaatccattacagaatcccatgcagtgattccaggatttgaaattgtatgatgtgttacataagaatttatttgctatcgacattcccgtataaagagagagacatatcacgctgctgtcatgattttgtgtcaagatgatccaataaagttgtaaaacaggca

SEQ ID NO: 379031 - DNA, 2642 bp, Homo sapiens
ttctcaccaggtggaggccaaaaaggaagttggaatgggagcggcggcaccggcagaagctggagaaggacaagaggaggaaaaagaggaaggagaaggagaagaagggcaagcgccgccacagctcgctgcccacggagagcgacgaggacatcgcccctgcccagcaggtggacatcgtcacagaggagatgcctgagaatgctctgcccagcgacgaggatgacaaagaccccaacgacccctacagggctctggatattgacctggataagcccttagccgacagcgagaaactgcctattcagaaacacagaaacaccgagacctcaaaatcccctgagaaggacgttcccatggtagaaaagaagagcaagaaacccaagaagaaagagaaaaaacacaaagagaaagagagagacaaggagaagaagaaggagaaggagaagaaggctgaggacctggacttctggctgtctaccaccccaccgcctgcccccgcccccgcccccgcccccgttccatccacggacgagtgtgaggacgccaagacggaggcgcagggcgaggaggacgatgccgaggggcaagaccaggacaagaaatctcccaagcctaagaagaagaagcacaggaaggagaaggaggagcggaccaaaggcaagaagaagtccaagaagcagcctccaggcagcgaggaggcagcgggggagccggtgcagaatggcgcgccagaggaggagcagctcccgcctgagtccagctactccctcctcgctgaaaattcctatgttaaaatgacctgtgacatccggggcagtctgcaggaggacagccaggtcactgtggccatcgtgctggagaacaggagcagcagcatcctcaagggcatggagctcagcgtgctggactcactcaatgccaggatggcccggccgcagggctcctccgtccacgatggcgtccccgtgcctttccagctgcccccaggcgtctccaacgaagcccagtatgtgttcaccatccagagcatcgtcatggcgcagaagctcaaggggaccctgtccttcattgccaagaatgacgagggtgcgacccacgagaagctggacttcaggctgcacttcagctgcagctcctacttgatcaccactccctgctacagtgacgcctttgctaagttgctggagtctggggacttgagcatgagctcaatcaaagtcgatggcattcggatgtccttccagaatcttctggcgaagatctgttttcaccaccatttttccgttgtggagcgagtggactcctgcgcctccatgtacagccgctccatccagggccaccatgtctgcctcctggtgaaaaagggtgagaactctgtctcagtcgacgggaagtgcagtgactccacgctactgagcaacttgttagaagagatgaaggcgacgctggccaagtgttgagagctgcctgcgagccccgcaccaccccgcggagcacgtacccagggaccgcagccctgacgtgtctcgcctctcctcagtcgtgtgtactgtacccaagcctgagtgttaatttaactctatgttgtccgccgtgtagacatccgaggtcatttgttgcgttgaattatctgaccatccttttttactgtgactcttcccattctctttggcaagaagtccccttctcgcccccaaaccagcaagggactcccccacctgggtctgtgccctgccccgcgctgggggccgagtccttgaatgtggcttcaggggctcctgtcctgggccagggcctgatgggcaccacgtgaggggcacttggtggacagggcggggctgacgtggcctcctctggggtcgcctgcttttgacccaaaggtcctgacggttgcgtccgggggaggggaaggaagggccgctgtcgccaaggttttctctcccagaacccacagtgggaaagcggtcttgccaggcgttgtccattgtcagtgtgctcgtgggctggtgactgggtcttgggatcccaggccacgcgccagccaggctgtgggcagggcggggccagggacgccaaagagaggttgcagtcagaaccgtggacggggtgggttgaggcctctctgccacccgtcttcctggtcagcagaagtgcatctcggcttgggtttggggtggtccgcatcccctgcttgccactatgcgcaccaaggtttccccacatccttcccagcacccttaggaaggcccaggcagggcctggaagcagcggacctgggctgttctgtgttgaaggagtgtgcccagtgcccttgggcaggacctgtgagagccacctcacaggcagagcccccaccaggcagggcaaggagactccgctcactccccacggccagcgtgggcacaggactgacccttcttcagagataatgacattttatcttctccttttgatgaaaactgtcactttagcatgtaatccattacagaatcccatgcagtgattccaggatttgaaattgtatgatgtgttacataagaatttatttgctatcgacattcccgtataaagagagagacatatcacgctgctgtcatgattttgtgtcaagatgatccaataaagttgtaaaacaggca

SEQ ID NO: 379032 - DNA, 4580 bp, Homo sapiens
ccaagcctgagtgttaatttaactctatgttgtccgccgtgtaaacatccgaggtcatttgttgcgttgaattatctgaccatccttttttactgtgactcttcccattctctttggcaagaagtccccttctcgcccccaaaccagcaagggactcccccacctgggtctgtgccctgccccgcgctgggggccgagtccttgaatgtggcttcaggggctcctgtcctgacggttgcgtccgggggaggggaaggaagggccgctgtcgccaaggttttctctcccagaaccccgtgggccgccgcgatggccctcaagatggtgaagggcagcatcgaccgcatgttcgacaagaatctgcaggacttggtccgcggcatccgtaaccacaaggaggacgaggcaaaatacatatctcagtgcattgatgagatcaagcaggagctgaagcaggacaacatagcggtgaaggcgaacgcggtctgcaagctgacgtatttacagatgttgggatacgacatcagctgggccgccttcaacatcatagaagtgatgagtgcctccaagttcaccttcaagcgaattggctacctcgctgcttcccagagctttcacgaaggcaccgacgtcatcatgctgaccaccaatcagatccgtaaggacttgagcagccccagccagtacgacacaggtgttgcactgacgggtctgtcctgcttcgtcaccccagaccttgccagagacctggcaaatgacatcatgacactgatgtcacacaccaagccctacatcaggaagaaggctgtgctgatcatgtacaaggtgttcctgaagtaccccgagtcgctgcgccctgcctttccccggctgaaggagaagctggaggaccccgaccccggggttcagtcggctgccgtcaatgtcatctgcgagctggccagacgcaaccctaagaactacctgtccctggccccgctctttttcaagctgatgacgtcctccaccaacaactgggtcctcatcaagatcatcaagctgttcggtgctcttactcctttggaaccgcggctgggcaagaagctgatcgagcccctcaccaatctcatccacagcacgtctgccatgtctctcctctatgaatgtgtgaacaccgtgattgcagtgctcatctcgctgtcctccggcatgcccaaccacagcgccagcatccagctttgtgttcagaaattaaggatattgatcgaggactccgatcagaacttgaagtacctggggctgctggcaatgtccaagatcctgaagacccaccccaagtccgtgcagtcccacaaggacctcatcctgcagtgcctggacgacaaggacgagtccatccggctgcgggccctggacctgctctatgggatggtgtccaagaagaacctgatggagatcgtgaagaagctgatgacccacgtagacaaggcagagggtaccacctaccgtgacgagctgctcaccaagatcattgacatctgcagccagtccaactaccagtacatcaccaacttcgagtggtacatcagcatcctggtggagctgacccggctggagggcacacggcacggccacctcatcgccgcccaaatgctggacgtggccatccgcgtgaaggccatccgcaagttcgccgtgtcccagatgtctgcgctgcttgacagtgcacacctgctggccagcagcacccagcggaacgggatctgtgaggtgctgtacgctgccgcctggatctgcggggagttctcagagcatctgcaggaaccacaccacactttggaggccatgctgcggcccagagtcaccacgctgccaggccacatccaggccgtgtatgtgcagaacgtggtcaagctctacgcctccatcctgcagcagaaggagcaggccggggaggcagagggcgctcaggccgtcacccagctcatggtggaccggctgccccagtttgtgcagagcgcagacctggaggtgcaggagcgggcgtcctgcatcctgcagctggtcaagcacatccagaagcttcaggccaaggacgtgcctgtggcagaggaggtcagcgctctctttgctggggagctgaacccagtggcccccaaggcccagaagaaggttccagtccccgaaggcctggacctggacgcctggatcaatgagccactctcggacagcgagtcagaggacgagaggcccagggccgtcttccacgaggaggagcagcggcgtcccaagcaccggccgtcggaggcggacgaggaagagctggctcggcgccgagaggcccggaagcaggagcaggccaacaaccccttctacatcaagagctcgccatcgccacagaagcggtaccaggacaccccgggcgtggagcacattcccgtggtgcagattgacctctccgtccccttgaaggttccagggctgcctatgtcagatcagtatgtgaagctggaggaggagcggcggcaccggcagaagctggagaaggacaagaggaggaaaaagaggaaggagaaggagaagaagggcaagcgccgccacagctcgctgcccacggagagcgacgaggacatcgcccctgcccagcaggtggacatcgtcacagaggagatgcctgagaatgctctgcccagcgacgaggatgacaaagaccccaacgacccctacagggctctggatattgacctggataagcccttagccgacagcgagaaactgcctattcagaaacacagaaacaccgagacctcaaaatcccctgagaaggacgttcccatggtagaaaagaagagcaagaaacccaagaagaaagagaaaaaacacaaagagaaagagagagacaaggagaagaagaaggagaaggagaagaaggctgaggacctggacttctggctgtctaccaccccaccgcctgcccccgcccccgcccccgcccccgttccatccacggacgagtgtgaggacgccaagacggaggcgcagggcgaggaggacgatgccgaggggcaagaccaggacaagaaatctcccaagcctaagaagaagaagcacaggaaggagaaggaggagcggaccaaaggcaagaagaagtccaagaagcagcctccaggcagcgaggaggcagcgggggagccggtgcagaatggcgcgccagaggaggagcagctcccgcctgagtccagctactccctcctcgctgaaaattcctatgttaaaatgacctgtgacatccggggcagtctgcaggaggacagccaggtcactgtggccatcgtgctggagaacaggagcagcagcatcctcaagggcatggagctcagcgtgctggactcactcaatgccaggatggcccggccgcagggctcctccgtccacgatggcgtccccgtgcctttccagctgcccccaggcgtctccaacgaagcccagtatgtgttcaccatccagagcatcgtcatggcgcagaagctcaaggggaccctgtccttcattgccaagaatgacgagggtgcgacccacgagaagctggacttcaggctgcacttcagctgcagctcctacttgatcaccactccctgctacagtgacgcctttgctaagttgctggagtctggggacttgagcatgagctcaatcaaagtcgatggcattcggatgtccttccagaatcttctggcgaagatctgttttcaccaccatttttccgttgtggagcgagtggactcctgcgcctccatgtacagccgctccatccagggccaccatgtctgcctcctggtgaaaaagggtgagaactctgtctcagtcgacgggaagtgcagtgactccacgctactgagcaacttgttagaagagatgaaggcgacgctggccaagtgttgagagctgcctgcgagccccgcaccaccccgcggagcacgtacccagggaccgcagccctgacgtgtctcgcctctcctcagtcgtgtgtactgtacccaagcctgagtgttaatttaactctatgttgtccgccgtgtagacatccgaggtcatttgttgcgttgaattatctgaccatccttttttactgtgactcttcccattctctttggcaagaagtccccttctcgcccccaaaccagcaagggactcccccacctgggtctgtgccctgccccgcgctgggggccgagtccttgaatgtggcttcaggggctcctgtccagtgcccttgggcaggacctgtgagagccacctcacaggcagagcccccaccaggcagggcaaggagactccgctcactccccacggccagcgtgggcacaggactgacccttcttcagagataatgacattttatcttctccttttgatgaaaactgtcactttagcatgtaatccattacagaatcccatgcagtgattccaggatttgaaattgtatgatgtgttacataagaatttatttgctatcgacattcccgtataaagagagagacatatcacgctgctgtcatgattttgtgtcaagatgatccaataaagttgtaaaacaggca

SEQ ID NO: 379033 - DNA, 2504 bp, Homo sapiens
ccaagcctgagtgttaatttaactctatgttgtccgccgtgtaaacatccgaggtcatttgttgcgttgaattatctgaccatccttttttactgtgactcttcccattctctttggcaagaagtccccttctcgcccccaaaccagcaagggactcccccacctgggtctgtgccctgccccgcgctgggggccgagtccttgaatgtggcttcaggggctcctgtcctgacggttgcgtccgggggaggggaaggaagggccgctgtcgccaaggttttctctcccagaaccccgtgggccgccgcgatggccctcaagatggtgaagggcagcatcgaccgcatgttcgacaagaatctgcaggacttggtccgcggcatccgtaaccacaaggaggacgaggcaaaatacatatctcagtgcattgatgagatcaagcaggagctgaagcaggacaacatagcggtgaaggcgaacgcggtctgcaagctgacgtatttacagatgttgggatacgacatcagctgggccgccttcaacatcatagaagtgatgagtgcctccaagttcaccttcaagcgaattggctacctcgctgcttcccagagctttcacgaaggcaccgacgtcatcatgctgaccaccaatcagatccgtaaggacttgagcagccccagccagtacgacacaggtgttgcactgacgggtctgtcctgcttcgtcaccccagaccttgccagagacctggcaaatgacatcatgacactgatgtcacacaccaagccctacatcaggaagaaggctgtgctgatcatgtacaaggtgttcctgaagtaccccgagtcgctgcgccctgcctttccccggctgaaggagaagctggaggaccccgaccccggggttcagtcggctgccgtcaatgtcatctgcgagctggccagacgcaaccctaagaactacctgtccctggccccgctctttttcaagctgatgacgtcctccaccaacaactgggtcctcatcaagatcatcaagctgttcggtgctcttactcctttggaaccgcggctgggcaagaagctgatcgagcccctcaccaatctcatccacagcacgtctgccatgtctctcctctatgaatgtgtgaacaccgtgattgcagtgctcatctcgctgtcctccggcatgcccaaccacagcgccagcatccagctttgtgttcagaaattaaggatattgatcgaggactccgatcagaacttgaagtacctggggctgctggcaatgtccaagatcctgaagacccaccccaagtccgtgcagtcccacaaggacctcatcctgcagtgcctggacgacaaggacagggaccgcagccctgacgtgtctcgcctctcctcagtcgtgtgtactgtacccaagcctgagtgttaatttaactctatgttgtccgccgtgtagacatccgaggtcatttgttgcgttgaattatctgaccatccttttttactgtgactcttcccattctctttggcaagaagtccccttctcgcccccaaaccagcaagggactcccccacctgggtctgtgccctgccccgcgctgggggccgagtccttgaatgtggcttcaggggctcctgtcctgggccagggcctgatgggcaccacgtgaggggcacttggtggacagggcggggctgacgtggcctcctctggggtcgcctgcttttgacccaaaggtcctgacggttgcgtccgggggaggggaaggaagggccgctgtcgccaaggttttctctcccagaacccacagtgggaaagcggtcttgccaggcgttgtccattgtcagtgtgctcgtgggctggtgactgggtcttgggatcccaggccacgcgccagccaggctgtgggcagggcggggccagggacgccaaagagaggttgcagtcagaaccgtggacggggtgggttgaggcctctctgccacccgtcttcctggtcagcagaagtgcatctcggcttgggtttggggtggtccgcatcccctgcttgccactatgcgcaccaaggtttccccacatccttcccagcacccttaggaaggcccaggcagggcctggaagcagcggacctgggctgttctgtgttgaaggagtgtgcccagtgcccttgggcaggacctgtgagagccacctcacaggcagagcccccaccaggcagggcaaggagactccgctcactccccacggccagcgtgggcacaggactgacccttcttcagagataatgacattttatcttctccttttgatgaaaactgtcactttagcatgtaatccattacagaatcccatgcagtgattccaggatttgaaattgtatgatgtgttacataagaatttatttgctatcgacattcccgtataaagagagagacatatcacgctgctgtcatgattttgtgtcaagatgatccaataaagttgtaaaacaggca

SEQ ID NO: 379034 - DNA, 3596 bp, Homo sapiens
ccaagcctgagtgttaatttaactctatgttgtccgccgtgtaaacatccgaggtcatttgttgcgttgaattatctgaccatccttttttactgtgactcttcccattctctttggcaagaagtccccttctcgcccccaaaccagcaagggactcccccacctgggtctgtgccctgccccgcgctgggggccgagtccttgaatgtggcttcaggggctcctgtcctgacggttgcgtccgggggaggggaaggaagggccgctgtcgccaaggttttctctcccagaaccccgtgggccgccgcgatggccctcaagatggtgaagggcagcatcgaccgcatgttcgacaagaatctgcaggacttggtccgcggcatccgtaaccacaaggaggacgaggcaaaatacatatctcagtgcattgatgagatcaagcaggagctgaagcaggacaacatagcggtgaaggcgaacgcggtctgcaagctgacgtatttacagatgttgggatacgacatcagctgggccgccttcaacatcatagaagtgatgagtgcctccaagttcaccttcaagcgaattggctacctcgctgcttcccagagctttcacgaaggcaccgacgtcatcatgctgaccaccaatcagatccgtaaggacttgagcagccccagccagtacgacacaggtgttgcactgacgggtctgtcctgcttcgtcaccccagaccttgccagagacctggcaaatgacatcatgacactgatgtcacacaccaagccctacatcaggaagaaggctgtgctgatcatgtacaaggtgttcctgaagtaccccgagtcgctgcgccctgcctttccccggctgaaggagaagctggaggaccccgaccccggggttcagtcggctgccgtcaatgtcatctgcgagctggccagacgcaaccctaagaactacctgtccctggccccgctctttttcaagctgatgacgtcctccaccaacaactgggtcctcatcaagatcatcaagctgttcggtgctcttactcctttggaaccgcggctgggcaagaagctgatcgagcccctcaccaatctcatccacagcacgtctgccatgtctctcctctatgaatgtgtgaacaccgtgattgcagtgctcatctcgctgtcctccggcatgcccaaccacagcgccagcatccagctttgtgttcagaaattaaggatattgatcgaggactccgatcagaacttgaagtacctggggctgctggcaatgtccaagatcctgaagacccaccccaagtccgtgcagtcccacaaggacctcatcctgcagtgcctggacgacaaggacgagtccatccggctgcgggccctggacctgctctatgggatggtgtccaagaagaacctgatggagatcgtgaagaagctgatgacccacgtagacaaggcagagggtaccacctaccgtgacgagctgctcaccaagatcattgacatctgcagccagtccaactaccagtacatcaccaacttcgagtggtacatcagcatcctggtggagctgacccggctggagggcacacggcacggccacctcatcgccgcccaaatgctggacgtggccatccgcgtgaaggccatccgcaagttcgccgtgtcccagatgtctgcgctgcttgacagtgcacacctgctggccagcagcacccagcggaacgggatctgtgaggtgctgtacgctgccgcctggatctgcggggagttctcagagcatctgcaggaaccacaccacactttggaggccatgctgcggcccagagtcaccacgctgccaggccacatccaggccgtgtatgtgcagaacgtggtcaagctctacgcctccatcctgcagcagaaggagcaggccggggaggcagagggcgctcaggccgtcacccagctcatggtggaccggctgccccagtttgtgcagagcgcagacctggaggtgcaggagcgggcgtcctgcatcctgcagctggtcaagcacatccagaagcttcaggccaaggacgtgcctgtggcagaggaggtcagcgctctctttgctggggagctgaacccagtggcccccaaggcccagaagaaggttccagtccccgaaggcctggacctggacgcctggatcaatgagccactctcggacagcgagtcagaggacgagaggcccagggccgtcttccacgaggaggagcagcggcgtcccaagcaccggccgtcggaggcggacgaggaagagctggctcggcgccgagaggcccggaagcaggagcaggccaacaaccccttctacatcaagagctcgccatcgccacagaagcggtaccaggacaccccgggcgtggagcacattcccgtggtgcagattgacctctccgtccccttgaaggttccagggctgcctatgtcagatcagtatgtgaagctggaggaggagcggcggcaccggcagaagctggagaaggacaagaggaggaaaaagaggaaggagaaggagaagaagggcaagcgccgccacagctcgctgcccacggagagcgacgaggacatcgcccctgcccagcaggtggacatcgtcacagaggagatgcctgagaatgctctgcccagcgacgaggatgacaaagaccccaacgacccctacagggctctggatattgacctggataagcccttagccgacagcgagaaactgcctattcagaaacacagaaacaccgagacctcaaaatcccctgagaaggacgttcccatggtagaaaagaagagcaagaaacccaagaagaaagagaaaaaacacaaagagaaagagagagacaaggagaagaagaaggagaaggagaagaagctgaggacctggacttctggctgtctaccaccctgggattcctgaggcccgatggacaagggacctcaaagatggaaaagagatcgacgcgctcgacaagagcactgagagagagcacggcgtaaggaacgaaggctctcacggcagcaggagaccgctgaatgacctggacgtctctgaacttgggcaacaccggcgctagcgacaatgacgacatcatagagtggaaacccaagccacacaacaaagaaccgaacggatgggggacacacacgggatcggggaatatgcctacacggcagccctcatgccgcagacgcgagcagccaaccacacaagaaagggaaagacaaaaacgagaggccaactagaaacgtcaggcacaagcgcgcccggaacagaggagaccacacacacacatgcccgagataggcgagaatagaaagcaccaagatcccgagaaaacgcaagccagtcggaggaaggagggcagcacgacaaggcagacgcgcgggcaactcacacgttacatcatccgccaagagagacaagggtggcgcaagctccatgatagagcacgaacgaccgcacgaagagtacgcagcaacaccagggacagtagccgccgagtacgccataagagtggaggcaggacagagatatagtcgagaaaccagcgagggcga

SEQ ID NO: 379035 - DNA, 2800 bp, Homo sapiens
ccaagcctgagtgttaatttaactctatgttgtccgccgtgtaaacatccgaggtcatttgttgcgttgaattatctgaccatccttttttactgtgactcttcccattctctttggcaagaagtccccttctcgcccccaaaccagcaagggactcccccacctgggtctgtgccctgccccgcgctgggggccgagtccttgaatgtggcttcaggggctcctgtcctgacggttgcgtccgggggaggggaaggaagggccgctgtcgccaaggttttctctcccagaaccccgtgggccgccgcgatggccctcaagatggtgaagggcagcatcgaccgcatgttcgacaagaatctgcaggacttggtccgcggcatccgtaaccacaaggaggacgaggcaaaatacatatctcagtgcattgatgagatcaagcaggagctgaagcaggacaacatagcggtgaaggcgaacgcggtctgcaagctgacgtatttacagatgttgggatacgacatcagctgggccgccttcaacatcatagaagtgatgagtgcctccaagttcaccttcaagcgaattggctacctcgctgcttcccagagctttcacgaaggcaccgacgtcatcatgctgaccaccaatcagatccgtaaggacttgagcagccccagccagtacgacacaggtgttgcactgacgggtctgtcctgcttcgtcaccccagaccttgccagagacctggcaaatgacatcatgacactgatgtcacacaccaagccctacatcaggaagaaggctgtgctgatcatgtacaaggtgttcctgaagtaccccgagtcgctgcgccctgcctttccccggctgaaggagaagctggaggaccccgaccccggggttcagtcggctgccgtcaatgtcatctgcgagctggccagacgcaaccctaagaactacctgtccctggccccgctctttttcaagctgatgacgtcctccaccaacaactgggtcctcatcaagatcatcaagctgttcggtgctcttactcctttggaaccgcggctgggcaagaagctgatcgagcccctcaccaatctcatccacagcacgtctgccatgtctctcctctatgaatgtgtgaacaccgtgattgcagtgctcatctcgctgtcctccggcatgcccaaccacagcgccagcatccagctttgtgttcagaaattaaggatattgatcgaggactccgatcagaacttgaagtacctggggctgctggcaatgtccaagatcctgaagacccaccccaagtccgtgcagtcccacaaggacctcatcctgcagtgcctggacgacaaggacgagtccatccggctgcgggccctggacctgctctatgggatggtgtccaagaagaacctgatggagatcgtgaagaagctgatgacccacgtagacaaggcagagggtaccacctaccgtgacgagctgctcaccaagatcattgacatctgcagccagtccaactaccagtacatcaccaacttcgagtggtacatcagcatcctggtggagctgacccggctggagggcacacggcacggccacctcatcgccgcccaaatgctggacgtggccatccgcgtgaaggccatccgcaagttcgccgtgtcccagatgtctgcgctgcttgacagtgcacacctgctggccagcagcacccagcggaacgggatctgtgaggtgctgtacgctgccgcctggatctgcggggagttctcagagcatctgcaggaaccacaccacactttggaggccatgctgcggcccagagtcaccacgctgccaggccacatccaggccgtgtatgtgcagaacgtggtcaagctctacgcctccatcctgcagcagaaggagcaggccggggaggcagagggcgctcaggccgtcacccagctcatggtggaccggctgccccagtttgtgcagagcgcagacctggaggtgcaggagcgggcgtcctgcatcctgcagctggtcaagcacatccagaagcttcaggccaaggacgtgcctgtggcagaggaggtcagcgctctctttgctggggagctgaacccagtggcccccaaggcccagaagaaggttccagtccccgaaggcctggacctggacgcctggatcaatgagccactctcggacagcgagtcagaggacgagaggcccagggccgtcttccacgaggaggagcagcggcgtcccaagcaccggccgtcggaggcggacgaggaagagctggctcggcgccgagaggcccggaagcaggagcaggccaacaaccccttctacatcaagagctcgccatcgccacagaagcggtaccaggacaccccgggcgtggagcacattcccgtggtgcagattgacctctccgtccccttgaaggttccagggctgcctatgtcagatcagtatgtgaagctggaggaggagcggcggcaccggcagaagctggagaaggacaagaggaggaaaaagaggaaggagaaggagaagaatactaattatccattccttttgggccctgcagcatgtcatgctcccagaatttcagcttcagcttaacctgacagatgttaaaagctttcgtggttaagatggtgtcactgtggggatcatgtcttttccatgtgtacctgtaatatttttccatcatatttcaaagtaacgtcattaacgtcaaaaccaagaaaaacacacacaacatcggaaaccacacacacacacgaaaaga

SEQ ID NO: 379036 - DNA, 1267 bp, Homo sapiens
ccaagcctgagtgttaatttaactctatgttgtccgccgtgtaaacatccgaggtcatttgttgcgttgaattatctgaccatccttttttactgtgactcttcccattctctttggcaagaagtccccttctcgcccccaaaccagcaagggactcccccacctgggtctgtgccctgccccgcgctgggggccgagtccttgaatgtggcttcaggggctcctgtcctgacggttgcgtccgggggaggggaaggaagggccgctgtcgccaaggttttctctcccagaaccccgtgggccgccgcgatggccctcaagatggtgaagggcagcatcgaccgcatgttcgacaagaatctgcaggacttggtccgcggcatccgtaaccacaaggaggacgaggcaaaatacatatctcagtgcattgatgagatcaagcaggagctgaagcaggacaacatagcggtgaaggcgaacgcggtctgcaagctgacgtatttacagatgttgggatacgacatcagctgggccgccttcaacatcatagaagtgatgagtgcctccaagttcaccttcaagcgaattggctacctcgctgcttcccagagctttcacgaaggcaccgacgtcatcatgctgaccaccaatcagatccgtaaggacttgagcagccccagccagtacgacacaggtgttgcactgacgggtctgtcctgcttcgtcaccccagaccttgccagagacctggcaaatgacatcatgacactgatgtcacacaccaagccctacatcaggaagaaggctgtgctgatcatgtacaaggtgttcctgaagtaccccgagtcgctgcgccctgcctttccccggctgaaggagaagctggaggaccccgaccccggggttcagtcggctgccgtcaatgtcatctgcgagctggccagacgcaaccctaagaactacctgtccctggccccgctctttttcaagctgatgacgtcctccaccaacaactgggtcctcatcaagatcatcaagctgttcggtgctcttactcctttggaaccgcggctgggcaagaagctgatcgagcccctcaccaatctcatccacagcacgtctgccatgtctctcctctatgaatgtgtgaacaccgtgattgcagtgctcatctcgctgtcctccggcatgcccaaccacagcgccagcatccagcttggtgttcagaaattaaggatatggatgctggacgacgggtaccgagctc

SEQ ID NO: 379037 - DNA, 307 bp, Homo sapiens
aactacctgtccctggccccgctctttttcaagctgatgacgtcctccaccaacaactgggtcctcatcaagatcatcaagctggcaagtactgcccgggaatgtggcctcctcaccctgtgtggggcattccctcaccctgtgtggggcattccctgcgggtgaccgaggccccccctgtccctcaccctgcgtggggcattccctgcgggtgaccgaggccctgctgtccccacagttcggtgctcttactcctttggaaccgcggctgggcaagaagctgatcgagcccctcaccaatctcatc

SEQ ID NO: 379038 - DNA, 217 bp, Homo sapiens
atttcgctcctgctgctcctggtgacccaggcgtcggatgtgccacccagggcatcctggccacggcccctttctctcactttccaggacttgagcagccccagccagtacgacacaggtgttgcactgacgggtctgtcctgcttcgtcaccccagaccttgccagagacctggcaaatgacatcatgacactggtgagtttgtaagcctgcccac

SEQ ID NO: 379039 - DNA, 316 bp, Homo sapiens
gtgagttaagcaggaaagtgacatatcctagtttacattttttgaaaagtcattttcattgctatgtggagcatggataggagaggtaagagttgaaagctgggagtcagcttcaggagacaattgtagaagtccaagtagggggatagtggtggtggtagaaaagaataaaaattaatgaattcattgaatgcaaaatcacaaaaatataagtcagagctcatacttcttgtttttctctctagtaatgtttagagttataataacatcatactgattatatttaatttataaaataatttccaaattttccaat

SEQ ID NO: 379040 - DNA, 360 bp, Homo sapiens
gcgagactccgtctgaaaaaaaaaaaaaaaaaacttgcccttcactctctccatgctcctcctgcatactctaatttctattctctggctgaatatattgttagacctcatagaggtagtggaaagaacacaggctttggagccaaacaatctaggttccagctccatctccccctttcctgactagcagttcagcaggtttctaatggctgtgagtctgttttcttactacaaaatatatcagtgtgttaggattatagagttgatttttctgattcaataaacaatcatcttgcattgcatttctggacagtttctccttatcacttaaactacccttaaaacttcccaaatacttta

SEQ ID NO: 379041 - DNA, 3966 bp, Homo sapiens
gttgtcgggtcttattggccgctgattagaccagccggggtccactagccctgggctgcagggaggctgctgcgtccagtgaacacttcagcacctgtagcacagaagggccaaggagctgcagtcctcgaccagcaggaggtttgctcctcagcccactcgctgcatccagatcagctcacccctctcccttccctgcccaccaggactctgatagcccctggcagccacagcccattttgccaagatgtctagagtagccaaatatcgccggcaggtgagtgaagaccccgacatcgacagcctgctggagaccctgtctcccgaggagatggaggagctggagaaggagctggacgtggtggacccagacgggagtgttcccgtggggctgcggcagagaaaccagacggagaaacagtccacgggtgtgtacaaccgggaggccatgctcaacttctgtgaaaaggagaccaagaaacttatgcagagggagatgtccatggatgaaagcaagcaagtggagaccaagacagatgccaagaatggagaggaaaggggcagagatgccagcaaaaaagccctgggccccagacgggactcagatctggggaaggagccaaagaggggtggtttaaagaaaagcttctctagagacagagatgaagctggtggcaagagtggcgagaagcccaaggaggagaagatcatccggggcattgacaagggccgggtcagggctgcagtggataagaaggaggcagggaaggatgggagaggagaggagagggcagtggccaccaagaaggaagaggagaagaaagggagtgacaggaacacaggcttgagcagggacaaggataaaaagagagaggagatgaaggaggtggccaagaaagaggatgatgagaaggtaaaaggggagcgtaggaacacagacaccagaaaagagggtgagaagatgaaaagagcaggtgggaacacagacatgaaaaaggaggatgagaaggtaaaaagaggaactgggaacacagacaccaaaaaggacgatgaaaaagtcaagaagaatgaacccttacatgaaaaggaagccaaggatgacagcaagaccaaaacacccgagaaacagacgcccagtggccccaccaagccctctgaaggaccggccaaggtggaggaggaggcagctcccagcatatttgatgagcctctggagagagtgaagaacaatgaccccgagatgactgaggtgaacgtcaacaactcagactgcatcacaaatgagatcttggtccggtttactgaggctctggagttcaacactgtggttaagctgttcgccttggccaacacgcgagccgatgaccacgtggcctttgccattgccatcatgctcaaggccaacaagaccatcaccagcctcaacctggactccaaccacatcacaggcaaaggcatcctggccatcttccgggccctcctccagaacaacacgctgaccgagctccgcttccacaaccagcgacacatctgtggaggcaagacggagatggagatcgccaagctgctgaaggagaatactaccctgctcaagctgggctaccattttgagctggccgggccccgaatgactgtcaccaatctgctcagccgcaacatggacaagcagagacaaaagcggctgcaggagcaaaggcaggcacaggaagccaagggagagaagaaggatctgctggaggtacccaaggccggggccgtggctaagggctccccaaaaccttcacctcaaccatctccaaagccctctccaaagaactcacccaaaaaagggggtgctccagctgccccaccaccccctccccctcccttggctccaccccttatcatggagaacctgaagaattcactctcaccagctacccagaggaagatgggagacaaagtcctccctgcccaggagaagaactcccgtgaccagctattggctgccatccgctccagcaacctcaagcagctcaagaaggtggaagtgcccaaactgcttcagtaggaccaggctgccaggcaccatctgccaatgccatgactgctcaggcctcacctcccagggctacacagaccctgcccaccccatccctggctgacctgctgtggatgtccctattctgccatgggagagtccaggcctgggtcacgctcaaggaaggatgccttatctcttctcactttccttttcttgtctctgaggctctccaaattttgctttagtacatggagctcaggtttctggacaagaagagtccttttagcacatcactgagaagatggcactgtccagggcccatgtagctggcaagctgcaaaaggcctgtgatccaggaaagatgtcccacagggaccacatccaccccagccccactgccctccagggccaggattcaggcctctgaggagcccacggggcaaagctgctgggccagtggcactctgtgtgggaaaatggcagaaagatggagaggcatgggggcccaaaggggagcgtggggaggggctgaggataccccaaagtccaggctaattagaggatgtggcaggggcagtggcctggatgcacagtgcctgatgggagtaggctccagacaggaggagtgggacagacagcagctggacttgaaggtttgatgccaaagcagacattttcctcacacccacctgctgctgtatgaatagctgtgtatctgtttttccataagattttgataatatatacaaacctttagctgtgaatggctgtgccccacctgttgtcctgaactgtgagtcctgatcctaaccctgggctccctggaggactctagaagctcaggttccctgccacactatttgagttggccaagaaataaattcacatcctcagaaagtgcagcatggaggaaaatctgaactctaagcagaagactctccactgacctggttgtccaggtctagaaggccaggcctctactaggtctgctcctgaaccagtcctgctgcctggagtcagtagccagagttgttctcaggggtgctggggcagagtggagcccagggtgctgggatggctatattaggcatgttcagggatgctcattccatgactctgcctaaccatgggctcagggccaggtcctcacagcagtcacaggcccaggaaggcggcaggcagagaagtggagtgactatttggagaatagcacccatatctgtgtgccctagggctcagaggggcctcatcttccccagccctccccacctgctcaccaattccacttcctgccccaactgcaggaatgctgacaatgctgccatgcccaccatcgggtgtaggtgaaaggcatctttctgaatttcattctcttgaaggtgctgccaccccttggcactgtggaactgccaccttgggtctgtgtcacttgtaggtttctctgcctccaggttgcctcaacagcaggaggcacagcagtttcaccatctttgaggtgagggtggggtgccccagctaggaagcaagatcgctgtgctaggtctgaccaaaaccagagggcagtctagtcctgggggtaaagccctcagatcccagggtacactcttctccattccctccacccacttgcctgtcaccccagtcacctaagcaatcactgggcccagaggagaggagacagacacacactggctcctggacctaaagggtatgagctggagctaaggccagctagagcttccactgtcagccctcactgtcagccccactgcacccccctgtgcctgctgggcactgggcactagctagatgctttaggttgcttcagctgatccttcaactctgtgaggtggataccaatattctattttgcagatagaatttggcccagagaggttaactaatatatccatgatcacacagctaataaaagtcagagctca

SEQ ID NO: 379042 - DNA, 1002 bp, Homo sapiens
gttgtcgggtcttattggccgctgattagaccagccggggtccactagccctgggctgcagggaggctgctgcgtccagtgaacacttcagcacctgtagcacagaagggccaaggagctgcagtcctcgaccagcaggaggtttgctcctcagcccactcgctgcatccagatcagctcacccctctcccttccctgcccaccaggactctgatagcccctggcagccacagcccattttgccaagatgtctagagtagccaaatatcgccggcaggtgagtgaagaccccgacatcgacagcctgctggagaccctgtctcccgaggagatggaggagctggagaaggagctggacgtggtggacccagacgggagtgttcccgtggggctgcggcagagaaaccagacggagaaacagtccacgggtgtgtacaaccgggaggccatgctcaacttctgtgaaaaggagaccaagaaacttatgcagagggagatgtccatggatgtgagcacagccctggaggggaggagggagacaggggagggctggagaccctggcttcatgattaggatgcttccttccttagaagaaacgttcttgttggcaaaggattttaatgcttcagaactgatgattatccactgaactagcagtgcgaatctcttactcctaatttctgttttataagcagaagtcggatatgttggaggaacacaacatcccacaaaatcaaatagagctactagtagaatgggagctggaaggtgtccttgaagagtccattgtcaagttgactccatcctggtcccacaatacctttgtttttctccacactcattccatcctattgtgaggaggggtaaaaagagagagtgatactttatgtctcctgtcagccacccaaaaagacaaagctaagccattttttgtgggagaataactcattttcaagtccccaaccctatgggcatctcacggcacatggatcatttcagga

SEQ ID NO: 379043 - DNA, 602 bp, Homo sapiens
gttgtcgggtcttattggccgctgattagaccagccggggtccactagccctgggctgcagggaggctgctgcgtccagtgaacacttcagcacctgtagcacagaagggccaaggagctgcagtcctcgaccagcaggaggtttgctcctcagcccactcgctgcatccagatcagctcacccctctcccttccctgcccaccaggactctgatagcccctggcagccacagcccattttgccaagatgtctagagtagccaaatatcgccggcaggtgagtgaagaccccgacatcgacagcctgctggagaccctgtctcccgaggagatggaggagctggagaaggagctggacgtggtggacccagacgggagtgttcccgtggggctgcggcagagaaaccagacggagaaacagtccacgggtgtgtacaaccgggaggccatgctcaacttctgtgaaaaggagaccaagaaacttatgcagagggagatgtccatggatgtggataccaatattctattttgcagatagaatttggcccagagaggttaactaatatatccatgatcacacagctaataaaagtcagagctca

SEQ ID NO: 379044 - DNA, 3614 bp, Homo sapiens
gtacccttcatatccagggctttcatgcctattttgcatagaccttttcaattaagccttccagcaaccttggagggagctattagtcatactttacagaggaaggatgtgaggttcagagagagaagatgacctacccaagatcacacagctcacgaaaggcagagcaggttctagacgacagatgccaagaatggagaggaaaggggcagagatgccagcaaaaaagccctgggccccagacgggactcagatctggggaaggagccaaagaggggtggtttaaagaaaagcttctctagagacagagatgaagctggtggcaagagtggcgagaagcccaaggaggagaagatcatccggggcattgacaagggccgggtcagggctgcagtggataagaaggaggcagggaaggatgggagaggagaggagagggcagtggccaccaagaaggaagaggagaagaaagggagtgacaggaacacaggcttgagcagggacaaggataaaaagagagaggagatgaaggaggtggccaagaaagaggatgatgagaaggtaaaaggggagcgtaggaacacagacaccagaaaagagggtgagaagatgaaaagagcaggtgggaacacagacatgaaaaaggaggatgagaaggtaaaaagaggaactgggaacacagacaccaaaaaggacgatgaaaaagtcaagaagaatgaacccttacatgaaaaggaagccaaggatgacagcaagaccaaaacacccgagaaacagacgcccagtggccccaccaagccctctgaaggaccggccaaggtggaggaggaggcagctcccagcatatttgatgagcctctggagagagtgaagaacaatgaccccgagatgactgaggtgaacgtcaacaactcagactgcatcacaaatgagatcttggtccggtttactgaggctctggagttcaacactgtggttaagctgttcgccttggccaacacgcgagccgatgaccacgtggcctttgccattgccatcatgctcaaggccaacaagaccatcaccagcctcaacctggactccaaccacatcacaggcaaaggcatcctggccatcttccgggccctcctccagaacaacacgctgaccgagctccgcttccacaaccagcgacacatctgtggaggcaagacggagatggagatcgccaagctgctgaaggagaatactaccctgctcaagctgggctaccattttgagctggccgggccccgaatgactgtcaccaatctgctcagccgcaacatggacaagcagagacaaaagcggctgcaggagcaaaggcaggcacaggaagccaagggagagaagaaggatctgctggaggtacccaaggccggggccgtggctaagggctccccaaaaccttcacctcaaccatctccaaagccctctccaaagaactcacccaaaaaagggggtgctccagctgccccaccaccccctccccctcccttggctccaccccttatcatggagaacctgaagaattcactctcaccagctacccagaggaagatgggagacaaagtcctccctgcccaggagaagaactcccgtgaccagctattggctgccatccgctccagcaacctcaagcagctcaagaaggtggaagtgcccaaactgcttcagtaggaccaggctgccaggcaccatctgccaatgccatgactgctcaggcctcacctcccagggctacacagaccctgcccaccccatccctggctgacctgctgtggatgtccctattctgccatgggagagtccaggcctgggtcacgctcaaggaaggatgccttatctcttctcactttccttttcttgtctctgaggctctccaaattttgctttagtacatggagctcaggtttctggacaagaagagtccttttagcacatcactgagaagatggcactgtccagggcccatgtagctggcaagctgcaaaaggcctgtgatccaggaaagatgtcccacagggaccacatccaccccagccccactgccctccagggccaggattcaggcctctgaggagcccacggggcaaagctgctgggccagtggcactctgtgtgggaaaatggcagaaagatggagaggcatgggggcccaaaggggagcgtggggaggggctgaggataccccaaagtccaggctaattagaggatgtggcaggggcagtggcctggatgcacagtgcctgatgggagtaggctccagacaggaggagtgggacagacagcagctggacttgaaggtttgatgccaaagcagacattttcctcacacccacctgctgctgtatgaatagctgtgtatctgtttttccataagattttgataatatatacaaacctttagctgtgaatggctgtgccccacctgttgtcctgaactgtgagtcctgatcctaaccctgggctccctggaggactctagaagctcaggttccctgccacactatttgagttggccaagaaataaattcacatcctcagaaagtgcagcatggaggaaaatctgaactctaagcagaagactctccactgacctggttgtccaggtctagaaggccaggcctctactaggtctgctcctgaaccagtcctgctgcctggagtcagtagccagagttgttctcaggggtgctggggcagagtggagcccagggtgctgggatggctatattaggcatgttcagggatgctcattccatgactctgcctaaccatgggctcagggccaggtcctcacagcagtcacaggcccaggaaggcggcaggcagagaagtggagtgactatttggagaatagcacccatatctgtgtgccctagggctcagaggggcctcatcttccccagccctccccacctgctcaccaattccacttcctgccccaactgcaggaatgctgacaatgctgccatgcccaccatcgggtgtaggtgaaaggcatctttctgaatttcattctcttgaaggtgctgccaccccttggcactgtggaactgccaccttgggtctgtgtcacttgtaggtttctctgcctccaggttgcctcaacagcaggaggcacagcagtttcaccatctttgaggtgagggtggggtgccccagctaggaagcaagatcgctgtgctaggtctgaccaaaaccagagggcagtctagtcctgggggtaaagccctcagatcccagggtacactcttctccattccctccacccacttgcctgtcaccccagtcacctaagcaatcactgggcccagaggagaggagacagacacacactggctcctggacctaaagggtatgagctggagctaaggccagctagagcttccactgtcagccctcactgtcagccccactgcacccccctgtgcctgctgggcactgggcactagctagatgctttaggttgcttcagctgatccttcaactctgtgaggtggataccaatattctattttgcagatagaatttggcccagagaggttaactaatatatccatgatcacacagctaataaaagtcagagctca

SEQ ID NO: 379045 - DNA, 1219 bp, Homo sapiens
  misc_feature (17)..(17): n is a, c, g, or t
  misc_feature (42)..(42): n is a, c, g, or t
ttccatgtgtccctgcnctagctccttcccctgcacctgacncctcccatccacctgttgtcctgaactgtgagtcctgatcctaaccctgggctccctggaggactctagaagctcaggttccctgccacactatttgagttggccaagaaataaattcacatcctcagaaagtgcagcatggaggaaaatctgaactctaagcagaagactctccactgacctggttgtccaggtctagaaggccaggcctctactaggtctgctcctgaaccagtcctgctgcctggagtcagtagccagagttgttctcaggggtgctggggcagagtggagcccagggtgctgggatggctatattaggcatgttcagggatgctcattccatgactctgcctaaccatgggctcagggccaggtcctcacagcagtcacaggcccaggaaggcggcaggcagagaagtggagtgactatttggagaatagcacccatatctgtgtgccctagggctcagaggggcctcatcttccccagccctccccacctgctcaccaattccacttcctgccccaactgcaggaatgctgacaatgctgccatgcccaccatcgggtgtaggtgaaaggcatctttctgaatttcattctcttgaaggtgctgccaccccttggcactgtggaactgccaccttgggtctgtgtcacttgtaggtttctctgcctccaggttgcctcaacagcaggaggcacagcagtttcaccatctttgaggtgagggtggggtgccccagctaggaagcaagatcgctgtgctaggtctgaccaaaaccagagggcagtctagtcctgggggtaaagccctcagatcccagggtacactcttctccattccctccacccacttgcctgtcaccccagtcacctaagcaatcactgggcccagaggagaggagacagacacacactggctcctggacctaaagggtatgagctggagctaaggccagctagagcttccactgtcagccctcactgtcagccccactgcacccccctgtgcctgctgggcactgggcactagctagatgctttaggttgcttcagctgatccttcaactctgtgaggtggataccaatattctattttgcagatagaatttggcccagagaggttaactaatatatccatgatcacacagctaataaaagtcagagctca

SEQ ID NO: 379046 - DNA, 4135 bp, Homo sapiens
gttgtcgggtcttattggccgctgattagaccagccggggtccactagccctgggctgcagggaggctgctgcgtccagtgaacacttcagcacctgtagcacagaagggccaaggagctgcagtcctcgaccagcaggaggtttgctcctcagcccactcgctgcatccagatcagctcacccctctcccttccctgcccaccaggactctgatagcccctggcagccacagcccattttgccaagatgtctagagtagccaaatatcgccggcaggtgagtgaagaccccgacatcgacagcctgctggagaccctgtctcccgaggagatggaggagctggagaaggagctggacgtggtggacccagacgggagtgttcccgtggggctgcggcagagaaaccagacggagaaacagtccacgggtgtgtacaaccgggaggccatgctcaacttctgtgaaaaggagaccaagaaacttatgcagagggagatgtccatggatgaaagcaagcaagtggagaccaagacagatgccaagaatggagaggaaaggggcagagatgccagcaaaaaagccctgggccccagacgggactcagatctggggaaggagccaaagaggggtggtttaaagaaaagcttctctagagacagagatgaagctggtggcaagagtggcgagaagcccaaggaggagaagatcatccggggcattgacaagggccgggtcagggctgcagtggataagaaggaggcagggaaggatgggagaggagaggagagggcagtggccaccaagaaggaagaggagaagaaagggagtgacaggaacacaggcttgagcagggacaaggataaaaagagagaggagatgaaggaggtggccaagaaagaggatgatgagaaggtaaaaggggagcgtaggaacacagacaccagaaaagagggtgagaagatgaaaagagcaggtgggaacacagacatgaaaaaggaggatgagaaggtaaaaagaggaactgggaacacagacaccaaaaaggacgatgaaaaagtcaagaagaatgaacccttacatgaaaaggaagccaaggatgacagcaagaccaaaacacccgagaaacagacgcccagtggccccaccaagccctctgaaggaccggccaaggtggaggaggaggcagctcccagcatatttgatgagcctctggagagagtgaagaacaatgaccccgagatgactgaggtgaacgtcaacaactcagactgcatcacaaatgagatcttggtccggtttactgaggctctggagttcaacactgtggttaagctgttcgccttggccaacacgcgagccgatgaccacgtggcctttgccattgccatcatgctcaaggccaacaagaccatcaccagcctcaacctggactccaaccacatcacaggcaaaggcatcctggccatcttccgggccctcctccagaacaacacgctgaccgagctccgcttccacaaccagcgacacatctgtggaggcaagacggagatggagatcgccaagctgctgaaggagaatactaccctgctcaagctgggctaccattttgagctggccgggccccgaatgactgtcaccaatctgctcagccgcaacatggacaagcagagacaaaagcggctgcaggagcaaaggcaggcacaggaagccaagggagagaagaaggatctgctggaggtacccaaggccggggccgtggctaagggctccccaaaaccttcacctcaaccatctccaaagccctctccaaagaactcacccaaaaaagggggtgctccagctgccccaccaccccctccccctcccttggctccaccccttatcatggagaacctgaagaattcactctcaccagctacccagaggaagatgggagacaaagtcctccctgcccaggagaagaactcccgtgaccagctattggctgccatccgctccagcaacctcaagcagctcaagaaggtggaagtgcccaaactgcttcagtaggaccaggctgccaggcaccatctgccaatgccatgactgctcaggcctcacctcccagggctacacagaccctgcccaccccatccctggctgacctgctgtggatgtccctattctgccatgggagagtccaggcctgggtcacgctcaaggaaggatgccttatctcttctcactttccttttcttgtctctgaggctctccaaattttgctttagtacatggagctcaggtttctggacaagaagagtccttttagcacatcactgagaagatggcactgtccagggcccatgtagctggcaagctgcaaaaggcctgtgatccaggaaagatgtcccacagggaccacatccaccccagccccactgccctccagggccaggattcaggcctctgaggagcccacggggcaaagctgctgggccagtggcactctgtgtgggaaaatggcagaaagatggagaggcatgggggcccaaaggggagcgtggggaggggctgaggataccccaaagtccaggctaattagaggatgtggcaggggcagtggcctggatgcacagtgcctgatgggagtaggctccagacaggaggagtgggacagacagcagctggacttgaaggtttgatgccaaagcagacattttcctcacacccacctgctgctgtatgaatagctgtgtatctgtttttccataagattttgataatatatacaaacctttagctgtgaatggctgtgccccacctgttgtcctgaactgtgagtcctgatcctaaccctgggctccctggaggactctagaagctcaggttccctgccacactatttgagttggccaagaaataaattcacatcctcagaaagtgcagcatggaggaaaatctgaactctaagcagaagactctccactgacctggttgtccaggtctagaaggccaggcctctactaggtctgctcctgaaccagtcctgctgcctggagtcagtagccagagttgttctcaggggtgctggggcagagtggagcccagggtgctgggatggctatattaggcatgttcagggatgctcattccatgactctgcctaaccatgggctcagggccaggtcctcacagcagtcacaggcccaggaaggcggcaggcagagaagtggagtgactatttggagaatagcacccatatctgtgtgccctagggctcagaggggcctcatcttccccagccctccccacctgctcaccaattccacttcctgccccaactgcaggaatgctgacaatgctgccatgcccaccatcgggtgtaggtgaaaggcatctttctgaatttcattctcttgaaggtgctgccaccccttggcactgtggaactgccaccttgggtctgtgtcacttgtaggtttctctgcctccaggttgcctcaacagcaggaggcacagcagtttcaccatctttgaggtgagggtggggtgccccagctaggaagcaagatcgctgtgctaggtctgaccaaaaccagagggcagtctagtcctgggggtaaagccctcagatcccagggtacactcttctccattccctccacccacttgcctgtcaccccagtcacctaagcaatcactgggcccagaggagaggagacagacacacactggctcctggacctaaagggtatgagctggagctaaggccagctagagcttccactgtcagccctcactgtcagccccactgcacccccctgtgcctgctgggcactgggcactagctagatgctttaggttgcttcagctgatccttcaactctgtgaggtggataccaatattctattttgcagatagaatttggcccagagaggttaactaatatatccatgatcacacagctaataaaagtcagagctcaggtctgttttgtttgttggttttgttttgagcccaggtcttcaggccatagaactgcttctcattaacagctccccttccttccctcactgaaataaggctgtgacggtgctgcaggaaagcactggacgctcacctgaacccaaacaacctgcctccaaatcttaagg

SEQ ID NO: 379047 - DNA, 3029 bp, Homo sapiens
gttgtcgggtcttattggccgctgattagaccagccggggtccactagccctgggctgcagggaggctgctgcgtccagtgaacacttcagcacctgtagcacagaagggccaaggagctgcagtcctcgaccagcaggaggtttgctcctcagcccactcgctgcatccagatcagctcacccctctcccttccctgcccaccaggactctgatagcccctggcagccacagcccattttgccaagatgtctagagtagccaaatatcgccggcaggtgagtgaagaccccgacatcgacagcctgctggagaccctgtctcccgaggagatggaggagctggagaaggagctggacgtggtggacccagacgggagtgttcccgtggggctgcggcagagaaaccagacggagaaacagtccacgggtgtgtacaaccgggaggccatgctcaacttctgtgaaaaggagaccaagaaacttatgcagagggagatgtccatggatgaaagcaagcaagtggagaccaagacagatgccaagaatggagaggaaaggggcagagatgccagcaaaaaagccctgggccccagacgggactcagatctggggaaggagccaaagaggggtggtttaaagaaaagcttctctagagacagagatgaagctggtggcaagagtggcgagaagcccaaggaggagaagatcatccggggcattgacaagggccgggtcagggctgcagtggataagaaggaggcagggaaggatgggagaggagaggagagggcagtggccaccaagaaggaagaggagaagaaagggagtgacaggaacacaggcttgagcagggacaaggataaaaagagagaggagatgaaggaggtggccaagaaagaggatgatgagaaggtaaaaggggagcgtaggaacacagacaccagaaaagagggtgagaagatgaaaagagcaggtgggaacacagacatgaaaaaggaggatgagaaggtaaaaagaggaactgggaacacagacaccaaaaaggacgatgaaaaagtcaagaagaatgaacccttacatgaaaaggaagccaaggatgacagcaagaccaaaacacccgagaaacagacgcccagtggccccaccaagccctctgaaggaccggccaaggtggaggaggaggcagctcccagcatatttgatgagcctctggagagagtgaagaacaatgaccccgagatgactgaggtgaacgtcaacaactcagactgcatcacaaatgagatcttggtccggtttactgaggctctggagttcaacactgtggttaagctgttcgccttggccaacacgcgagccgatgaccacgtggcctttgccattgccatcatgctcaaggccaacaagaccatcaccagcctcaacctggactccaaccacatcacaggcaaaggcatcctggccatcttccgggccctcctccagaacaacacgctgaccgagctccgcttccacaaccagcgacacatctgtggaggcaagacggagatggagatcgccaagctgctgaaggagaatactaccctgctcaagctgggctaccattttgagctggccgggccccgaatgactgtcaccaatctgctcagccgcaacatggacaagcagagacaaaagcggctgcaggagcaaaggcaggcacaggaagccaagggagagaagaaggatctgctggaggtacccaaggccggggccgtggctaagggctccccaaaaccttcacctcaaccatctccaaagccctctccaaagaactcacccaaaaaagggggtgctccagctgccccaccaccccctccccctcccttggctccaccccttatcatggagaacctgaagaattcactctcaccagctacccagaggaagatgggagacaaagtcctccctgcccaggagaagaactcccgtgaccagctattggctgccatccgctccagcaacctcaagcagctcaagaaggtggaagtgcccaaactgcttcagtaggaccaggctgccaggcaccatctgccaatgccatgactgctcaggcctcacctcccagggctacacagaccctgcccaccccatccctggctgacctgctgtggatgtccctattctgccatgggagagtccaggcctgggtcacgctcaaggaaggatgccttatctcttctcactttccttttcttgtctctgaggctctccaaattttgctttagtacatggagctcaggtttctggacaagaagagtccttttagcacatcactgagaagatggcactgtccagggcccatgtagctggcaagctgcaaaaggcctgtgatccaggaaagatgtcccacagggaccacatccaccccagccccactgccctccagggccaggattcaggcctctgaggagcccacggggcaaagctgctgggccagtggcactctgtgtgggaaaatggcagaaagatggagaggcatgggggcccaaaggggagcgtggggaggggctgaggataccccaaagtccaggctaattagaggatgtggcaggggcagtggcctggatgcacagtgcctgatgggagtaggctccagacaggaggagtgggacagacagcagctggacttgaaggtttgatgccaaagcagacattttcctcacacccacttgcctgtcaccccagtcacctaagcaatcactgggcccagaggagaggagacagacacacactggctcctggacctaaagggtatgagctggagctaaggccagctagagcttccactgtcagccctcactgtcagccccactgcacccccctgtgcctgctgggcactgggcactagctagatgctttaggttgcttcagctgatccttcaactctgtgaggtggataccaatattctattttgcagatagaatttggcccagagaggttaactaatatatccatgatcacacagctaataaaagtcagagctca

SEQ ID NO: 379048 - DNA, 2008 bp, Homo sapiens
gttgtcgggtcttattggccgctgattagaccagccggggtccactagccctgggctgcagggaggctgctgcgtccagtgaacacttcagcacctgtagcacagaagggccaaggagctgcagtcctcgaccagcaggaggtttgctcctcagcccactcgctgcatccagatcagctcacccctctcccttccctgcccaccaggactctgatagcccctggcagccacagcccattttgccaagatgtctagagtagccaaatatcgccggcaggtgagtgaagaccccgacatcgacagcctgctggagaccctgtctcccgaggagatggaggagctggagaaggagctggacgtggtggacccagacgggagtgttcccgtggggctgcggcagagaaaccagacggagaaacagtccacgggtgtgtacaaccgggaggccatgctcaacttctgtgaaaaggagaccaagaaacttatgcagagggagatgtccatggatgaaagcaagcaagtggagaccaagacagatgccaagaatggagaggaaaggggcagagatgccagcaaaaaagccctgggccccagacgggactcagatctggggaaggagccaaagaggggtggtttaaagaaaagcttctctagagacagagatgaagctggtggcaagagtggcgagaagcccaaggaggagaagatcatccggggcattgacaagggccgggtcagggctgcagtggataagaaggaggcagggaaggatgggagaggagaggagagggcagtggccaccaagaaggaagaggagaagaaagggagtgacaggaacacaggcttgagcagggacaaggataaaaagagagaggagatgaaggaggtggccaagaaagaggatgatgagaaggtaaaagggggtgctccagctgccccaccaccccctccccctcccttggctccaccccttatcatggagaacctgaagaattcactctcaccagctacccagaggaagatgggagacaaagtcctccctgcccaggagaagaactcccgtgaccagctattggctgccatccgctccagcaacctcaagcagctcaagaaggtggaagtgcccaaactgcttcagtaggaccaggctgccaggcaccatctgccaatgccatgactgctcaggcctcacctcccagggctacacagaccctgcccaccccatccctggctgacctgctgtggatgtccctattctgccatgggagagtccaggcctgggtcacgctcaaggaaggatgccttatctcttctcactttccttttcttgtctctgaggctctccaaattttgctttagtacatggagctcaggtttctggacaagaagagtccttttagcacatcactgagaagatggcactgtccagggcccatgtagctggcaagctgcaaaaggcctgtgatccaggaaagatgtcccacagggaccacatccaccccagccccactgccctccagggccaggattcaggcctctgaggagcccacggggcaaagctgctgggccagtggcactctgtgtgggaaaatggcagaaagatggagaggcatgggggcccaaaggggagcgtggggaggggctgaggataccccaaagtccaggctaattagaggatgtggcaggggcagtggcctggatgcacagtgcctgatgggagtaggctccagacaggaggagtgggacagacagcagctggacttgaaggtttgatgccaaagcagacattttcctcacacccacctgctgctgtatgaatagctgtgtatctgtttttccataagattttgataatatatacaaacctttagctgtgaatggctgtgccccacctgttgtcctgaactgtgagtcctgatcctaaccctgggctccctggaggactctagaagctcaggttccctgccacactatttgagttggccaagaaataaattcacatcctcag

SEQ ID NO: 379049 - DNA, 3864 bp, Homo sapiens
taaagacaggatcagtgttagtatttctccttttgcctcaggttccaatgtgcttggcagggcactgcttggaagcagtccttctaaatcacccatgataggaaagggcaattctgggtctgagaatactccataaaaggaactgccacaacctttgcaggtatttgtttggttgtctcacaaccctgaggccttgagtctgatgtcatcccatttctgcagcttaaacctgagtccctcttttgctgccctcaatggagacatccaccccactctcccaaacagcacaactgtccttcagaggctcaagggcagttatgtaagcgctcccccacacatccccatactcattcctctccctctgtagccagcttttcatgattatttttcttttctgaattcttaggaaagcaagcaagtggagaccaagacagatgccaagaatggagaggaaaggggcagagatgccagcaaaaaagccctgggccccagacgggactcagatctggggaaggagccaaagaggggtggtttaaagaaaagcttctctagagacagagatgaagctggtggcaagagtggcgagaagcccaaggaggagaagatcatccggggcattgacaagggccgggtcagggctgcagtggataagaaggaggcagggaaggatgggagaggagaggagagggcagtggccaccaagaaggaagaggagaagaaagggagtgacaggaacacaggcttgagcagggacaaggataaaaagagagaggagatgaaggaggtggccaagaaagaggatgatgagaaggtaaaaggggagcgtaggaacacagacaccagaaaagagggtgagaagatgaaaagagcaggtgggaacacagacatgaaaaaggaggatgagaaggtaaaaagaggaactgggaacacagacaccaaaaaggacgatgaaaaagtcaagaagaatgaacccttacatgaaaaggaagccaaggatgacagcaagaccaaaacacccgagaaacagacgcccagtggccccaccaagccctctgaaggaccggccaaggtggaggaggaggcagctcccagcatatttgatgagcctctggagagagtgaagaacaatgaccccgagatgactgaggtgaacgtcaacaactcagactgcatcacaaatgagatcttggtccggtttactgaggctctggagttcaacactgtggttaagctgttcgccttggccaacacgcgagccgatgaccacgtggcctttgccattgccatcatgctcaaggccaacaagaccatcaccagcctcaacctggactccaaccacatcacaggcaaaggcatcctggccatcttccgggccctcctccagaacaacacgctgaccgagctccgcttccacaaccagcgacacatctgtggaggcaagacggagatggagatcgccaagctgctgaaggagaatactaccctgctcaagctgggctaccattttgagctggccgggccccgaatgactgtcaccaatctgctcagccgcaacatggacaagcagagacaaaagcggctgcaggagcaaaggcaggcacaggaagccaagggagagaagaaggatctgctggaggtacccaaggccggggccgtggctaagggctccccaaaaccttcacctcaaccatctccaaagccctctccaaagaactcacccaaaaaagggggtgctccagctgccccaccaccccctccccctcccttggctccaccccttatcatggagaacctgaagaattcactctcaccagctacccagaggaagatgggagacaaagtcctccctgcccaggagaagaactcccgtgaccagctattggctgccatccgctccagcaacctcaagcagctcaagaaggtggaagtgcccaaactgcttcagtaggaccaggctgccaggcaccatctgccaatgccatgactgctcaggcctcacctcccagggctacacagaccctgcccaccccatccctggctgacctgctgtggatgtccctattctgccatgggagagtccaggcctgggtcacgctcaaggaaggatgccttatctcttctcactttccttttcttgtctctgaggctctccaaattttgctttagtacatggagctcaggtttctggacaagaagagtccttttagcacatcactgagaagatggcactgtccagggcccatgtagctggcaagctgcaaaaggcctgtgatccaggaaagatgtcccacagggaccacatccaccccagccccactgccctccagggccaggattcaggcctctgaggagcccacggggcaaagctgctgggccagtggcactctgtgtgggaaaatggcagaaagatggagaggcatgggggcccaaaggggagcgtggggaggggctgaggataccccaaagtccaggctaattagaggatgtggcaggggcagtggcctggatgcacagtgcctgatgggagtaggctccagacaggaggagtgggacagacagcagctggacttgaaggtttgatgccaaagcagacattttcctcacacccacctgctgctgtatgaatagctgtgtatctgtttttccataagattttgataatatatacaaacctttagctgtgaatggctgtgccccacctgttgtcctgaactgtgagtcctgatcctaaccctgggctccctggaggactctagaagctcaggttccctgccacactatttgagttggccaagaaataaattcacatcctcagaaagtgcagcatggaggaaaatctgaactctaagcagaagactctccactgacctggttgtccaggtctagaaggccaggcctctactaggtctgctcctgaaccagtcctgctgcctggagtcagtagccagagttgttctcaggggtgctggggcagagtggagcccagggtgctgggatggctatattaggcatgttcagggatgctcattccatgactctgcctaaccatgggctcagggccaggtcctcacagcagtcacaggcccaggaaggcggcaggcagagaagtggagtgactatttggagaatagcacccatatctgtgtgccctagggctcagaggggcctcatcttccccagccctccccacctgctcaccaattccacttcctgccccaactgcaggaatgctgacaatgctgccatgcccaccatcgggtgtaggtgaaaggcatctttctgaatttcattctcttgaaggtgctgccaccccttggcactgtggaactgccaccttgggtctgtgtcacttgtaggtttctctgcctccaggttgcctcaacagcaggaggcacagcagtttcaccatctttgaggtgagggtggggtgccccagctaggaagcaagatcgctgtgctaggtctgaccaaaaccagagggcagtctagtcctgggggtaaagccctcagatcccagggtacactcttctccattccctccacccacttgcctgtcaccccagtcacctaagcaatcactgggcccagaggagaggagacagacacacactggctcctggacctaaagggtatgagctggagctaaggccagctagagcttccactgtcagccctcactgtcagccccactgcacccccctgtgcctgctgggcactgggcactagctagatgctttaggttgcttcagctgatccttcaactctgtgaggtggataccaatattctattttgcagatagaatttggcccagagaggttaactaatatatccatgatcacacagctaataaaagtcagagctca

SEQ ID NO: 379050 - DNA, 2008 bp, Homo sapiens
tctcgggccctgtaagcacaggtgcatgaacacttacggcagctacaagtgctactgtctcaacggatatatgctcatgccggatggttcctgctcaagtgccctgacctgctccatggcaaactgtcagtatggctgtgatgttgttaaaggacaaatacggtgccagtgcccatcccctggcctgcacctggctcctgatgggaggacctgtgtagatgttgatgaatgtgctacaggaagagcctgatgccttatctcttctcactttccttttcttgtctctgaggctctccaaattttgctttagtacatggagctcaggtttctggacaagaagagtccttttagcacatcactgagaagatggcactgtccagggcccatgtagctggcaagctgcaaaaggcctgtgatccaggaaagatgtcccacagggaccacatccaccccagccccactgccctccagggccaggattcaggcctctgaggagcccacggggcaaagctgctgggccagtggcactctgtgtgggaaaatggcagaaagatggagaggcatgggggcccaaaggggagcgtggggaggggctgaggataccccaaagtccaggctaattagaggatgtggcaggggcagtggcctggatgcacagtgcctgatgggagtaggctccagacaggaggagtgggacagacagcagctggacttgaaggtttgatgccaaagcagacattttcctcacacccacctgctgctgtatgaatagctgtgtatctgtttttccataagattttgataatatatacaaacctttagctgtgaatggctgtgccccacctgttgtcctgaactgtgagtcctgatcctaaccctgggctccctggaggactctagaagctcaggttccctgccacactatttgagttggccaagaaataaattcacatcctcagaaagtgcagcatggaggaaaatctgaactctaagcagaagactctccactgacctggttgtccaggtctagaaggccaggcctctactaggtctgctcctgaaccagtcctgctgcctggagtcagtagccagagttgttctcaggggtgctggggcagagtggagcccagggtgctgggatggctatattaggcatgttcagggatgctcattccatgactctgcctaaccatgggctcagggccaggtcctcacagcagtcacaggcccaggaaggcggcaggcagagaagtggagtgactatttggagaatagcacccatatctgtgtgccctagggctcagaggggcctcatcttccccagccctccccacctgctcaccaattccacttcctgccccaactgcaggaatgctgacaatgctgccatgcccaccatcgggtgtaggtgaaaggcatctttctgaatttcattctcttgaaggtgctgccaccccttggcactgtggaactgccaccttgggtctgtgtcacttgtaggtttctctgcctccaggttgcctcaacagcaggaggcacagcagtttcaccatctttgaggtgagggtggggtgccccagctaggaagcaagatcgctgtgctaggtctgaccaaaaccagagggcagtctagtcctgggggtaaagccctcagatcccagggtacactcttctccattccctccacccacttgcctgtcaccccagtcacctaagcaatcactgggcccagaggagaggagacagacacacactggctcctggacctaaagggtatgagctggagctaaggccagctagagcttccactgtcagccctcactgtcagccccactgcacccccctgtgcctgctgggcactgggcactagctagatgctttaggttgcttcagctgatccttcaactctgtgaggtggataccaatattctattttgcagatagaatttggcccagagaggttaactaatatatccatgatcacacagctaataaaagtcagagctca

SEQ ID NO: 379051 - DNA, 2188 bp, Homo sapiens
gttgtcgggtcttattggccgctgattagaccagccggggtccactagccctgggctgcagggaggctgctgcgtccagtgaacacttcagcacctgtagcacagaagggccaaggagctgcagtcctcgaccagcaggaggtttgctcctcagcccactcgctgcatccagatcagctcacccctctcccttccctgcccaccaggactctgatagcccctggcagccacagcccattttgccaagatgtctagagtagccaaatatcgccggcaggtgagtgaagaccccgacatcgacagcctgctggagaccctgtctcccgaggagatggaggagctggagaaggagctggacgtggtggacccagacgggagtgttcccgtggggctgcggcagagaaaccagacggagaaacagtccacgggtgtgtacaaccgggaggccatgctcaacttctgtgaaaaggagaccaagaaacttatgcagagggagatgtccatggatgaaagcaagcaagtggagaccaagacagatgccaagaatggagaggaaaggggcagagatgccagcaaaaaagccctgggccccagacgggactcagatctggggaaggagccaaagaggggtggtttaaagaaaagcttctctagagacagagatgaagctggtggcaagagtggcgagaagcccaaggaggagaagatcatccggggcattgacaagggccgggtcagggctgcagtggataagaaggaggcagggaaggatgggagaggagaggagagggcagtggccaccaagaaggaagaggagaagaaagggagtgacaggaacacaggcttgagcagggacaaggataaaaagagagaggagatgaaggaggtggccaagaaagaggatgatgagaaggtaaaaggggagcgtaggaacacagacaccagaaaagagggtgagaagatgaaaagagcaggtgggaacacagacatgaaaaaggaggatgagaaggtaaaaagaggaactgggaacacagacaccaaaaaggacgatgaaaaagtcaagaagaatgaacccttacatgaaaaggaagccaaggatgacagcaagaccaaaacacccgagaaacagacgcccagtggccccaccaagccctctgaaggaccggccaaggtggaggaggaggcagctcccagcatatttgatgagcctctggagagagtgaagaacaatgaccccgagatgactgaggtgaacgtcaacaactcagactgcatcacaaatgagatcttggtccggtttactgaggctctggagttcaacactgtggttaagctgttcgccttggccaacacgcgagccgatgaccacgtggcctttgccattgccatcatgctcaaggccaacaagaccatcaccagcctcaacctggactccaaccacatcacaggcaaaggcatcctggccatcttccgggccctcctccagaacaacacgctgaccgagctccgcttccacaaccagcgacacatctgtggaggcaagacggagatggagatcgccaagctgctgaaggagaatactaccctgctcaagctgggctaccattttgagctggccgggccccgaatgactgtcaccaatctgctcagccgcaacatggacaagcagagacaaaagcggctgcaggagcaaaggcaggcacaggaagccaagggagagaagaaggatctgctggaggtacccaaggccggggccgtggctaagggctccccaaaaccttcacctcaaccatctccaaagccctctccaaagaactcacccaaaaaagggggtgctccagctgccccaccaccccctccccctcccttggctccaccccttatcatggagaacctgaagaattcactctcaccagctacccagaggaagatgggagacaaagtcctccctgcccaggagaagaactcccgtgaccagctattggctgccatccgctccagcaacctcaagcagctcaagaccctgtgcctgctgggcactgggcactagctagatgctttaggttgcttcagctgatccttcaactctgtgaggtggataccaatattctattttgcagatagaatttggcccagagaggttaactaatatatccatgatcacacagctaataaaagtcagagctca

SEQ ID NO: 379052 - DNA, 447 bp, Homo sapiens
ctgaagaattcactctcaccagctacccagaggaagatgggagacaaagtcctccctgcccaggagaagaactcccgtgaccagctattggctgccatccgctccagcaacctcaagcagctcaagataagtagttgtgggcatgagccaacagggcggggctgggtagggcctggaggagagggtaggactgcaaaagggaaggcatgcagaggagcttatgtcggctgcagatgatatagactcccagggcccataggggacttcaggtcatctcatgcatcctcctgcctgcaggcaggtcacacctgtatatcccctagagctgagactctacccttcctttaaggagcttcctttaatacctcactccatgcttctctttcattctgcaatgaagcctgtttctccttaaaatggagaaatggcctctacagagtagttttg

SEQ ID NO: 379053 - DNA, 267 bp, Homo sapiens
cctccttttagagcatgaagagctctttatttttcaagccaccaaataatacaagctggcatctagaaaagacccaaatgcgaagattcaaaataaataaatacatcatgagaaaggaaaaactaagacaggaaagtaaacacagatcgagaaaggcattactataagaagcacaagccggtagaccctaggtattttccaagcaggctctgagcttcctaagggtcaacacaaagaggaaacagtcatcagttgcagaatcacaat

SEQ ID NO: 379054 - DNA, 1217 bp, Homo sapiens
ccaggcacaggctgggtccagttctgacctgagcacggtttttcctcatgtgacttctgggaaggcgctccctcatctgggccaaaggaaggaggacgaagccctcctcagctggcctgtgtttggggcatgaatctctcctctcctccttgtctggctctgttgacaaaccgggcatgtttggcagtaaattggcaccgtgtcacactgtttcctgggattcaagtatgcaaccagaacacaggagaagaaaagctccaggatccctgtccccatctgtcctcttgatgtgagagagactctgagacttcttccatcgcaatgacctgtattaaacacaagccccccaagcaaaagaagaggttgagtttgctgccaggattcagatcagcccttcccagggtctgcaggtgtcacatgatcacagttcagcgggaggctttccgtacccacactggctgtagccacttcagtccatctgccctccagaggaggggtttcttcctgatttttagcaggtttagaggctgcagcttgagctacaatcaggagggaaattggaaggattagcagcttttaaaaatgtttaaatattttgctttgctaatgtgctgatccgcactaactcatctttgcaaaaggaactgctccctcggcgtgccccagctggggcctctgaagggattcctcactgtgggcagctgccctgagcttcaggcagcagtgttcatctctggccagttgtctggtttccatgtattctaggccaggtaggcaacacagagcccaaggcgggtgctggaacccagacggaacagtgttgggggcaggaaggtggatgcttgttgtcatggagctgtgggagttggcactctgtctgctggtggccctctcggctcacatgttcacagtgcagctcctggcagacttgggttttctctttggtggtttctaaagtgccttatctgcaaacaacttcttttctccttcaggaactgtgaatggctagaagaaggagctcagtaaactagaagtccagggttgcttggtttactggtttataagaaatctgaaagcacctctgacattccttttattaactcacctctcagttgaaagatttcttctttgaaaggtcaagaccgtgaactgaaaaaagtgttggcctttttgcgggaccagatttttaagataaaataaatatttttacttctgtc

SEQ ID NO: 379055 - DNA, 855 bp, Homo sapiens
ccaggcacaggctgggtccagttctgacctgagcacggtttttcctcatgtgacttctgggaaggcgctccctcatctgggccaaaggaaggaggacgaagccctcctcagctggcctgtgtttggggcatgaatctctcctctcctccttgtctggctctgttgacaaaccgggcatgtttggcagtaaattggcaccgtgtcacactgtttcctgggattcaagtatgcaaccagaacacaggagaagaaaagctccaggatccctgtccccatctgtcctcttgatgtgagagagactctgagacttcttccatcgcaatgacctgtattaaacacaagccccccaagcaaaagaagaggttgagtttgctgccaggattcagatcagcccttcccagggtctgcaggtgtcacatgatcacagttcagcgggaggctttccgtacccacactggctgtagccacttcagtccatctgccctccagaggaggggtttcttcctgatttttagcaggtttagaggctgcagcttgagctacaatcaggagggaaattggaaggattagcagcttttaaaaatgtttaaatattttgctttgctaatgtgctgatccgcactaactcatctttgcaaaaggaactgctccctcggcgtgccccagctggggcctctgaagggattcctcactgtgggcagctgccctgagcttcaggcagcagtgttcatctctggccagttgtctggtttccatgtattctaggccaggtaggcaacacagagcccaaggcgggtgctggaacccagacggaacagtgttggcctacctggcctaaaaaaaaacctcgtgccg

SEQ ID NO: 379056 - DNA, 978 bp, Homo sapiens
  misc_feature (11)..(11): n is a, c, g, or t
  misc_feature (22)..(22): n is a, c, g, or t
ctcgtgcaatntcggcagaggncgtcgcgatggaggagagcgggtacgagtcggtgctctgtgtcaagcctgacgtccacgtctaccgtatccctccgcgggctaccaaccgtggctacaggggagctctttgctgccaggattcagatcagcccttcccagggtctgcaggtgtcacatgatcacagttcagcgggaggctttccgtacccacactggctgtagccacttcagtccatctgccctccagaggaggggtttcttcctgatttttagcaggtttagaggctgcagcttgagctacaatcaggagggaaattggaaggattagcagcttttaaaaatgtttaaatattttgctttgctaatgtgctgatccgcactaactcatctttgcaaaaggaactgctccctcggcgtgccccagctggggcctctgaagggattcctcactgtgggcagctgccctgagcttcaggcagcagtgttcatctctggccagttgtctggtttccatgtattctaggccaggtaggcaacacagagcccaaggcgggtgctggaacccagacggaacagtgttgggggcaggaaggtggatgcttgttgtcatggagctgtgggagttggcactctgtctgctggtggccctctcggctcacatgttcacagtgcagctcctggcagacttgggttttctctttggtggtttctaaagtgccttatctgcaaacaacttcttttctccttcaggaactgtgaatggctagaagaaggagctcagtaaactagaagtccagggttgcttggtttactggtttataagaaatctgaaagcacctctgacattccttttattaactcacctctcagttgaaagatttcttctttgaaaggtcaagaccgtgaactgaaaaaagtgttggcctttttgcgggaccagatttttaagataaaataaatatttttacttctgtc

SEQ ID NO: 379057 - DNA, 320 bp, Homo sapiens
gttttaacactgtgaggtcaacaataatattatccccatgttacagttgaggaaattgatgctcagggggctaaatgaactgccaggctcacatagcatccctagttcagagtgatgtgcctgaggcacggcaggagggcaatagtgagatttctaggcatgagtagctttccttgtcgtttttagcaaaaccaggtgccaccagattggtaatcaaatttagtaccctgactattcctactgggatttggttctccatccctatgagcttgaaattccttcagcgcgtctttagttgttgcaaatcctagcacattggt

SEQ ID NO: 379058 - DNA, 856 bp, Homo sapiens
gctttgtatggcctgggataggagaatattcagaactggttgcctccatattcgtcactgctgtgtctgcagaatgatgaattgcctttgtatctctggaggcttcataagtggataacgcctcacctgctgtactgctcaaattgggaggtaaacttgtgccaggttccaagcttatcctcgacatgtctgtggtcttccccaggccagaggtctcagacaagaaaactgaggtcacaggtggagtagaggagggactgtgcccttgtgatgtcaacaaaatattggaaggcgaggttgtagcatggataggtaccagggaagaggaagagctggtttcttccacagagggagggcttggctgtgatgtatcctcaggacctttgctaaagagagtggtcttctctgagtatgtaaatctctgagtcgtagccagtggagtccctgtccaggaggctgtggctgatgtatccaaagtaggtgcacttagtgatgtagcgccaggtggacttgtttgcatagcaaggatcattcctccagattctgtcatggcaggaaagttagacagcctggtgatggcttctgaggggctgtctgacgacctcatagactgggcaaggaatgagctggatattctcttagaggaggtaatttctgttctaggccccttggtgatcgcagtggaacctggggaagagataatacttgtttgtgtggttgagctggtgtccatgtaagggctgacgtccctcagttcaatagtcaagaaggaattaggctctgttctagcccttgtagactctggccatgtggttgttgacatagaaactattgcttgttccctggtggaggttgt

SEQ ID NO: 379059 - DNA, 1379 bp, Homo sapiens
gcctccagctttgttctttttgcttaggattgcctttgctattcaggctcttttttggttccatatgaattttaaaatagttttttctagttctgtgaagaatgttgttggtagtttgataggaataacattgaatgtgtaaattgcttatgttttcccatttgtttgtgtcatctctgatttctttgaagagtgtttttaattcttgttgtagagatctttctagagtattcctaggtgttttattctttttgtggcagttgtgaatgggattatgtttctgatttggctcttggcttaactgttggtatatgggaatgctagtggtttttgtatgttgcttttgtatcctgagacttcgctgaatttatgtatcagcttaaggagcttttgggctgagactatggggttttctagatatagaatcatgttgtctgcaaacagagggtagtttgacttcctctctttttatttggaggcactttatttctttctcttgactgattgctctggccagggcttccaatattatgttgaataggagtggtgagagagggcatccttgtcttttgccagttttcaaggggaatgcttccagcttttgcccattcagtattatgttggctgtggatttgtcatcgatggctcttaatattttgaggtatgttcattcaatatgtagtttactgagaatttttaacatgaagcagtgttgaattttattgaaagccttttcagcatctattgagataatcatgtgttttttgtctttagttgtttatgtgatgaatcacatttattgctttgcctgtgttgaaccaaccttgcatcccagggataaagcctacttgatcatgatgggtaagctttttgatgtgctagtgggtttgttttgccagtattttattgaggatttttgcatagatgttcatcaaggatattggccttattttttcattgtgtctctgccaggtttcggtataaggaggatgctagcctcatagaatgagttggggaagaatccctcctcctcaattttttggactagttacagtgggaatggtaccagctctttgtacgtctggtagaatttggatttggctgtaaatctgtctggtcctgggcttttcttggttggtaggctatttattgctgattcaatttcagagttcattattggtctcttcagggattctgtttctttctggttcactcttgggagggtgtatgtgtccaggaatttatccatttcttttggattttatagttcctgtcgcttgccctttcagtggactatttttgtttttttaaatggaatgcttcacaaatatgccccttccttgcacagaggccatgctaatttgtgaagcattccattt

SEQ ID NO: 379060 - DNA, 644 bp, Homo sapiens
cggacatggtgtcttccataggtatgacagccggggttggtgcttgagacctctggtcagagcctgtaatgccacgtcatgaattgccacaaacttagcagcttaaaaaaacaaatgtattaatatctcacagtttctgtgggtcggggtctggtagggtgttgttaggttctctgctcaggacctcttcaggccaaaatcaaggtgtcagccagctgagctctcttcaggaggctctgggaagaatccagaatgggcatccaggctcatcaggctgttggcagaattcagttccttgcaattgtagggctgaggtcccatttccttgccggctgtaaactggaggctcctagaggtcccctccatcttcaggaacgagccttgaatctgcctcctgctctccagcctctgatttcctgggcccaggtttagagagggctcatgtgattggctcaggccccctaccttaaggtcaggtgacttgggactttacctctccagaatcactgcacagcaacacctagattcgtgttcgattgaatgactgggggaaggtgtatccaacgggttggaatcgtgtcacactgtggaggaggggccaggggtacgaatccacgggcacacaggtggatgtaggcggtcgc

SEQ ID NO: 379061 - DNA, 389 bp, Homo sapiens
atagcttgtgctcaatcatttctagctgacatcctggcattcacagaggcaaagtccacacacaaaatttcctgggaggaatcctctggttcactgtcatcatcattagggaactctgttgaacagctactcagctctgtgctgactggtagagacaagaagagaagcaattcctgatctctgccctcaaaaaaactaattatttaaaggtaaagagggaaatgaagaaacatgtggcaaaggctgagtggtgtaggaagtgtaggaattctagagagtacagtgcctggtgacagggtgagctgtgaaaagagcaggaactgagttccaagaggggaaggaagggatggattccagaggcattgtcgaggaaaatccagtagtatctg

SEQ ID NO: 379062 - DNA, 869 bp, Homo sapiens
gctgactcctgcccagcagtatgtcttatggcacgaaggttatgcagtgccacaggccgggggctgtcccagacctctgtcttcagttatgtggttcctctgctcagggcctgagattccactttgttatattcagatccatcagctgagaaatttttcaacagaatgtttaactggtttttaagatttaatctctcagtagcattacggaacaaactctttagattcaaactggggcccgagatcaggcccccctcaactgaagcatcgggacactaaattttttcaaatcgacccctttttcttctgggaatactagagacatccccacagccctctgttgcttccttctcccttggcctcccccttcttccctctcttcttccttccctctgcctgtcttctactcttctccctttcccaattttcctctctgccaaaaaagtatataatccaaggctgggttgtatgggaacttgatttccctaattacggtggcttttgggttctataccagcactgttccatgtaaatataatgcaagccacatgtgcagtgtaagttttactagtagccgtacttaaaaagttaaagctgtggctgggcatggtggctcacacttgtgattccagcactttgggaggccaaggtacgaggctcacttgagcccaggagttcgaggctgcagtgagccatggtcatgctactgaactccagtctaggcaacagggagacccttaaaaaaaaattaaagccaggtgtagtggcatatgcctataatcccagctgcttgggaggttgaggggaaggattgtttgagcccaggagtttgggtctagcctccgcaacataacgagatgcaagctctt

SEQ ID NO: 379063 - DNA, 282 bp, Homo sapiens
tcagctctcatactgtagacaagtgtcctatttctggtctatctactgccgcgttttctgcatttttgtgctctttgttggtgagtttactgtttaaaatggcccccaagtgtaatgctgataatgctgaaatgctgtcatgttgctaagggcaagaaggctgtgatgtgccttacagagaaaagacatgtattacgtaagctcctaatcttgagtacggtaccactggctgtgagttcaatattaatgcatcaacaatgtacattcaataaggcagtggct

SEQ ID NO: 379064 - DNA, 1081 bp, Homo sapiens
cctgaactaagacgttggcattgggaacagaaagaaggataccacagtaataaaatttacccttcctacttaacctgtgtatttttaatccatttagtcaaccaaccggtcaacagatgttttattgaatgcctaagacctgccaatgctatgttggtacaaagactacaaatcccagtgcctggccatcaaggtgatcaggggcaaaatgtgcctagtgagtaaggatgagtcaggggtgacaatatgttgagcttggatgatggaaagaaagataaatccatgagagatgaaaaacttgcatctttttcccacatgatgattttaagcatctttgtattttctaacttggtgattatcaagtgaagcagaagccatgaccatttatatactgtatatgtgccttccccatggaacttttttagggcactaagaatttcaaattctaagaatgaaatgttttcatgtcttttttattcagggaaatgaaaaagaaaaaacttccaagtgactcaggagatttagaagcgttagagggaaaggataaagaaaaagaaagtactgtacacattgaaactcatcagaacacaagcaaaaatgttgcggctgtgcagccaatgaaacgaggacaaaagatggaggtgacacgagcagtgatgaggataaagaagaacatgaaactcctgtggaagtagaactcatgactcaggttgaccacgaggatatcactcttcagagtggcagagatgaactaaatgaggagctcattcaggaagaaagctctgaagacgaaggagaatatgaagaggttagaaaagatcaggattctgttggtgaaatgaaggatgaacggggaagagacacttaaacttactcctgatactaccccctcgacttgtctcaccttcaacccccaaggtccatccagatataggcttcaacagaggtatcttctaattctcgtgacagtaaatcacagagccggagcacatctcccggctctaggacaggccgccaaattgaacaagaatcacacgttacaactgactccctgagtgtaagacgccccccgagtgaatcc

SEQ ID NO: 379065 - DNA, 872 bp, Homo sapiens
ctttctccttatggtttaatgatgtggaattttcattttacattatagctgacatttttatttttatatgttcggaacaggaagagcaagatctggatcaacagggaaatgaggtatgattttatgttggggttcctactacaacactgtgattacaattcagttcccagaatgtttgaaacacaacttattaaaacttagaaacctaagacaagactgcaggctacgaagtcaaactttcggggtcttaatcccaactctgctatatgtaactgtacaaacttggaaacattctttgtgcctcagtttcctcatctgaagaatggggataatgtccctacccaggagagggttgttttgataactaatgtatgtaaagggcatttagaaaagtttatggcacatagcaaacactcaaatattaattatacttcagcaccaagcattctgtcctaaatctaagtttattcatattgtaaaataaatgggggcaatctcacaggcagcacagcaaataagaactctgggatttctccttaataatgggtaagagagaaggctgttctagcccagggtttctcaactttggcactattaacattaggggttggttaattctttgttgtggggtctgtcccattcattataaaatgtttagcgacatcctcggcctttacccactagatctcagtagcagcccctacctattccttctcacccctcatcgtgtcaacgacgagaaatagtggtatagccaaggtattagtcccatttccatgtgataggacttaaatctatttgtggttattattgcatcattttaatccacagcaggtttctgcaactcaggtaatatccaatagtttttttcc

SEQ ID NO: 379066 - DNA, 454 bp, Homo sapiens
  misc_feature (399)..(400): n is a, c, g, or t
  misc_feature (415)..(415): n is a, c, g, or t
ggttataaacatgaaatcactatctctaattttcttgaacgcaacattatttcgtaagcactttcctgtttttctacatagttgtttagccacggttaattgacacttgattggcactccttttttcctttttttcccccaccattagatattgaaaaagtacttgtttctctgcagaaagcagaagactatatgaaaacaacatccaacttcagtgggaaggtagcaccatgtatacttactatatattgttgtgatttatttgggttttcagaaattaaacgttcattaaaggatcattatatatacattttattttaatttggaaaattgttatctgtaatatgcttattccaggatagtttttttgttttgttttttgagacagcctgagcaacnnagtgagacccccatntcaaaaaaccccacaaaaacaagtatcaccactctcaaa

SEQ ID NO: 379067 - DNA, 4662 bp, Homo sapiens
gcggaggagaagtggcgtcgagtccggccgggcagtagaggaaattgcggtagtgaccctcgggcctcgccatgaagagccgctttagcaccattgacctccgcgccgtactcgcggagctgaatgctagcttgctaggaatgagagtaaacaatgtttatgatgtggataataagacataccttattcgtcttcaaaaaccggactttaaagctacacttttacttgaatctggcatacgaattcatacaacagaatttgagtggcctaagaatatgatgccgtctagttttgccatgaagtgccgaaaacatttgaagagtcggagattagtcagtgcaaaacagcttggtgtggatagaattgtagattttcaatttggaagtgatgaagctgcttaccatttaatcattgagctctatgatagggggaacattgttcttacagattatgagtacgtaattttaaatattctaaggtttcgaactgatgaggcagatgatgttaaatttgctgttcgtgaacgctatccacttgatcatgctagagctgctgaacctttgcttactttggaaaggttgactgaaatagtagccagcgcacctaagggtgaactactgaagagggtgcttaacccattacttccctatggaccagctctcattgaacactgtcttttagaaaatggattctcgggtaatgtcaaagtggatgaaaaacttgaaactaaagatattgaaaaagtacttgtttctctgcagaaagcagaagactatatgaaaacaacatccaacttcagtgggaagggatatatcattcagaaaagagaaataaaaccatgcttggaagcagataaaccagttgaagacatactgacgtatgaggaatttcatcctttcttgttttctcaacattcacaatgtccatatatagaatttgaatcatttgacaaggcggtggatgaattttattccaagatagaaggccagaaaattgacttaaaagctttacaacaggaaaagcaagcattgaagaaattagataatgttcgaaaggatcacgaaaacagattggaagctcttcagcaggctcaggaaatagacaaactgaaaggagagctcatagaaatgaacctacaaatagttgacagagccattcaggtagttcgaagtgctttagctaaccagatagattggacagaaattgggttaattgtgaaagaagcccaggctcaaggagaccctgttgcaagtgcaatcaaagaattaaaactacaaacaaaccatgttacaatgctgctaagaaatccatacttgttatcagaggaggaagatgatgatgttgatggtgacgtcaatgttgagaaaaatgaaactgaaccaccaaaaggaaaaaagaaaaaacaaaagaataaacagctgcagaagcctcagaaaaataagcccttacttgtagatgttgatctcagcttgtcagcatatgccaatgccaaaaagtattatgatcacaagagatatgctgctaagaaaacacaaaagactgttgaagctgctgagaaggcattcaagtcagcagaaaagaaaacaaagcaaacattaaaagaagttcagactgttacctctattcaaaaagcaagaaaagtatattggtttgagaaatttctgtggttcattagctcagagaactatctaattataggtggacgagatcagcaacagaatgaaataattgtgaaaagatacttgacaccaggagacatttatgtacatgctgatcttcatggagctactagctgtgtaattaagaatccaacaggagaacccatccccccacggaccttgactgaagctggcacaatggcactttgctacagtgctgcttgggatgcacgagttatcactagtgcttggtgggtgtaccatcatcaggtatctaaaacagcaccaactggagaatatttgacaacaggaagcttcatgataagaggaaaaaagaattttcttcctccctcatatctaatgatggggtttagcttcctttttaaggtagatgagtcttgtgtttggagacatcagggtgaacgaaaagtcagagtacaggatgaagacatggagacactggcaagttgtacaagtgaactcatatcagaagaaatggaacaattagatggaggtgacacgagcagtgatgaggataaagaagaacatgaaactcctgtggaagtagaactcatgactcaggttgaccaagaggatatcactcttcagagtggcagagatgaactaaatgaggagctcattcaggaagaaagctctgaagacgaaggagaatatgaagaggttagaaaagatcaggattctgttggtgaaatgaaggatgaaggggaagagacattaaattatcctgatactaccattgacttgtctcaccttcaaccccaaaggtccatccagaaattggcttcaaaagaggaatcttctaattctagtgacagtaaatcacagagccggagacatttgtcagccaaggaaagaagggaaatgaaaaagaaaaaacttccaagtgactcaggagatttagaagcgttagagggaaaggataaagaaaaagaaagtactgtacacattgaaactcatcagaacacaagcaaaaatgttgcggctgtgcagccaatgaaacgaggacaaaagagtaaaatgaaaaaaatgaaagaaaaatacaaagaccaggatgaagaagaccgtgaacttatcatgaagttgctggggtctgcaggttcaaacaaagaagaaaaagggaagaaggggaagaaaggaaaaacaaaggacgaacctgtgaagaaacagccccagaaacctagaggtggacagagggtctctgacaacattaagaaagaaactccgttccttgaggttataactcatgagttacaagactttgctgtagatgatccacatgatgacaaggaagagcaagatctggatcaacagggaaatgaggaaaacctatttgattctttgacaggccagccacatcctgaagatgtactactgtttgccattccaatatgtgccccttacaccaccatgacaaactacaaatataaagtgaaacttactcctggagtgcagaaaaagggaaaagctgcaaaaacagccttgaatagtttcatgcattccaaagaagcaacagcaagagaaaaagacttattccgcagcgtaaaggacacagatttatcaagaaacattcctggcaaagtgaaagtgtctgcacccaatcttctgaacgtaaaaaggaaatagctgaaatgaaattctaaaatatttgagaagagccaattttatagccttttggaagttcaaagatgaaagcaccatgtatcaggatttccgcattataaaaatgaactaaacattgccttgctatattcaccaaaaggacttacttcttgttttttcccagttttatatagaggaaacactgtctatgataggatttccaaaagtatttgtggacagttaaatgctaattaatatacatctgtagttattctacattttcttgaaatttgggaggttaataccaagtattcatttcatgatgtaaagaaactgaacagtgaagtggcttgattgcttaaactattgacttggtaagtctactgtatataacatctaatatatatattacaggccaaatgaactaaacattgccttgctatattcaccaaaaggacttaattcttgtttttttcccagttttatatagaggaaacactatgataggatttcctaaagtatttgtggacagttaaatgctaattatatacatctgtagttattctacattttcttgaaatttgagaggttaataccaagtattcatttcatgatgtaaagaaactgaacagtgaagtggcttgattgcttaaactattgacttggtaagtctactgtatataacatctaatatatatatattataggccagctacaaggggtttaaatatttaggattgtgtcttgaaaactaagtattggagtggattttcttctgctttcattgatacttgtcagaaaaaaatattagaccaaaatgtaaaatataagtaataattctcatgactcagcttaatcatttctattcatttgtagaccttcaggtttgatcttaattttttccttgtaatctgattcagttctgtaccattttaatttccacctttagtaattaattaccaatatagcacgttagagtatcttaacctataataccagaagcgcattttaggcttaccactaaagactctaacccacttttcctctgtctcttaacagaatggaaaatgatgtcatcattatttccattccttcatgagctataaaacctattaattaaaaaaaaactttttaattgactggacagcacctgcctgtattcagcatgaccacttgctccagcccctacactgaagcattaaggtcaaagtactgaacagttgttggtccctccacactttgtttttccagcttcgtcataatgtgaatattaatgtttaaaaaaaaaacctttattatattgtatttacaacactaggttacataactatagactactcttgccattaaaaaaaaaatctataatgttttcaaaaaatgactt

SEQ ID NO: 379068 - DNA, 4595 bp, Homo sapiens
gcggaggagaagtggcgtcgagtccggccgggcagtagaggaaattgcggtagtgaccctcgggcctcgccatgaagagccgctttagcaccattgacctccgcgccgtactcgcggagctgaatgctagcttgctaggaatgagagtaaacaatgtttatgatgtggataataagacataccttattcgtcttcaaaaaccggactttaaagctacacttttacttgaatctggcatacgaattcatacaacagaatttgagtggcctaagaatatgatgccgtctagttttgccatgaagtgccgaaaacatttgaagagtcggagattagtcagtgcaaaacagcttggtgtggatagaattgtagattttcaatttggaagtgatgaagctgcttaccatttaatcattgagctctatgatagggggaacattgttcttacagattatgagtacgtaattttaaatattctaaggtttcgaactgatgaggcagatgatgttaaatttgctgttcgtgaacgctatccacttgatcatgctagagctgctgaacctttgcttactttggaaaggttgactgaaatagtagccagcgcacctaagggtgaactactgaagagggtgcttaacccattacttccctatggaccagctctcattgaacactgtcttttagaaaatggattctcgggtaatgtcaaagtggatgaaaaacttgaaactaaagatattgaaaaagtacttgtttctctgcagaaagcagaagactatatgaaaacaacatccaacttcagtgggaagggatatatcattcagaaaagagaaataaaaccatgcttggaagcagataaaccagttgaagacatactgacgtatgaggaatttcatcctttcttgttttctcaacattcacaatgtccatatatagaatttgaatcatttgacaaggcggtggatgaattttattccaagatagaaggccagaaaattgacttaaaagctttacaacaggaaaagcaagcattgaagaaattagataatgttcgaaaggatcacgaaaacagattggaagctcttcagcaggctcaggaaatagacaaactgaaaggagagctcatagaaatgaacctacaaatagttgacagagccattcaggtagttcgaagtgctttagctaaccagatagattggacagaaattgggttaattgtgaaagaagcccaggctcaaggagaccctgttgcaagtgcaatcaaagaattaaaactacaaacaaaccatgttacaatgctgctaagaaatccatacttgttatcagaggaggaagatgatgatgttgatggtgacgtcaatgttgagaaaaatgaaactgaaccaccaaaaggaaaaaagaaaaaacaaaagaataaacagctgcagaagcctcagaaaaataagcccttacttgtagatgttgatctcagcttgtcagcatatgccaatgccaaaaagtattatgatcacaagagatatgctgctaagaaaacacaaaagactgttgaagctgctgagaaggcattcaagtcagcagaaaagaaaacaaagcaaacattaaaagaagttcagactgttacctctattcaaaaagcaagaaaagtatattggtttgagaaatttctgtggttcattagctcagagaactatctaattataggtggacgagatcagcaacagaatgaaataattgtgaaaagatacttgacaccaggagacatttatgtacatgctgatcttcatggagctactagctgtgtaattaagaatccaacaggagaacccatccccccacggaccttgactgaagctggcacaatggcactttgctacagtgctgcttgggatgcacgagttatcactagtgcttggtgggtgtaccatcatcaggtatctaaaacagcaccaactggagaatatttgacaacaggaagcttcatgataagaggaaaaaagaattttcttcctccctcatatctaatgatggggtttagcttcctttttaaggtagatgagtcttgtgtttggagacatcagggtgaacgaaaagtcagagtacaggatgaagacatggagacactggcaagttgtacaagtgaactcatatcagaagaaatggaacaattagatggaggtgacacgagcagtgatgaggataaagaagaacatgaaactcctgtggaagtagaactcatgactcaggttgaccaagaggatatcactcttcagagtggcagagatgaactaaatgaggagctcattcaggaagaaagctctgaagacgaaggagaatatgaagaggttagaaaagatcaggattctgttggtgaaatgaaggatgaaggggaagagacattaaattatcctgatactaccattgacttgtctcaccttcaaccccaaaggtccatccagaaattggcttcaaaagaggaatcttctaattctagtgacagtaaatcacagagccggagacatttgtcagccaaggaaagaagagatggggtttcaccgtgttaggcaggattgtctcgatcttctgacctcgcgatccacccgccttggcctcccaaagtgctggattacagtcaaccaaccggtcaacagatgttttattgaatgcctaagacctgccaatgctatgttggtacaaagactacaaatcccagtgcctggccatcaaggtgatcaggggcaaaatgtgcctagtgagtaaggatgagtcaggggtgacaatatgttgagcttggatgatggaaagaaagataaatccatgagagatgaaaaacttgcatctttttcccacatgatgattttaagcatctttgtattttctaacttggtgattatcaagtgaagcagaagccatgaccatttatatactgtatatgtgccttccccatggaacttttttagggcactaagaatttcaaattctaagaatgaaatgttttcatgtcttttttattcagggaaatgaaaaagaaaaaacttccaagtgactcaggagatttagaagcgttagagggaaaggataaagaaaaagaaagtactgtacacattgaaactcatcagaacacaagcaaaaatgttgcggctgtgcagccaatgaaacgaggacaaaagagtaaaatgaaaaaaatgaaagaaaaatacaaagaccaggatgaagaagaccgtgaacttatcatgaagttgctggggtctgcaggttcaaacaaagaagaaaaagggaagaaggggaagaaaggaaaaacaaaggacgaacctgtgaagaaacagccccagaaacctagaggtggacagagggtctctgacaacattaagaaagaaactccgttccttgaggttataactcatgagttacaagactttgctgtagatgatccacatgatgacaaggaagagcaagatctggatcaacagggaaatgaggaaaacctatttgattctttgacaggccagccacatcctgaagatgtactactgtttgccattccaatatgtgccccttacaccaccatgacaaactacaaatataaagtgaaacttactcctggagtgcagaaaaagggaaaagctgcaaaaacagccttgaatagtttcatgcattccaaagaagcaacagcaagagaaaaagacttattccgcagcgtaaaggacacagatttatcaagaaacattcctggcaaagtgaaagtgtctgcacccaatcttctgaacgtaaaaaggaaatagctgaaatgaaattctaaaatatttgagaagagccaattttatagccttttggaagttcaaagatgaaagcaccatgtatcaggatttccgcattataaaaatgaactaaacattgccttgctatattcaccaaaaggacttacttcttgttttttcccagttttatatagaggaaacactgtctatgataggatttccaaaagtatttgtggacagttaaatgctaattaatatacatctgtagttattctacattttcttgaaatttgggaggttaataccaagtattcatttcatgatgtaaagaaactgaacagtgaagtggcttgattgcttaaactattgacttggtaagtctactgtatataacatctaatatatatattacaggccaaatgaactaaacattgccttgctatattcaccaaaaggacttaattcttgtttttttcccagttttatatagaggaaacactatgataggatttcctaaagtatttgtggacagttaaatgctaattatatacatctgtagttattctacattttcttgaaatttgagaggttaataccaagtattcatttcatgatgtaaagaaactgaacagtgaagtggcttgattgcttaaactattgacttggtaagtctactgtatataacatctaatatatatatattataggccagctacaaggggtttaaatatttaggattgtgtcttgaaaactaagtattggagtggattttcttctgctttcattgatacttgtcagaaaaaaatattagaccaaaatgtaaaatataagtaataattctca

SEQ ID NO: 379069 - DNA, 2823 bp, Homo sapiens
tgttgattgaggctcaccatttccctgggactgtataaagtgccttatttacattcttttctttttttttttccccccgagagggagtctcagtctgtcgccaggctggagtgcagtggcacaatctcggctcactgcaacctctgccgcccaggttctagcaattcttctgcctcagcctcccgagtagctaggattacaggcgcctgccaccacgcctggctaatttttgtatttttagtagagacggggtttcaccatcttggccaggctggtcttgtactcctgaccttgtgatccacccacctcggcctcccagagtgctaggattacaggcatgagccactgcacctggcctatttacattattttctattctcacaaccatccttgtcagatgagtggtggcatctcattttacaggtgaggcggtagaccctgttactactattagacagtgttccttttgcagaagaatgagcacctgctatgtgggcgttatataatacgtatttaagtttttatgtgcaaattataataaaagcagcaaaagttatgcaactaattttgctgtcttggtttttggaaatacccaactaaggcagagttgtggttttcattgttgaaagggtagcaatgtccaagaaatttattgtggtaaaggatcttggagatcatttagttcaacctattcatgatacaggttattcttttgtctaagagtaccctttgggaatgatcagacacttttctgttgattttttggagaaatatgggagaaacagtggaatatttttatgacatttttaggaaatcacctggcttggttggtagtcccacactgactttccttatgataattctacagatggaggtgacacgagcagtgatgaggataaagaagaacatgaaactcctgtggaagtagaactcatgactcaggttgaccaagaggatatcactcttcagagtggcagagatgaactaaatgaggagctcattcaggaagaaagctctgaagacgaaggagaatatgaagaggttagaaaagatcaggattctgttggtgaaatgaaggatgaaggggaagagacattaaattatcctgatactaccattgacttgtctcaccttcaaccccaaaggtccatccagaaattggcttcaaaagaggaatcttctaattctagtgacagtaaatcacagagccggagacatttgtcagccaaggaaagaagggaaatgaaaaagaaaaaacttccaagtgactcaggagatttagaagcgttagagggaaaggataaagaaaaagaaagtactgtacacattgaaactcatcagaacacaagcaaaaatgttgcggctgtgcagccaatgaaacgaggacaaaagagtaaaatgaaaaaaatgaaagaaaaatacaaagaccaggatgaagaagaccgtgaacttatcatgaagttgctggggtctgcaggttcaaacaaagaagaaaaagggaagaaggggaagaaaggaaaaacaaaggacgaacctgtgaagaaacagccccagaaacctagaggtggacagagggtctctgacaacattaagaaagaaactccgttccttgaggttataactcatgagttacaagactttgctgtagatgatccacatgatgacaaggaagagcaagatctggatcaacagggaaatgaggaaaacctatttgattctttgacaggccagccacatcctgaagatgtactactgtttgccattccaatatgtgccccttacaccaccatgacaaactacaaatataaagtgaaacttactcctggagtgcagaaaaagggaaaagctgcaaaaacagccttgaatagtttcatgcattccaaagaagcaacagcaagagaaaaagacttattccgcagcgtaaaggacacagatttatcaagaaacattcctggcaaagtgaaagtgtctgcacccaatcttctgaacgtaaaaaggaaatagctgaaatgaaattctaaaatatttgagaagagccaattttatagccttttggaagttcaaagatgaaagcaccatgtatcaggatttccgcattataaaaatgaactaaacattgccttgctatattcaccaaaaggacttacttcttgttttttcccagttttatatagaggaaacactgtctatgataggatttccaaaagtatttgtggacagttaaatgctaattaatatacatctgtagttattctacattttcttgaaatttgggaggttaataccaagtattcatttcatgatgtaaagaaactgaacagtgaagtggcttgattgcttaaactattgacttggtaagtctactgtatataacatctaatatatatattacaggccaaatgaactaaacattgccttgctatattcaccaaaaggacttaattcttgtttttttcccagttttatatagaggaaacactatgataggatttcctaaagtatttgtggacagttaaatgctaattatatacatctgtagttattctacattttcttgaaatttgagaggttaataccaagtattcatttcatgatgtaaagaaactgaacagtgaagtggcttgattgcttaaactattgacttggtaagtctactgtatataacatctaatatatatatattataggccagctacaaggggtttaaatatttaggattgtgtcttgaaaactaagtattggagtggattttcttctgctttcattgatacttgtcagaaaaaaatattagaccaaaatgtaaaatataagtaataattctca

SEQ ID NO: 379070 - DNA, 2689 bp, Homo sapiens
ttgagtcatcatgctgcactcagaaagttttagattttggagcattttggattttcaggtttggggtgctcaccctgtattcttaagtgcacatgaaatattctctggggtagaccataggatagtctataaaacaagcctcagctggatgcggtgactcacacctgtaatcccagcactttgggaggctgaggattacaggcatgagccactgcacctggcctatttacattattttctattctcacaaccatccttgtcagatgagtggtggcatctcattttacaggtgaggcggtagaccctgttactactattagacagtgttccttttgcagaagaatgagcacctgctatgtgggcgttatataatacgtatttaagtttttatgtgcaaattataataaaagcagcaaaagttatgcaactaattttgctgtcttggtttttggaaatacccaactaaggcagagttgtggttttcattgttgaaagggtagcaatgtccaagaaatttattgtggtaaaggatcttggagatcatttagttcaacctattcatgatacaggttattcttttgtctaagagtaccctttgggaatgatcagacacttttctgttgattttttggagaaatatgggagaaacagtggaatatttttatgacatttttaggaaatcacctggcttggttggtagtcccacactgactttccttatgataattctacagatggaggtgacacgagcagtgatgaggataaagaagaacatgaaactcctgtggaagtagaactcatgactcaggttgaccaagaggatatcactcttcagagtggcagagatgaactaaatgaggagctcattcaggaagaaagctctgaagacgaaggagaatatgaagaggttagaaaagatcaggattctgttggtgaaatgaaggatgaaggggaagagacattaaattatcctgatactaccattgacttgtctcaccttcaaccccaaaggtccatccagaaattggcttcaaaagaggaatcttctaattctagtgacagtaaatcacagagccggagacatttgtcagccaaggaaagaagggaaatgaaaaagaaaaaacttccaagtgactcaggagatttagaagcgttagagggaaaggataaagaaaaagaaagtactgtacacattgaaactcatcagaacacaagcaaaaatgttgcggctgtgcagccaatgaaacgaggacaaaagagtaaaatgaaaaaaatgaaagaaaaatacaaagaccaggatgaagaagaccgtgaacttatcatgaagttgctggggtctgcaggttcaaacaaagaagaaaaagggaagaaggggaagaaaggaaaaacaaaggacgaacctgtgaagaaacagccccagaaacctagaggtggacagagggtctctgacaacattaagaaagaaactccgttccttgaggttataactcatgagttacaagactttgctgtagatgatccacatgatgacaaggaagagcaagatctggatcaacagggaaatgaggaaaacctatttgattctttgacaggccagccacatcctgaagatgtactactgtttgccattccaatatgtgccccttacaccaccatgacaaactacaaatataaagtgaaacttactcctggagtgcagaaaaagggaaaagctgcaaaaacagccttgaatagtttcatgcattccaaagaagcaacagcaagagaaaaagacttattccgcagcgtaaaggacacagatttatcaagaaacattcctggcaaagtgaaagtgtctgcacccaatcttctgaacgtaaaaaggaaatagctgaaatgaaattctaaaatatttgagaagagccaattttatagccttttggaagttcaaagatgaaagcaccatgtatcaggatttccgcattataaaaatgaactaaacattgccttgctatattcaccaaaaggacttacttcttgttttttcccagttttatatagaggaaacactgtctatgataggatttccaaaagtatttgtggacagttaaatgctaattaatatacatctgtagttattctacattttcttgaaatttgggaggttaataccaagtattcatttcatgatgtaaagaaactgaacagtgaagtggcttgattgcttaaactattgacttggtaagtctactgtatataacatctaatatatatattacaggccaaatgaactaaacattgccttgctatattcaccaaaaggacttaattcttgtttttttcccagttttatatagaggaaacactatgataggatttcctaaagtatttgtggacagttaaatgctaattatatacatctgtagttattctacattttcttgaaatttgagaggttaataccaagtattcatttcatgatgtaaagaaactgaacagtgaagtggcttgattgcttaaactattgacttggtaagtctactgtatataacatctaatatatatatattataggccagctacaaggggtttaaatatttaggattgtgtcttgaaaactaagtattggagtggattttcttctgctttcattgatacttgtcagaaaaaaatattagaccaaaatgtaaaatataagtaataattctca

SEQ ID NO: 379071 - DNA, 3811 bp, Homo sapiens
gcggaggagaagtggcgtcgagtccggccgggcagtagaggaaattgcggtagtgaccctcgggcctcgccatgaagagccgctttagcaccattgacctccgcgccgtactcgcggagctgaatgctagcttgctaggaatgagagtaaacaatgtttatgatgtggataataagacataccttattcgtcttcaaaaaccggactttaaagctacacttttacttgaatctggcatacgaattcatacaacagaatttgagtggcctaagaatatgatgccgtctagttttgccatgaagtgccgaaaacatttgaagagtcggagattagtcagtgcaaaacagcttggtgtggatagaattgtagattttcaatttggaagtgatgaagctgcttaccatttaatcattgagctctatgatagggggaacattgttcttacagattatgagtacgtaattttaaatattctaaggtttcgaactgatgaggcagatgatgttaaatttgctgttcgtgaacgctatccacttgatcatgctagagctgctgaacctttgcttactttggaaaggttgactgaaatagtagccagcgcacctaagggtgaactactgaagagggtgcttaacccattacttccctatggaccagctctcattgaacactgtcttttagaaaatggattctcgggtaatgtcaaagtggatgaaaaacttgaaactaaagatattgaaaaagtacttgtttctctgcagaaagcagaagactatatgaaaacaacatccaacttcagtgggaagggatatatcattcagaaaagagaaataaaaccatgcttggaagcagataaaccagttgaagacatactgacgtatgaggaatttcatcctttcttgttttctcaacattcacaatgtccatatatagaatttgaatcatttgacaaggcggtggatgaattttattccaagatagaaggccagaaaattgacttaaaagctttacaacaggaaaagcaagcattgaagaaattagataatgttcgaaaggatcacgaaaacagattggaagctcttcagcaggctcaggaaatagacaaactgaaaggagagctcatagaaatgaacctacaaatagttgacagagccattcaggtagttcgaagtgctttagctaaccagatagattggacagaaattgggttaattgtgaaagaagcccaggctcaaggagaccctgttgcaagtgcaatcaaagaattaaaactacaaacaaaccatgttacaatgctgctaagaaatccatacttgttatcagaggaggaagatgatgatgttgatggtgacgtcaatgttgagaaaaatgaaactgaaccaccaaaaggaaaaaagaaaaaacaaaagaataaacagctgcagaagcctcagaaaaataagcccttacttgtagatgttgatctcagcttgtcagcatatgccaatgccaaaaagtattatgatcacaagagatatgctgctaagaaaacacaaaagactgttgaagctgctgagaaggcattcaagtcagcagaaaagaaaacaaagcaaacattaaaagaagttcagactgttacctctattcaaaaagcaagaaaagtatattggtttgagaaatttctgtggttcattagctcagagaactatctaattataggtggacgagatcagcaacagaatgaaataattgtgaaaagatacttgacaccaggagacatttatgtacatgctgatcttcatggagctactagctgtgtaattaagaatccaacaggagaacccatccccccacggaccttgactgaagctggcacaatggcactttgctacagtgctgcttgggatgcacgagttatcactagtgcttggtgggtgtaccatcatcaggtatctaaaacagcaccaactggagaatatttgacaacaggaagcttcatgataagaggaaaaaagaattttcttcctccctcatatctaatgatggggtttagcttcctttttaaggtagatgagtcttgtgtttggagacatcagggtgaacgaaaagtcagagtacaggatgaagacatggagacactggcaagttgtacaagtgaactcatatcagaagaaatggaacaattagatggaggtgacacgagcagtgatgaggataaagaagaacatgaaactcctgtggaagtagaactcatgactcaggttgaccaagaggatatcactcttcagagtggcagagatgaactaaatgaggagctcattcaggaagaaagctctgaagacgaaggagaatatgaagaggttagaaaagatcaggattctgttggtgaaatgaaggatgaaggggaagagacattaaattatcctgatactaccattgacttgtctcaccttcaaccccaaaggtccatccagaaattggcttcaaaagaggaatcttctaattctagtgacagtaaatcacagagccggagacatttgtcagccaaggaaagaagggaaatgaaaaagaaaaaacttccaagtgactcaggagatttagaagcgttagagggaaaggataaagaaaaagaaagtactgtacacattgaaactcatcagaacacaagcaaaaatgttgcggctgtgcagccaatgaaacgaggacaaaagagtaaaatgaaaaaaatgaaagaaaaatacaaagaccaggatgaagaagaccgtgaacttatcatgaagttgctggggtctgcaggttcaaacaaagaagaaaaagggaagaaggggaagaaaggaaaaacaaaggacgaacctgtgaagaaacagccccagaaacctagaggtggacagagggtctctgacaacattaagaaagaaactccgttccttgaggttataactcatgagttacaagactttgctgtagatgatccacatgatgacaaggaagagcaagatctggatcaacagggaaatgaggtatgattttatgttggggttcctactacaacactgtgattacaattcagttcccagaatgtttgaaacacaacttattaaaacttagaaacctaagacaagactgcaggctacgaagtcaaactttcggggtcttaatcccaactctgctatatgtaactgtacaaacttggaaacattctttgtgcctcagtttcctcatctgaagaatggggataatgtccctacccaggagagggttgttttgataactaatgtatgtaaagggcatttagaaaagtttatggcacatagcaaacactcaaatattaattatacttcagcaccaagcattctgtcctaaatctaagtttattcatattgtaaaataaatgggggcaatctcacaggcagcacagcaaataagaactctgggatttctccttaataatgggtaagagagaaggctgttctagcccagggtttctcaactttggcactattaacattaggggttggttaattctttgttgtggggtctgtcccattcattataaaatgtttagcgacatcctcggcctttacccactagatctcagtagcagcccctacctattccttctcacccctcatcgtgtcaacgaaaactatctctagacattgcccattgtcttctgagggcagaatctccccaggacgagaaatagtggtatagccaaggtattagtcccatttccatgtgataggacttaaatctatttgtggttattattgcatcattttaatccacagcaggtttctgcaactcaggtaatatccaatagtttttttcc

SEQ ID NO: 379072 - DNA, 3087 bp, Homo sapiens
  misc_feature (3085)..(3085): n is a, c, g, or t
gcggaggagaagtggcgtcgagtccggccgggcagtagaggaaattgcggtagtgaccctcgggcctcgccatgaagagccgctttagcaccattgacctccgcgccgtactcgcggagctgaatgctagcttgctaggaatgagagtaaacaatgtttatgatgtggataataagacataccttattcgtcttcaaaaaccggactttaaagctacacttttacttgaatctggcatacgaattcatacaacagaatttgagtggcctaagaatatgatgccgtctagttttgccatgaagtgccgaaaacatttgaagagtcggagattagtcagtgcaaaacagcttggtgtggatagaattgtagattttcaatttggaagtgatgaagctgcttaccatttaatcattgagctctatgatagggggaacattgttcttacagattatgagtacgtaattttaaatattctaaggtttcgaactgatgaggcagatgatgttaaatttgctgttcgtgaacgctatccacttgatcatgctagagctgctgaacctttgcttactttggaaaggttgactgaaatagtagccagcgcacctaagggtgaactactgaagagggtgcttaacccattacttccctatggaccagctctcattgaacactgtcttttagaaaatggattctcgggtaatgtcaaagtggatgaaaaacttgaaactaaagatattgaaaaagtacttgtttctctgcagaaagcagaagactatatgaaaacaacatccaacttcagtgggaagggatatatcattcagaaaagagaaataaaaccatgcttggaagcagataaaccagttgaagacatactgacgtatgaggaatttcatcctttcttgttttctcaacattcacaatgtccatatatagaatttgaatcatttgacaaggcggtggatgaattttattccaagatagaaggccagaaaattgacttaaaagctttacaacaggaaaagcaagcattgaagaaattagataatgttcgaaaggatcacgaaaacagattggaagctcttcagcaggctcaggaaatagacaaactgaaaggagagctcatagaaatgaacctacaaatagttgacagagccattcaggtagttcgaagtgctttagctaaccagatagattggacagaaattgggttaattgtgaaagaagcccaggctcaaggagaccctgttgcaagtgcaatcaaagaattaaaactacaaacaaaccatgttacaatgctgctaagaaatccatacttgttatcagaggaggaagatgatgatgttgatggtgacgtcaatgttgagaaaaatgaaactgaaccaccaaaaggaaaaaagaaaaaacaaaagaataaacagctgcagaagcctcagaaaaataagcccttacttgtagatgttgatctcagcttgtcagcatatgccaatgccaaaaagtattatgatcacaagagatatgctgctaagaaaacacaaaagactgttgaagctgctgagaaggcattcaagtcagcagaaaagaaaacaaagcaaacattaaaagaagttcagactgttacctctattcaaaaagcaagaaaagtatattggtttgagaaatttctgtggttcattagctcagagaactatctaattataggtggacgagatcagcaacagaatgaaataattgtgaaaagatacttgacaccaggagacatttatgtacatgctgatcttcatggagctactagctgtgtaattaagaatccaacaggagaacccatccccccacggaccttgactgaagctggcacaatggcactttgctacagtgctgcttgggatgcacgagttatcactagtgcttggtgggtgtaccatcatcaggtatctaaaacagcaccaactggagaatatttgacaacaggaagcttcatgataagaggaaaaaagaattttcttcctccctcatatctaatgatggggtttagcttcctttttaaggtagatgagtcttgtgtttggagacatcagggtgaacgaaaagtcagagtacaggatgaagacatggagacactggcaagttgtacaagtgaactcatatcagaagaaatggaacaattagatggaggtgacacgagcagtgatgaggataaagaagaacatgaaactcctgtggaagtagaactcatgactcaggttgaccaagaggatatcactcttcagagtggcagagatgaactaaatgaggagctcattcaggaagaaagctctgaagacgaaggagaatatgaagaggttagaaaagatcaggattctgttggtgaaatgaaggatgaaggggaagagacattaaattatcctgatactaccattgacttgtctcaccttcaaccccaaaggtccatccagaaattggcttcaaaagaggaatcttctaattctagtgacagtaaatcacagagccggagacatttgtcagccaaggaaagaagggaaatgaaaaagaaaaaacttccaagtgactcaggagatttagaagcgttagagggaaaggataaagaaaaagaaagtactgtacacattgaaactcatcagaacacaagcaaaaatgttgcggctgtgcagccaatgaaacgaggacaaaagagtacaactgaccacacacatgcctagaacacataccacagaccaggatgaagaagaccgtgaaccttatccatgaaagttgcggggtcggcgggtcaaacacacggacgaaccgcaccagcggcacgcacgacaaccaggcgaactgtgaagaaacgggccgaactaaaggggcagagggttcgcacacctagaagaaatcggccgtggtcaccatagctaccactgtcgtgagatccatgggcaggaacgtgggcacacgccaggaaacttgtgttgaggccgacctgaaggctggtgggccagggccacaccgaacaatggagaccgcgggtaggtaacacgtgtcacagaactggggagcgcgggcgagcaacgctgcgcacataaagagngg

SEQ ID NO: 379073 - DNA, 3891 bp, Homo sapiens
  misc_feature (8)..(8): n is a, c, g, or t
  misc_feature (345)..(345): n is a, c, g, or t
ctagatgnctcgaaggaagagcaagatctggatcaagcagggaaatgaggaaaacctatttgattctttgacaggccagccacatcctgaagatgtactactgttgccattccaatatgtgccccttacaccaccatgacaaactacaaatataaagttaaactcacggagacagaaagtagaatggtggctgccaggggctggggagaaaagactatagagagttattaataggttcagagtttcagttttataaaatgaaaataattctgtggataagggtggcaaagatggcacaacaatgtaaatgcactcaataccacagaactgtacacttaaaaagtntcaaaggtggccaggcacagtggctcacgcctgtaatcccagcactttgggaggccgaggcgggtggatcactgaggtcaggagttcaagaccagcctggccaacatggtgaaaccccatctttactgaaaatacaaaaattagctgggcgtggtggcgggcacctgtaatcccagctactcaggaggctgaggcaggagaatcacttgaacccaggaggcggaggttgcagtgagccgagatcgtgccactgcactccagctgggcaacggagcactctgtctcaaaaaaaaagaaaaaaaaataaaattctgtgtatgcaagttgaagtagagactgtgcttttttttccaactagttgtttgtttttttaataaggcggtggatgaattttattccaagatagaaggccagaaaattgacttaaaagctttacaacaggaaaagcaagcattgaagaaattagataatgttcgaaaggatcacgaaaacagattggaagctcttcagcaggctcaggaaatagacaaactgaaaggagagctcatagaaatgaacctacaaatagttgacagagccattcaggtagttcgaagtgctttagctaaccagatagattggacagaaattgggttaattgtgaaagaagcccaggctcaaggagaccctgttgcaagtgcaatcaaagaattaaaactacaaacaaaccatgttacaatgctgctaagaaatccatacttgttatcagaggaggaagatgatgatgttgatggtgacgtcaatgttgagaaaaatgaaactgaaccaccaaaaggaaaaaagaaaaaacaaaagaataaacagctgcagaagcctcagaaaaataagcccttacttgtagatgttgatctcagcttgtcagcatatgccaatgccaaaaagtattatgatcacaagagatatgctgctaagaaaacacaaaagactgttgaagctgctgagaaggcattcaagtcagcagaaaagaaaacaaagcaaacattaaaagaagttcagactgttacctctattcaaaaagcaagaaaagtatattggtttgagaaatttctgtggttcattagctcagagaactatctaattataggtggacgagatcagcaacagaatgaaataattgtgaaaagatacttgacaccaggagacatttatgtacatgctgatcttcatggagctactagctgtgtaattaagaatccaacaggagaacccatccccccacggaccttgactgaagctggcacaatggcactttgctacagtgctgcttgggatgcacgagttatcactagtgcttggtgggtgtaccatcatcaggtatctaaaacagcaccaactggagaatatttgacaacaggaagcttcatgataagaggaaaaaagaattttcttcctccctcatatctaatgatggggtttagcttcctttttaaggtagatgagtcttgtgtttggagacatcagggtgaacgaaaagtcagagtacaggatgaagacatggagacactggcaagttgtacaagtgaactcatatcagaagaaatggaacaattagatggaggtgacacgagcagtgatgaggataaagaagaacatgaaactcctgtggaagtagaactcatgactcaggttgaccaagaggatatcactcttcagagtggcagagatgaactaaatgaggagctcattcaggaagaaagctctgaagacgaaggagaatatgaagaggttagaaaagatcaggattctgttggtgaaatgaaggatgaaggggaagagacattaaattatcctgatactaccattgacttgtctcaccttcaaccccaaaggtccatccagaaattggcttcaaaagaggaatcttctaattctagtgacagtaaatcacagagccggagacatttgtcagccaaggaaagaagggaaatgaaaaagaaaaaacttccaagtgactcaggagatttagaagcgttagagggaaaggataaagaaaaagaaagtactgtacacattgaaactcatcagaacacaagcaaaaatgttgcggctgtgcagccaatgaaacgaggacaaaagagtaaaatgaaaaaaatgaaagaaaaatacaaagaccaggatgaagaagaccgtgaacttatcatgaagttgctggggtctgcaggttcaaacaaagaagaaaaagggaagaaggggaagaaaggaaaaacaaaggacgaacctgtgaagaaacagccccagaaacctagaggtggacagagggtctctgacaacattaagaaagaaactccgttccttgaggttataactcatgagttacaagactttgctgtagatgatccacatgatgacaaggaagagcaagatctggatcaacagggaaatgaggaaaacctatttgattctttgacaggccagccacatcctgaagatgtactactgtttgccattccaatatgtgccccttacaccaccatgacaaactacaaatataaagtgaaacttactcctggagtgcagaaaaagggaaaagctgcaaaaacagccttgaatagtttcatgcattccaaagaagcaacagcaagagaaaaagacttattccgcagcgtaaaggacacagatttatcaagaaacattcctggcaaagtgaaagtgtctgcacccaatcttctgaacgtaaaaaggaaatagctgaaatgaaattctaaaatatttgagaagagccaattttatagccttttggaagttcaaagatgaaagcaccatgtatcaggatttccgcattataaaaatgaactaaacattgccttgctatattcaccaaaaggacttacttcttgttttttcccagttttatatagaggaaacactgtctatgataggatttccaaaagtatttgtggacagttaaatgctaattaatatacatctgtagttattctacattttcttgaaatttgggaggttaataccaagtattcatttcatgatgtaaagaaactgaacagtgaagtggcttgattgcttaaactattgacttggtaagtctactgtatataacatctaatatatatattacaggccaaatgaactaaacattgccttgctatattcaccaaaaggacttaattcttgtttttttcccagttttatatagaggaaacactatgataggatttcctaaagtatttgtggacagttaaatgctaattatatacatctgtagttattctacattttcttgaaatttgagaggttaataccaagtattcatttcatgatgtaaagaaactgaacagtgaagtggcttgattgcttaaactattgacttggtaagtctactgtatataacatctaatatatatatattataggccagctacaaggggtttaaatatttaggattgtgtcttgaaaactaagtattggagtggattttcttctgctttcattgatacttgtcagaaaaaaatattagaccaaaatgtaaaatataagtaataattctca

SEQ ID NO: 379074 - DNA, 3745 bp, Homo sapiens
ggaacacaagtgggaaagagggaaatcctcatctttcccagtgggaagttagtaagaatataaaacagaaaaattaagaagtagcaatataaacatattactaagataaataaaggcaaatatcaaaagaatcaactaaaagagctagaagtggtttccttcggagagcaggcaataggagtaaaggtgaggaactggagaactagctgagtgcagaagcgtatgcctgtaatcctagcactttgggaagctgaggcaggcggatcacgaggtcaggagtttgagaccagcctgaccaacatggcgaaaccctgtctctactaaaaatacaaaaattagctgggtgtggtggtgtacgcctgtaatcccagctactcaggaggctgagacaggagaatcacttgaacctaggaggtggaagttgcagtgagcctagatcgcgccactgcagtcccgcctgggcaacagagtgagactctgtctcaaaaaaaaagaaaaaaaaataaaattctgtgtatgcaagttgaagtagagactgtgcttttttttccaactagttgtttgtttttttaataaggcggtggatgaattttattccaagatagaaggccagaaaattgacttaaaagctttacaacaggaaaagcaagcattgaagaaattagataatgttcgaaaggatcacgaaaacagattggaagctcttcagcaggctcaggaaatagacaaactgaaaggagagctcatagaaatgaacctacaaatagttgacagagccattcaggtagttcgaagtgctttagctaaccagatagattggacagaaattgggttaattgtgaaagaagcccaggctcaaggagaccctgttgcaagtgcaatcaaagaattaaaactacaaacaaaccatgttacaatgctgctaagaaatccatacttgttatcagaggaggaagatgatgatgttgatggtgacgtcaatgttgagaaaaatgaaactgaaccaccaaaaggaaaaaagaaaaaacaaaagaataaacagctgcagaagcctcagaaaaataagcccttacttgtagatgttgatctcagcttgtcagcatatgccaatgccaaaaagtattatgatcacaagagatatgctgctaagaaaacacaaaagactgttgaagctgctgagaaggcattcaagtcagcagaaaagaaaacaaagcaaacattaaaagaagttcagactgttacctctattcaaaaagcaagaaaagtatattggtttgagaaatttctgtggttcattagctcagagaactatctaattataggtggacgagatcagcaacagaatgaaataattgtgaaaagatacttgacaccaggagacatttatgtacatgctgatcttcatggagctactagctgtgtaattaagaatccaacaggagaacccatccccccacggaccttgactgaagctggcacaatggcactttgctacagtgctgcttgggatgcacgagttatcactagtgcttggtgggtgtaccatcatcaggtatctaaaacagcaccaactggagaatatttgacaacaggaagcttcatgataagaggaaaaaagaattttcttcctccctcatatctaatgatggggtttagcttcctttttaaggtagatgagtcttgtgtttggagacatcagggtgaacgaaaagtcagagtacaggatgaagacatggagacactggcaagttgtacaagtgaactcatatcagaagaaatggaacaattagatggaggtgacacgagcagtgatgaggataaagaagaacatgaaactcctgtggaagtagaactcatgactcaggttgaccaagaggatatcactcttcagagtggcagagatgaactaaatgaggagctcattcaggaagaaagctctgaagacgaaggagaatatgaagaggttagaaaagatcaggattctgttggtgaaatgaaggatgaaggggaagagacattaaattatcctgatactaccattgacttgtctcaccttcaaccccaaaggtccatccagaaattggcttcaaaagaggaatcttctaattctagtgacagtaaatcacagagccggagacatttgtcagccaaggaaagaagggaaatgaaaaagaaaaaacttccaagtgactcaggagatttagaagcgttagagggaaaggataaagaaaaagaaagtactgtacacattgaaactcatcagaacacaagcaaaaatgttgcggctgtgcagccaatgaaacgaggacaaaagagtaaaatgaaaaaaatgaaagaaaaatacaaagaccaggatgaagaagaccgtgaacttatcatgaagttgctggggtctgcaggttcaaacaaagaagaaaaagggaagaaggggaagaaaggaaaaacaaaggacgaacctgtgaagaaacagccccagaaacctagaggtggacagagggtctctgacaacattaagaaagaaactccgttccttgaggttataactcatgagttacaagactttgctgtagatgatccacatgatgacaaggaagagcaagatctggatcaacagggaaatgaggaaaacctatttgattctttgacaggccagccacatcctgaagatgtactactgtttgccattccaatatgtgccccttacaccaccatgacaaactacaaatataaagtgaaacttactcctggagtgcagaaaaagggaaaagctgcaaaaacagccttgaatagtttcatgcattccaaagaagcaacagcaagagaaaaagacttattccgcagcgtaaaggacacagatttatcaagaaacattcctggcaaagtgaaagtgtctgcacccaatcttctgaacgtaaaaaggaaatagctgaaatgaaattctaaaatatttgagaagagccaattttatagccttttggaagttcaaagatgaaagcaccatgtatcaggatttccgcattataaaaatgaactaaacattgccttgctatattcaccaaaaggacttacttcttgttttttcccagttttatatagaggaaacactgtctatgataggatttccaaaagtatttgtggacagttaaatgctaattaatatacatctgtagttattctacattttcttgaaatttgggaggttaataccaagtattcatttcatgatgtaaagaaactgaacagtgaagtggcttgattgcttaaactattgacttggtaagtctactgtatataacatctaatatatatattacaggccaaatgaactaaacattgccttgctatattcaccaaaaggacttaattcttgtttttttcccagttttatatagaggaaacactatgataggatttcctaaagtatttgtggacagttaaatgctaattatatacatctgtagttattctacattttcttgaaatttgagaggttaataccaagtattcatttcatgatgtaaagaaactgaacagtgaagtggcttgattgcttaaactattgacttggtaagtctactgtatataacatctaatatatatatattataggccagctacaaggggtttaaatatttaggattgtgtcttgaaaactaagtattggagtggattttcttctgctttcattgatacttgtcagaaaaaaatattagaccaaaatgtaaaatataagtaataattctca

SEQ ID NO: 379075 - DNA, 3871 bp, Homo sapiens
  misc_feature (8)..(8): n is a, c, g, or t
  misc_feature (345)..(345): n is a, c, g, or t
ctagatgnctcgaaggaagagcaagatctggatcaagcagggaaatgaggaaaacctatttgattctttgacaggccagccacatcctgaagatgtactactgttgccattccaatatgtgccccttacaccaccatgacaaactacaaatataaagttaaactcacggagacagaaagtagaatggtggctgccaggggctggggagaaaagactatagagagttattaataggttcagagtttcagttttataaaatgaaaataattctgtggataagggtggcaaagatggcacaacaatgtaaatgcactcaataccacagaactgtacacttaaaaagtntcaaaggtggccaggcacagtggctcacgcctgtaatcccagcactttgggaggccgaggcgggtggatcactgaggtcaggagttcaagaccagcctggccaacatggtgaaaccccatctttactgaaaatacaaaaattagctgggcgtggtggcgggcacctgtaatcccagctactcaggaggctgaggcaggagaatcacttgaacccaggaggcggaggttgcagtgagccgagatcgtgccactgcactccagctgggcaacggagcactctgtctcaaaaaaaaagaaaaaaaaataaaattctgtgtatgcaagttgaagtagagactgtgcttttttttccaactagttgtttgtttttttaataaggcggtggatgaattttattccaagatagaaggccagaaaattgacttaaaagctttacaacaggaaaagcaagcattgaagaaattagataatgttcgaaaggatcacgaaaacagattggaagctcttcagcaggctcaggaaatagacaaactgaaaggagagctcatagaaatgaacctacaaatagttgacagagccattcaggtagttcgaagtgctttagctaaccagatagattggacagaaattgggttaattgtgaaagaagcccaggctcaaggagaccctgttgcaagtgcaatcaaagaattaaaactacaaacaaaccatgttacaatgctgctaagaggaggaagatgatgatgttgatggtgacgtcaatgttgagaaaaatgaaactgaaccaccaaaaggaaaaaagaaaaaacaaaagaataaacagctgcagaagcctcagaaaaataagcccttacttgtagatgttgatctcagcttgtcagcatatgccaatgccaaaaagtattatgatcacaagagatatgctgctaagaaaacacaaaagactgttgaagctgctgagaaggcattcaagtcagcagaaaagaaaacaaagcaaacattaaaagaagttcagactgttacctctattcaaaaagcaagaaaagtatattggtttgagaaatttctgtggttcattagctcagagaactatctaattataggtggacgagatcagcaacagaatgaaataattgtgaaaagatacttgacaccaggagacatttatgtacatgctgatcttcatggagctactagctgtgtaattaagaatccaacaggagaacccatccccccacggaccttgactgaagctggcacaatggcactttgctacagtgctgcttgggatgcacgagttatcactagtgcttggtgggtgtaccatcatcaggtatctaaaacagcaccaactggagaatatttgacaacaggaagcttcatgataagaggaaaaaagaattttcttcctccctcatatctaatgatggggtttagcttcctttttaaggtagatgagtcttgtgtttggagacatcagggtgaacgaaaagtcagagtacaggatgaagacatggagacactggcaagttgtacaagtgaactcatatcagaagaaatggaacaattagatggaggtgacacgagcagtgatgaggataaagaagaacatgaaactcctgtggaagtagaactcatgactcaggttgaccaagaggatatcactcttcagagtggcagagatgaactaaatgaggagctcattcaggaagaaagctctgaagacgaaggagaatatgaagaggttagaaaagatcaggattctgttggtgaaatgaaggatgaaggggaagagacattaaattatcctgatactaccattgacttgtctcaccttcaaccccaaaggtccatccagaaattggcttcaaaagaggaatcttctaattctagtgacagtaaatcacagagccggagacatttgtcagccaaggaaagaagggaaatgaaaaagaaaaaacttccaagtgactcaggagatttagaagcgttagagggaaaggataaagaaaaagaaagtactgtacacattgaaactcatcagaacacaagcaaaaatgttgcggctgtgcagccaatgaaacgaggacaaaagagtaaaatgaaaaaaatgaaagaaaaatacaaagaccaggatgaagaagaccgtgaacttatcatgaagttgctggggtctgcaggttcaaacaaagaagaaaaagggaagaaggggaagaaaggaaaaacaaaggacgaacctgtgaagaaacagccccagaaacctagaggtggacagagggtctctgacaacattaagaaagaaactccgttccttgaggttataactcatgagttacaagactttgctgtagatgatccacatgatgacaaggaagagcaagatctggatcaacagggaaatgaggaaaacctatttgattctttgacaggccagccacatcctgaagatgtactactgtttgccattccaatatgtgccccttacaccaccatgacaaactacaaatataaagtgaaacttactcctggagtgcagaaaaagggaaaagctgcaaaaacagccttgaatagtttcatgcattccaaagaagcaacagcaagagaaaaagacttattccgcagcgtaaaggacacagatttatcaagaaacattcctggcaaagtgaaagtgtctgcacccaatcttctgaacgtaaaaaggaaatagctgaaatgaaattctaaaatatttgagaagagccaattttatagccttttggaagttcaaagatgaaagcaccatgtatcaggatttccgcattataaaaatgaactaaacattgccttgctatattcaccaaaaggacttacttcttgttttttcccagttttatatagaggaaacactgtctatgataggatttccaaaagtatttgtggacagttaaatgctaattaatatacatctgtagttattctacattttcttgaaatttgggaggttaataccaagtattcatttcatgatgtaaagaaactgaacagtgaagtggcttgattgcttaaactattgacttggtaagtctactgtatataacatctaatatatatattacaggccaaatgaactaaacattgccttgctatattcaccaaaaggacttaattcttgtttttttcccagttttatatagaggaaacactatgataggatttcctaaagtatttgtggacagttaaatgctaattatatacatctgtagttattctacattttcttgaaatttgagaggttaataccaagtattcatttcatgatgtaaagaaactgaacagtgaagtggcttgattgcttaaactattgacttggtaagtctactgtatataacatctaatatatatatattataggccagctacaaggggtttaaatatttaggattgtgtcttgaaaactaagtattggagtggattttcttctgctttcattgatacttgtcagaaaaaaatattagaccaaaatgtaaaatataagtaataattctca

SEQ ID NO: 379076 - DNA, 3041 bp, Homo sapiens
acttcgagctttgtaccctgtcgctgtgtctcaggaaatagacaaactgaaaggagagctcatagaaatgaacctacaaatagttgacagagccattcaggtagttcgaagtgctttagctaaccagatagattggacagaaattgggttaattgtgaaagaagcccaggctcaaggagaccctgttgcaagtgcaatcaaagaattaaaactacaaacaaaccatgttacaatgctgctaagaggaggaagatgatgatgttgatggtgacgtcaatgttgagaaaaatgaaactgaaccaccaaaaggaaaaaagaaaaaacaaaagaataaacagctgcagaagcctcagaaaaataagcccttacttgtagatgttgatctcagcttgtcagcatatgccaatgccaaaaagtattatgatcacaagagatatgctgctaagaaaacacaaaagactgttgaagctgctgagaaggcattcaagtcagcagaaaagaaaacaaagcaaacattaaaagaagttcagactgttacctctattcaaaaagcaagaaaagtatattggtttgagaaatttctgtggttcattagctcagagaactatctaattataggtggacgagatcagcaacagaatgaaataattgtgaaaagatacttgacaccaggagacatttatgtacatgctgatcttcatggagctactagctgtgtaattaagaatccaacaggagaacccatccccccacggaccttgactgaagctggcacaatggcactttgctacagtgctgcttgggatgcacgagttatcactagtgcttggtgggtgtaccatcatcaggtatctaaaacagcaccaactggagaatatttgacaacaggaagcttcatgataagaggaaaaaagaattttcttcctccctcatatctaatgatggggtttagcttcctttttaaggtagatgagtcttgtgtttggagacatcagggtgaacgaaaagtcagagtacaggatgaagacatggagacactggcaagttgtacaagtgaactcatatcagaagaaatggaacaattagatggaggtgacacgagcagtgatgaggataaagaagaacatgaaactcctgtggaagtagaactcatgactcaggttgaccaagaggatatcactcttcagagtggcagagatgaactaaatgaggagctcattcaggaagaaagctctgaagacgaaggagaatatgaagaggttagaaaagatcaggattctgttggtgaaatgaaggatgaaggggaagagacattaaattatcctgatactaccattgacttgtctcaccttcaaccccaaaggtccatccagaaattggcttcaaaagaggaatcttctaattctagtgacagtaaatcacagagccggagacatttgtcagccaaggaaagaagggaaatgaaaaagaaaaaacttccaagtgactcaggagatttagaagcgttagagggaaaggataaagaaaaagaaagtactgtacacattgaaactcatcagaacacaagcaaaaatgttgcggctgtgcagccaatgaaacgaggacaaaagagtaaaatgaaaaaaatgaaagaaaaatacaaagaccaggatgaagaagaccgtgaacttatcatgaagttgctggggtctgcaggttcaaacaaagaagaaaaagggaagaaggggaagaaaggaaaaacaaaggacgaacctgtgaagaaacagccccagaaacctagaggtggacagagggtctctgacaacattaagaaagaaactccgttccttgaggttataactcatgagttacaagactttgctgtagatgatccacatgatgacaaggaagagcaagatctggatcaacagggaaatgaggaaaacctatttgattctttgacaggccagccacatcctgaagatgtactactgtttgccattccaatatgtgccccttacaccaccatgacaaactacaaatataaagtgaaacttactcctggagtgcagaaaaagggaaaagctgcaaaaacagccttgaatagtttcatgcattccaaagaagcaacagcaagagaaaaagacttattccgcagcgtaaaggacacagatttatcaagaaacattcctggcaaagtgaaagtgtctgcacccaatcttctgaacgtaaaaaggaaatagctgaaatgaaattctaaaatatttgagaagagccaattttatagccttttggaagttcaaagatgaaagcaccatgtatcaggatttccgcattataaaaatgaactaaacattgccttgctatattcaccaaaaggacttacttcttgttttttcccagttttatatagaggaaacactgtctatgataggatttccaaaagtatttgtggacagttaaatgctaattaatatacatctgtagttattctacattttcttgaaatttgggaggttaataccaagtattcatttcatgatgtaaagaaactgaacagtgaagtggcttgattgcttaaactattgacttggtaagtctactgtatataacatctaatatatatattacaggccaaatgaactaaacattgccttgctatattcaccaaaaggacttaattcttgtttttttcccagttttatatagaggaaacactatgataggatttcctaaagtatttgtggacagttaaatgctaattatatacatctgtagttattctacattttcttgaaatttgagaggttaataccaagtattcatttcatgatgtaaagaaactgaacagtgaagtggcttgattgcttaaactattgacttggtaagtctactgtatataacatctaatatatatatattataggccagctacaaggggtttaaatatttaggattgtgtcttgaaaactaagtattggagtggattttcttctgctttcattgatacttgtcagaaaaaaatattagaccaaaatgtaaaatataagtaataattctca

SEQ ID NO: 379077 - DNA, 2784 bp, Homo sapiens
gaggatccccaatgtcgtctcctacctgacgaagagtcagagtacaggatgaagacatggagacactggcaagttgtacaagtgaactcatatcagaaaaataagcccttacttgtagatgttgatctcagcttgtcagcatatgccaatgccaaaaagtattatgatcacaagagatatgctgctaagaaaacacaaaagactgttgaagctgctgagaaggcattcaagtcagcagaaaagaaaacaaagcaaacattaaaagaagttcagactgttacctctattcaaaaagcaagaaaagtatattggtttgagaaatttctgtggttcattagctcagagaactatctaattataggtggacgagatcagcaacagaatgaaataattgtgaaaagatacttgacaccaggagacatttatgtacatgctgatcttcatggagctactagctgtgtaattaagaatccaacaggagaacccatccccccacggaccttgactgaagctggcacaatggcactttgctacagtgctgcttgggatgcacgagttatcactagtgcttggtgggtgtaccatcatcaggtatctaaaacagcaccaactggagaatatttgacaacaggaagcttcatgataagaggaaaaaagaattttcttcctccctcatatctaatgatggggtttagcttcctttttaaggtagatgagtcttgtgtttggagacatcagggtgaacgaaaagtcagagtacaggatgaagacatggagacactggcaagttgtacaagtgaactcatatcagaagaaatggaacaattagatggaggtgacacgagcagtgatgaggataaagaagaacatgaaactcctgtggaagtagaactcatgactcaggttgaccaagaggatatcactcttcagagtggcagagatgaactaaatgaggagctcattcaggaagaaagctctgaagacgaaggagaatatgaagaggttagaaaagatcaggattctgttggtgaaatgaaggatgaaggggaagagacattaaattatcctgatactaccattgacttgtctcaccttcaaccccaaaggtccatccagaaattggcttcaaaagaggaatcttctaattctagtgacagtaaatcacagagccggagacatttgtcagccaaggaaagaagggaaatgaaaaagaaaaaacttccaagtgactcaggagatttagaagcgttagagggaaaggataaagaaaaagaaagtactgtacacattgaaactcatcagaacacaagcaaaaatgttgcggctgtgcagccaatgaaacgaggacaaaagagtaaaatgaaaaaaatgaaagaaaaatacaaagaccaggatgaagaagaccgtgaacttatcatgaagttgctggggtctgcaggttcaaacaaagaagaaaaagggaagaaggggaagaaaggaaaaacaaaggacgaacctgtgaagaaacagccccagaaacctagaggtggacagagggtctctgacaacattaagaaagaaactccgttccttgaggttataactcatgagttacaagactttgctgtagatgatccacatgatgacaaggaagagcaagatctggatcaacagggaaatgaggaaaacctatttgattctttgacaggccagccacatcctgaagatgtactactgtttgccattccaatatgtgccccttacaccaccatgacaaactacaaatataaagtgaaacttactcctggagtgcagaaaaagggaaaagctgcaaaaacagccttgaatagtttcatgcattccaaagaagcaacagcaagagaaaaagacttattccgcagcgtaaaggacacagatttatcaagaaacattcctggcaaagtgaaagtgtctgcacccaatcttctgaacgtaaaaaggaaatagctgaaatgaaattctaaaatatttgagaagagccaattttatagccttttggaagttcaaagatgaaagcaccatgtatcaggatttccgcattataaaaatgaactaaacattgccttgctatattcaccaaaaggacttacttcttgttttttcccagttttatatagaggaaacactgtctatgataggatttccaaaagtatttgtggacagttaaatgctaattaatatacatctgtagttattctacattttcttgaaatttgggaggttaataccaagtattcatttcatgatgtaaagaaactgaacagtgaagtggcttgattgcttaaactattgacttggtaagtctactgtatataacatctaatatatatattacaggccaaatgaactaaacattgccttgctatattcaccaaaaggacttaattcttgtttttttcccagttttatatagaggaaacactatgataggatttcctaaagtatttgtggacagttaaatgctaattatatacatctgtagttattctacattttcttgaaatttgagaggttaataccaagtattcatttcatgatgtaaagaaactgaacagtgaagtggcttgattgcttaaactattgacttggtaagtctactgtatataacatctaatatatatatattataggccagctacaaggggtttaaatatttaggattgtgtcttgaaaactaagtattggagtggattttcttctgctttcattgatacttgtcagaaaaaaatattagaccaaaatgtaaaatataagtaataattctca

SEQ ID NO: 379078 - DNA, 2066 bp, Homo sapiens
  misc_feature (1734)..(1734): n is a, c, g, or t
  misc_feature (1784)..(1784): n is a, c, g, or t
  misc_feature (2027)..(2027): n is a, c, g, or t
gcggaggagaagtggcgtcgagtccggccgggcagtagaggaaattgcggtagtgaccctcgggcctcgccatgaagagccgctttagcaccattgacctccgcgccgtactcgcggagctgaatgctagcttgctaggaatgagagtaaacaatgtttatgatgtggataataagacataccttattcgtcttcaaaaaccggactttaaagctacacttttacttgaatctggcatacgaattcatacaacagaatttgagtggcctaagaatatgatgccgtctagttttgccatgaagtgccgaaaacatttgaagagtcggagattagtcagtgcaaaacagcttggtgtggatagaattgtagattttcaatttggaagtgatgaagctgcttaccatttaatcattgagctctatgatagggggaacattgttcttacagattatgagtacgtaattttaaatattctaaggtttcgaactgatgaggcagatgatgttaaatttgctgttcgtgaacgctatccacttgatcatgctagagctgctgaacctttgcttactttggaaaggttgactgaaatagtagccagcgcacctaagggtgaactactgaagagggtgcttaacccattacttccctatggaccagctctcattgaacactgtcttttagaaaatggattctcgggtaatgtcaaagtggatgaaaaacttgaaactaaagatattgaaaaagtacttgtttctctgcagaaagcagaagactatatgaaaacaacatccaacttcagtgggaagggatatatcattcagaaaagagaaataaaaccatgcttggaagcagataaaccagttgaagacatactgacgtatgaggaatttcatcctttcttgttttctcaacattcacaatgtccatatatagaatttgaatcatttgacaaggcggtggatgaattttattccaagatagaaggccagaaaattgacttaaaagctttacaacaggaaaagcaagcattgaagaaattagataatgttcgaaaggatcacgaaaacagattggaagctcttcagcaggctcaggaaatagacaaactgaaaggagagctcatagaaatgaacctacaaatagttgacagagccattcaggtagttcgaagtgctttagctaaccagatagattggacagaaattgggttaattgtgaaagaagcccaggctcaaggagaccctgttgcaagtgcaatcaaagaattaaaactacaaacaaaccatgttacaatgctgctaagaaatccatacttgttatcagaggaggaagatgatgatgttgatggtgacgtcaatgttgagaaaaatgaaactgaaccaccaaaaggaaaaaagaaaaaacaaaagaataaacagctgcagaagcctcagaaaaataagcccttacttgtagatgttgatctcagcttgtcagcatatgccaatgccaaaaagtattatgatcacaagagatatgctgctaagaaaacacaaaagactgttgaagctgctgagaaggcattcaagtcagcagaaaagaaaacaaagcaaacattaaaagaagttcagactgttacctctattcaaaaagcaagaaaagtatattggttgacctgaaatagtagccagcgcaccctaagggtgaacctacctgaagagggtgcttaacccattacttccctatggaccagcntctcattgaacacctgtcttttagaaaatggattctccgggtaatgtcanagtggatgaaaaacttgaaactaaagatattgaaaaagtacttgtttctctgcagaaagcagaagactatatgaaaacaacatccaacttcagtgggaaggtagcaccatgtatacttactatatattgttgtgatttatttgggttttcagaaattaaacgttcattaaaggatcattatatatacattttattttaatttggaaaattgttatctgtaatatgcttattccaggatagttnttttggtttgtttttcaagactctttctccaaaaaaaaa

SEQ ID NO: 379079 - DNA, 1981 bp, Homo sapiens
tgcagccaatgaaacgaggaccaaagatggaggtgacacgagcagtgatgaggataaagaagaacatgaaactcctgtggaagtagaactcatgactcaggttgaccaagaggatatcactcttcagagtggcagagatgaactaaatgaggagctcattcaggaagaaagctctgaagacgaaggagaatatgaagaggttagaaaagatcaggattctgttggtgaaatgaaggatgaaggggaagagacattaaattatcctgatactaccattgacttgtctcaccttcaaccccaaaggtccatccagaaattggcttcaaaagaggaatcttctaattctagtgacagtaaatcacagagccggagacatttgtcagccaaggaaagaagggaaatgaaaaagaaaaaacttccaagtgactcaggagatttagaagcgttagagggaaaggataaagaaaaagaaagtactgtacacattgaaactcatcagaacacaagcaaaaatgttgcggctgtgcagccaatgaaacgaggacaaaagagtaaaatgaaaaaaatgaaagaaaaatacaaagaccaggatgaagaagaccgtgaacttatcatgaagttgctggggtctgcaggttcaaacaaagaagaaaaagggaagaaggggaagaaaggaaaaacaaaggacgaacctgtgaagaaacagccccagaaacctagaggtggacagagggtctctgacaacattaagaaagaaactccgttccttgaggttataactcatgagttacaagactttgctgtagatgatccacatgatgacaaggaagagcaagatctggatcaacagggaaatgaggaaaacctatttgattctttgacaggccagccacatcctgaagatgtactactgtttgccattccaatatgtgccccttacaccaccatgacaaactacaaatataaagtgaaacttactcctggagtgcagaaaaagggaaaagctgcaaaaacagccttgaatagtttcatgcattccaaagaagcaacagcaagagaaaaagacttattccgcagcgtaaaggacacagatttatcaagaaacattcctggcaaagtgaaagtgtctgcacccaatcttctgaacgtaaaaaggaaatagctgaaatgaaattctaaaatatttgagaagagccaattttatagccttttggaagttcaaagatgaaagcaccatgtatcaggatttccgcattataaaaatgaactaaacattgccttgctatattcaccaaaaggacttacttcttgttttttcccagttttatatagaggaaacactgtctatgataggatttccaaaagtatttgtggacagttaaatgctaattaatatacatctgtagttattctacattttcttgaaatttgggaggttaataccaagtattcatttcatgatgtaaagaaactgaacagtgaagtggcttgattgcttaaactattgacttggtaagtctactgtatataacatctaatatatatattacaggccaaatgaactaaacattgccttgctatattcaccaaaaggacttaattcttgtttttttcccagttttatatagaggaaacactatgataggatttcctaaagtatttgtggacagttaaatgctaattatatacatctgtagttattctacattttcttgaaatttgagaggttaataccaagtattcatttcatgatgtaaagaaactgaacagtgaagtggcttgattgcttaaactattgacttggtaagtctactgtatataacatctaatatatatatattataggccagctacaaggggtttaaatatttaggattgtgtcttgaaaactaagtattggagtggattttcttctgctttcattgatacttgtcagaaaaaaatattagaccaaaatgtaaaatataagtaataattctca

SEQ ID NO: 379080 - DNA, 1897 bp, Homo sapiens
ctagtagagactcccttgtgtttattttcataggtccatccagaaattggcttcaaaagaggaatcttctaattctagtgacagtaaatcacagagccggagacatttgtcagccaaggaaagaagagatggggtttcaccgtgttaggcaggattgtctcgatcttctgacctcgcgatccacccgccttggcctcccaaagtgctggattacagtcaaccaaccggtcaacagatgttttattgaatgcctaagacctgccaatgctatgttggtacaaagactacaaatcccagtgcctggccatcaagggaaatgaaaaagaaaaaacttccaagtgactcaggagatttagaagcgttagagggaaaggataaagaaaaagaaagtactgtacacattgaaactcatcagaacacaagcaaaaatgttgcggctgtgcagccaatgaaacgaggacaaaagagtaaaatgaaaaaaatgaaagaaaaatacaaagaccaggatgaagaagaccgtgaacttatcatgaagttgctggggtctgcaggttcaaacaaagaagaaaaagggaagaaggggaagaaaggaaaaacaaaggacgaacctgtgaagaaacagccccagaaacctagaggtggacagagggtctctgacaacattaagaaagaaactccgttccttgaggttataactcatgagttacaagactttgctgtagatgatccacatgatgacaaggaagagcaagatctggatcaacagggaaatgaggaaaacctatttgattctttgacaggccagccacatcctgaagatgtactactgtttgccattccaatatgtgccccttacaccaccatgacaaactacaaatataaagtgaaacttactcctggagtgcagaaaaagggaaaagctgcaaaaacagccttgaatagtttcatgcattccaaagaagcaacagcaagagaaaaagacttattccgcagcgtaaaggacacagatttatcaagaaacattcctggcaaagtgaaagtgtctgcacccaatcttctgaacgtaaaaaggaaatagctgaaatgaaattctaaaatatttgagaagagccaattttatagccttttggaagttcaaagatgaaagcaccatgtatcaggatttccgcattataaaaatgaactaaacattgccttgctatattcaccaaaaggacttacttcttgttttttcccagttttatatagaggaaacactgtctatgataggatttccaaaagtatttgtggacagttaaatgctaattaatatacatctgtagttattctacattttcttgaaatttgggaggttaataccaagtattcatttcatgatgtaaagaaactgaacagtgaagtggcttgattgcttaaactattgacttggtaagtctactgtatataacatctaatatatatattacaggccaaatgaactaaacattgccttgctatattcaccaaaaggacttaattcttgtttttttcccagttttatatagaggaaacactatgataggatttcctaaagtatttgtggacagttaaatgctaattatatacatctgtagttattctacattttcttgaaatttgagaggttaataccaagtattcatttcatgatgtaaagaaactgaacagtgaagtggcttgattgcttaaactattgacttggtaagtctactgtatataacatctaatatatatatattataggccagctacaaggggtttaaatatttaggattgtgtcttgaaaactaagtattggagtggattttcttctgctttcattgatacttgtcagaaaaaaatattagaccaaaatgtaaaatataagtaataattctca

SEQ ID NO: 379081 - DNA, 1867 bp, Homo sapiens
ttttgagacagggtctctgtcacccaggctggtgtcacccagtgcagtgacaggatcatggctctccacaacgtctacctcctgggctcaggtgatcctccccccctcagtcttctgagtagctgggactacaggcacccactatacccagctaacttttatattttttgtagagatggtgtttctccatgttgcttaggctggtcttgaactcctgggctcaagcgatccacccgcctcagcctgagccttccagagtcctaggattataggcgtgaaccactgctcctgggccttctttctcttaaatgtaactgtaggtaggattttgaaaattattgttctcattacttattatgctaggcaaaaattaagtagtaaagaatatatttaaacattggtcttcaactctttgggaactatgaagcagagtttaagtaccactgttccagcttagatggtatgtatatcaggaaaagataaaaaatatgttgagatactaattcaagtgttttagcattttttgtaaagggcggtataaattgcctttgtaactgttattttccctttttaggaaaacctatttgattctttgacaggccagccacatcctgaagatgtactactgtttgccattccaatatgtgccccttacaccaccatgacaaactacaagtaagttaccattagttgacagaatggcttttgtgaattgttttgtaacatctatttagtaacacatgtaattcctttttaaagatataaagtgaaacttactcctggagtgcagaaaaagggaaaaggtatttaaatttgtttttttgaattatgattttaaacagttcagtgacttaacagtagattattcttactcttttttgtatttacagctgcaaaaacagccttgaatagtttcatgcattccaaagaagcaacagcaagagaaaaagacttattccgcagcgtaaaggacacagatttatcaagaaacattcctggcaaagtgaaagtgtctgcacccaatcttctgaacgtaaaaaggaaatagctgaaatgaaattctaaaatatttgagaagagccaattttatagccttttggaagttcaaagatgaaagcaccatgtatcaggatttccgcattataaaaatgaactaaacattgccttgctatattcaccaaaaggacttacttcttgttttttcccagttttatatagaggaaacactgtctatgataggatttccaaaagtatttgtggacagttaaatgctaattaatatacatctgtagttattctacattttcttgaaatttgggaggttaataccaagtattcatttcatgatgtaaagaaactgaacagtgaagtggcttgattgcttaaactattgacttggtaagtctactgtatataacatctaatatatatattacaggccaaatgaactaaacattgccttgctatattcaccaaaaggacttaattcttgtttttttcccagttttatatagaggaaacactatgataggatttcctaaagtatttgtggacagttaaatgctaattatatacatctgtagttattctacattttcttgaaatttgagaggttaataccaagtattcatttcatgatgtaaagaaactgaacagtgaagtggcttgattgcttaaactattgacttggtaagtctactgtatataacatctaatatatatatattataggccagctacaaggggtttaaatatttaggattgtgtcttgaaaactaagtattggagtggattttcttctgctttcattgatacttgtcagaaaaaaatattagaccaaaatgtaaaatataagtaataattctca

SEQ ID NO: 379082 - DNA, 1696 bp, Homo sapiens
ttttgagacagggtctctgtcacccaggctggtgtcacccagtgcagtgacaggatcatggctctccacaacgtctacctcctgggctcaggtgatcctccccccctcagtcttctgagtagctgggactacaggcacccactatacccagctaacttttatattttttgtagagatggtgtttctccatgttgcttaggctggtcttgaactcctgggctcaagcgatccacccgcctcagcctgagccttccagagtcctaggattataggcgtgaaccactgctcctgggccttctttctcttaaatgtaactgtaggtaggattttgaaaattattgttctcattacttattatgctaggcaaaaattaagtagtaaagaatatatttaaacattggtcttcaactctttgggaactatgaagcagagtttaagtaccactgttccagcttagatggtatgtatatcaggaaaagataaaaaatatgttgagatactaattcaagtgttttagcattttttgtaaagggcggtataaattgcctttgtaactgttattttccctttttaggaaaacctatttgattctttgacaggccagccacatcctgaagatgtactactgtttgccattccaatatgtgccccttacaccaccatgacaaactacaaatataaagtgaaacttactcctggagtgcagaaaaagggaaaagctgcaaaaacagccttgaatagtttcatgcattccaaagaagcaacagcaagagaaaaagacttattccgcagcgtaaaggacacagatttatcaagaaacattcctggcaaagtgaaagtgtctgcacccaatcttctgaacgtaaaaaggaaatagctgaaatgaaattctaaaatatttgagaagagccaattttatagccttttggaagttcaaagatgaaagcaccatgtatcaggatttccgcattataaaaatgaactaaacattgccttgctatattcaccaaaaggacttacttcttgttttttcccagttttatatagaggaaacactgtctatgataggatttccaaaagtatttgtggacagttaaatgctaattaatatacatctgtagttattctacattttcttgaaatttgggaggttaataccaagtattcatttcatgatgtaaagaaactgaacagtgaagtggcttgattgcttaaactattgacttggtaagtctactgtatataacatctaatatatatattacaggccaaatgaactaaacattgccttgctatattcaccaaaaggacttaattcttgtttttttcccagttttatatagaggaaacactatgataggatttcctaaagtatttgtggacagttaaatgctaattatatacatctgtagttattctacattttcttgaaatttgagaggttaataccaagtattcatttcatgatgtaaagaaactgaacagtgaagtggcttgattgcttaaactattgacttggtaagtctactgtatataacatctaatatatatatattataggccagctacaaggggtttaaatatttaggattgtgtcttgaaaactaagtattggagtggattttcttctgctttcattgatacttgtcagaaaaaaatattagaccaaaatgtaaaatataagtaataattctca

SEQ ID NO: 379083 - DNA, 1066 bp, Homo sapiens
aagttaactcgtgctatcgtgcagcagaggaactctgctgtggtagctagctcatatgatgttcatgctatgcatggttaccatagcatccactggcaaaagaacgtcgactaattccgtcaacgttctactgacagctaggtctctcaggagacatacctggtaatgggatacgggtctagcggcccaacatgcgtaacttggaaacgatcagaggatacggagaatcatgtgagtgtgatgtgctgagagtattgtgatgaagtaggcgtagttgtgtatagtcctcttatggtaatgattctatagatgaagaggacgctagtgtatcgatgcgcattataaaaatgaactaaacattgccttgctatattcaccaaaaggacttacttcttgttttttcccagttttatatagaggaaacactgtctatgataggatttccaaaagtatttgtggacagttaaatgctaattaatatacatctgtagttattctacattttcttgaaatttgggaggttaataccaagtattcatttcatgatgtaaagaaactgaacagtgaagtggcttgattgcttaaactattgacttggtaagtctactgtatataacatctaatatatatattacaggccaaatgaactaaacattgccttgctatattcaccaaaaggacttaattcttgtttttttcccagttttatatagaggaaacactatgataggatttcctaaagtatttgtggacagttaaatgctaattatatacatctgtagttattctacattttcttgaaatttgagaggttaataccaagtattcatttcatgatgtaaagaaactgaacagtgaagtggcttgattgcttaaactattgacttggtaagtctactgtatataacatctaatatatatatattataggccagctacaaggggtttaaatatttaggattgtgtcttgaaaactaagtattggagtggattttcttctgctttcattgatacttgtcagaaaaaaatattagaccaaaatgtaaaatataagtaataattctca

SEQ ID NO: 379084 - DNA, 925 bp, Homo sapiens
ctttctccttatggtttaatgatgtggaattttcattttacattatagctgacatttttatttttatatgttcggaacaggaagagcaagatctggatcaacagggaaatgaggtatgattttatgttggggttcctactacaacactgtgattacaattcagttcccagaatgtttgaaacacaacttattaaaacttagaaacctaagacaagactgcaggctacgaagtcaaactttcggggtcttaatcccaactctgctatatgtaactgtacaaacttggaaacattctttgtgcctcagtttcctcatctgaagaatggggataatgtccctacccaggagagggttgttttgataactaatgtatgtaaagggcatttagaaaagtttatggcacatagcaaacactcaaatattaattatacttcagcaccaagcattctgtcctaaatctaagtttattcatattgtaaaataaatgggggcaatctcacaggcagcacagcaaataagaactctgggatttctccttaataatgggtaagagagaaggctgttctagcccagggtttctcaactttggcactattaacattaggggttggttaattctttgttgtggggtctgtcccattcattataaaatgtttagcgacatcctcggcctttacccactagatctcagtagcagcccctacctattccttctcacccctcatcgtgtcaacgaaaactatctctagacattgcccattgtcttctgagggcagaatctccccaggacgagaaatagtggtatagccaaggtattagtcccatttccatgtgataggacttaaatctatttgtggttattattgcatcattttaatccacagcaggtttctgcaactcaggtaatatccaatagtttttttcc

SEQ ID NO: 379085 - DNA, 1267 bp, Homo sapiens
  misc_feature (8)..(8): n is a, c, g, or t
  misc_feature (345)..(345): n is a, c, g, or t
ctagatgnctcgaaggaagagcaagatctggatcaagcagggaaatgaggaaaacctatttgattctttgacaggccagccacatcctgaagatgtactactgttgccattccaatatgtgccccttacaccaccatgacaaactacaaatataaagttaaactcacggagacagaaagtagaatggtggctgccaggggctggggagaaaagactatagagagttattaataggttcagagtttcagttttataaaatgaaaataattctgtggataagggtggcaaagatggcacaacaatgtaaatgcactcaataccacagaactgtacacttaaaaagtntcaaaggtggccaggcacagtggctcacgcctgtaatcccagcactttgggaggccgaggcgggtggatcactgaggtcaggagttcaagaccagcctggccaacatggtgaaaccccatctttactgaaaatacaaaaattagctgggcgtggtggcgggcacctgtaatcccagctactcaggaggctgaggcaggagaatcacttgaacccaggaggcggaggttgcagtgagccgagatcgtgccactgcactccagctgggcaacggagcactctgtctcaaaaaaaaagaaaaaaaaataaaattctgtgtatgcaagttgaagtagagactgtgcttttttttccaactagttgtttgtttttttaataaggcggtggatgaattttattccaagatagaaggccagaaaattgacttaaaagctttacaacaggtatgtattattaaaaacacatattaaaccagctagtctttagcggcttgatgggtagatgatataggaaagggtagcctttcagaaagagtgtaagaagtagtatgggaactctctgacctgcctctttatttatgataaaggtttatgaagaaggtccatgggggattttattgttgaaaagtatgtcctcatttgtttcatgagtatttcagatattctgtaaaaaaaggaaaatacggtgggaacgtgaggcctgttatttacaccttaatgtggtttgctcagaacaacccaaagcttctcaaacattgctgttaaggagatactgttttagggagattttaaataggccagaggaggggatattgtttatcattaaactgtttcttttttaaatggactttaaagccaagtcttaatatgttttctgtgtatcatgactccaaaagaagtgatatacagtattttcccagcacat

SEQ ID NO: 379086 - DNA, 280 bp, Homo sapiens
ttcaagtgattctcctgcttcagcctcccaagtagctgggattataggcacccgccaccatacctggctaacttttgtatttttagtagagatggaatttcaccatgttggccaggctggtctcaaagtcctgacctcaagtgatctgcctgcctcggccttccacagtgctggggttacaggtgtgagccactgtgcctggcctcaaaaattatttgaaagagcgctaaattgtattttattttattgcaggggaacattgttcttacagattatgagt

SEQ ID NO: 379087 - DNA, 490 bp, Homo sapiens
ttgttttgtaacatctatttagtaacacatgtaattcctttttaaagatataaagtgaaacttactcctggagtgcagaaaaagggaaaaggtatttaaatttgtttttttgaattatgattttaaacagttcagtgacttaacagtagattattcttactcttttttgtatttacagctgcaaaaacagccttgaatagtttcatgcattccaaagaagcaacagcaagagaaaaagacttattccgcagcgtaaaggtaaagttctccttcagaaaaggaatgtggagactgacagtacaatttaaaatgttagcagttttttgttattttagtagaaaatgctgtcttattagaagcagtaaaaccatctcagctaaaagtttggaaatgtttttcgtttttgtcataaaagaaacatgattgaccatacaggatgtgaagatattcagcaattttctttttttaggacacagatttatcaagaaac

SEQ ID NO: 379088 - DNA, 465 bp, Homo sapiens
ttttgagacagggtctctgtcacccaggctggtgtcacccagtgcagtgacaggatcatggctctccacaacgtctacctcctgggctcaggtgatcctccccccctcagtcttctgagtagctgggactacaggcacccactatacccagctaacttttatattttttgtagagatggtgtttctccatgttgcttaggctggtcttgaactcctgggctcaagcgatccacccgcctcagcctgagccttccagagtcctaggattataggcgtgaaccactgctcctgggccttctttctcttaaatgtaactgtaggtaggattttgaaaattattgttctcattacttattatgctaggcaaaaattaagtagtaaagaatatatttaaacattggtcttcaactctttgggaactatgaagcagagtttaagtaccactgttccagcttagatggtatg

SEQ ID NO: 379089 - DNA, 461 bp, Homo sapiens
agtgctttagctaaccagatagattggacagaaattgggttaattgtgaaagaagcccaggctcaaggagaccctgttgcaagtgcaatcaaagaattaaaactacaaacaaaccatgttacaatgctgctaaggtaagtttgactcttagtcaagcagttaatgcttgtctttattttgttattttaattgttcactgtattaaacattttttcttcatattttgaaattctcaaagaaagggaaaaaactaatttagattaaaataaataatgaaacttccagtactgtaaaccatttataattttattgaagaagaaaattgaaaataaaagtgatgtcattgacgttagtgaaatgctattgaatatttttaatagaaatccatacttgttatcagaggaggaagatgatgatgttgatggtgacgtcaatgttgagaaaaatgaaactgaaccacc

SEQ ID NO: 379090 - DNA, 312 bp, Homo sapiens
ccacggaccttgactgaagctggcacaatggcactttgctacagtgctgcttgggatgcacgagttatcactagtgcttggtgggtgtaccatcatcaggtaataagggctcttgtcctttttcttaatttactaagagctactgtgtgccaaattttgagagtatagaagtaaataaagcagacaaggctcaatagagctaactctttttggtagaggaaaatatgtacataatgtcaggtaataagtgccataaaatagtgtttttaaaagcatggaaggggatagagagtgataggggataccgttttg

SEQ ID NO: 379091 - DNA, 631 bp, Homo sapiens
gtagcaccatgtatacttactatatattgttgtgatttatttgggttttcagaaattaaacgttcattaaaggatcattatatatacattttattttaatttggaaaattgttatctgtaatatgcttattccaggatagtttttttgttttgttttttgagacagtcttgctctgttacccaggctggagtgcagtggcatgatcttggctcattgcaacctctgcttccctggttgaagtgattctcctgtctcagcctcccgagtagctgggactacaggcacgtgccaccatgcctggacagtttttatattttcagtagagatgaggtttcaccgtgttggccaggctggtctcgaactcctgacctcaagtgatccgcctgccttggcctcccaaagtgctgggattatagacatgggccactgcacccggcccaggatagtgttttaaaagtttttgttggtttataagtttttttctgttccctatcttttatagaaagtacaatgtcaggttagtatcggctcttcagaaaagttgaggaatttacagttatttctttagtttcagatagagaagcacattttcatttgtcagcccttttcaaaaatgttgtgatttacagc

SEQ ID NO: 379092 - DNA, 4121 bp, Homo sapiens
gcggaggagaagtggcgtcgagtccggccgggcagtagaggaaattgcggtagtgaccctcgggcctcgccatgaagagccgctttagcaccattgacctccgcgccgtactcgcggagctgaatgctagcttgctaggaatgagagtaaacaatgtttatgatgtggataataagacataccttattcgtcttcaaaaaccggactttaaagctacacttttacttgaatctggcatacgaattcatacaacagaatttgagtggcctaagaatatgatgccgtctagttttgccatgaagtgccgaaaacatttgaagagtcggagattagtcagtgcaaaacagcttggtgtggatagaattgtagattttcaatttggaagtgatgaagctgcttaccatttaatcattgagctctatgatagggggaacattgttcttacagattatgagtacgtaattttaaatattctaaggtttcgaactgatgaggcagatgatgttaaatttgctgttcgtgaacgctatccacttgatcatgctagagctgctgaacctttgcttactttggaaaggttgactgaaatagtagccagcgcacctaagggtgaactactgaagagggtgcttaacccattacttccctatggaccagctctcattgaacactgtcttttagaaaatggattctcgggtaatgtcaaagtggatgaaaaacttgaaactaaagatattgaaaaagtacttgtttctctgcagaaagcagaagactatatgaaaacaacatccaacttcagtgggaagggatatatcattcagaaaagagaaataaaaccatgcttggaagcagataaaccagttgaagacatactgacgtatgaggaatttcatcctttcttgttttctcaacattcacaatgtccatatatagaatttgaatcatttgacaaggcggtggatgaattttattccaagatagaaggccagaaaattgacttaaaagctttacaacaggaaaagcaagcattgaagaaattagataatgttcgaaaggatcacgaaaacagattggaagctcttcagcaggctcaggaaatagacaaactgaaaggagagctcatagaaatgaacctacaaatagttgacagagccattcaggtagttcgaagtgctttagctaaccagatagattggacagaaattgggttaattgtgaaagaagcccaggctcaaggagaccctgttgcaagtgcaatcaaagaattaaaactacaaacaaaccatgttacaatgctgctaagaaatccatacttgttatcagaggaggaagatgatgatgttgatggtgacgtcaatgttgagaaaaatgaaactgaaccaccaaaaggaaaaaagaaaaaacaaaagaataaacagctgcagaagcctcagaaaaataagcccttacttgtagatgttgatctcagcttgtcagcatatgccaatgccaaaaagtattatgatcacaagagatatgctgctaagaaaacacaaaagactgttgaagctgctgagaaggcattcaagtcagcagaaaagaaaacaaagcaaacattaaaagaagttcagactgttacctctattcaaaaagcaagaaaagtatattggtttgagaaatttctgtggttcattagctcagagaactatctaattataggtggacgagatcagcaacagaatgaaataattgtgaaaagatacttgacaccaggagacatttatgtacatgctgatcttcatggagctactagctgtgtaattaagaatccaacaggagaacccatccccccacggaccttgactgaagctggcacaatggcactttgctacagtgctgcttgggatgcacgagttatcactagtgcttggtgggtgtaccatcatcaggtatctaaaacagcaccaactggagaatatttgacaacaggaagcttcatgataagaggaaaaaagaattttcttcctccctcatatctaatgatggggtttagcttcctttttaaggtagatgagtcttgtgtttggagacatcagggtgaacgaaaagtcagagtacaggatgaagacatggagacactggcaagttgtacaagtgaactcatatcagaagaaatggaacaattagatggaggtgacacgagcagtgatgaggataaagaagaacatgaaactcctgtggaagtagaactcatgactcaggttgaccaagaggatatcactcttcagagtggcagagatgaactaaatgaggagctcattcaggaagaaagctctgaagacgaaggagaatatgaagaggttagaaaagatcaggattctgttggtgaaatgaaggatgaaggggaagagacattaaattatcctgatactaccattgacttgtctcaccttcaaccccaaaggtccatccagaaattggcttcaaaagaggaatcttctaattctagtgacagtaaatcacagagccggagacatttgtcagccaaggaaagaagggaaatgaaaaagaaaaaacttccaagtgactcaggagatttagaagcgttagagggaaaggataaagaaaaagaaagtactgtacacattgaaactcatcagaacacaagcaaaaatgttgcggctgtgcagccaatgaaacgaggacaaaagagtaaaatgaaaaaaatgaaagaaaaatacaaagaccaggatgaagaagaccgtgaacttatcatgaagttgctggggtctgcaggttcaaacaaagaagaaaaagggaagaaggggaagaaaggaaaaacaaaggacgaacctgtgaagaaacagccccagaaacctagaggtggacagagggtctctgacaacattaagaaagaaactccgttccttgaggttataactcatgagttacaagactttgctgtagatgatccacatgatgacaaggaagagcaagatctggatcaacagggaaatgaggaaaacctatttgattctttgacaggccagccacatcctgaagatgtactactgtttgccattccaatatgtgccccttacaccaccatgacaaactacaaatataaagtgaaacttactcctggagtgcagaaaaagggaaaagctgcaaaaacagccttgaatagtttcatgcattccaaagaagcaacagcaagagaaaaagacttattccgcagcgtaaaggacacagatttatcaagaaacattcctggcaaagtgaaagtgtctgcacccaatcttctgaacgtaaaaaggaaatagctgaaatgaaattctaaaatatttgagaagagccaattttatagccttttggaagttcaaagatgaaagcaccatgtatcaggatttccgcattataaaaatgaactaaacattgccttgctatattcaccaaaaggacttacttcttgttttttcccagttttatatagaggaaacactgtctatgataggatttccaaaagtatttgtggacagttaaatgctaattaatatacatctgtagttattctacattttcttgaaatttgggaggttaataccaagtattcatttcatgatgtaaagaaactgaacagtgaagtggcttgattgcttaaactattgacttggtaagtctactgtatataacatctaatatatatattacaggccaaatgaactaaacattgccttgctatattcaccaaaaggacttaattcttgtttttttcccagttttatatagaggaaacactatgataggatttcctaaagtatttgtggacagttaaatgctaattatatacatctgtagttattctacattttcttgaaatttgagaggttaataccaagtattcatttcatgatgtaaagaaactgaacagtgaagtggcttgattgcttaaactattgacttggtaagtctactgtatataacatctaatatatatatattataggccagctacaaggggtttaaatatttaggattgtgtcttgaaaactaagtattggagtggattttcttctgctttcattgatacttgtcagaaaaaaatattagaccaaaatgtaaaatataagtaataattctca

SEQ ID NO: 379093 - DNA, 4216 bp, Homo sapiens
gcggaggagaagtggcgtcgagtccggccgggcagtagaggaaattgcggtagtgaccctcgggcctcgccatgaagagccgctttagcaccattgacctccgcgccgtactcgcggagctgaatgctagcttgctaggaatgagagtaaacaatgtttatgatgtggataataagacataccttattcgtcttcaaaaaccggactttaaagctacacttttacttgaatctggcatacgaattcatacaacagaatttgagtggcctaagaatatgatgccgtctagttttgccatgaagtgccgaaaacatttgaagagtcggagattagtcagtgcaaaacagcttggtgtggatagaattgtagattttcaatttggaagtgatgaagctgcttaccatttaatcattgagctctatgatagggggaacattgttcttacagattatgagtacgtaattttaaatattctaaggtttcgaactgatgaggcagatgatgttaaatttgctgttcgtgaacgctatccacttgatcatgctagagctgctgaacctttgcttactttggaaaggttgactgaaatagtagccagcgcacctaagggtgaactactgaagagggtgcttaacccattacttccctatggaccagctctcattgaacactgtcttttagaaaatggattctcgggtaatgtcaaagtggatgaaaaacttgaaactaaagatattgaaaaagtacttgtttctctgcagaaagcagaagactatatgaaaacaacatccaacttcagtgggaagggatatatcattcagaaaagagaaataaaaccatgcttggaagcagataaaccagttgaagacatactgacgtatgaggaatttcatcctttcttgttttctcaacattcacaatgtccatatatagaatttgaatcatttgacaaggcggtggatgaattttattccaagatagaaggccagaaaattgacttaaaagctttacaacaggaaaagcaagcattgaagaaattagataatgttcgaaaggatcacgaaaacagattggaagctcttcagcaggctcaggaaatagacaaactgaaaggagagctcatagaaatgaacctacaaatagttgacagagccattcaggtagttcgaagtgctttagctaaccagatagattggacagaaattgggttaattgtgaaagaagcccaggctcaaggagaccctgttgcaagtgcaatcaaagaattaaaactacaaacaaaccatgttacaatgctgctaagaaatccatacttgttatcagaggaggaagatgatgatgttgatggtgacgtcaatgttgagaaaaatgaaactgaaccaccaaaaggaaaaaagaaaaaacaaaagaataaacagctgcagaagcctcagaaaaataagcccttacttgtagatgttgatctcagcttgtcagcatatgccaatgccaaaaagtattatgatcacaagagatatgctgctaagaaaacacaaaagactgttgaagctgctgagaaggcattcaagtcagcagaaaagaaaacaaagcaaacattaaaagaagttcagactgttacctctattcaaaaagcaagaaaagtatattggtttgagaaatttctgtggttcattagctcagagaactatctaattataggtggacgagatcagcaacagaatgaaataattgtgaaaagatacttgacaccaggagacatttatgtacatgctgatcttcatggagctactagctgtgtaattaagaatccaacaggagaacccatccccccacggaccttgactgaagctggcacaatggcactttgctacagtgctgcttgggatgcacgagttatcactagtgcttggtgggtgtaccatcatcaggtatctaaaacagcaccaactggagaatatttgacaacaggaagcttcatgataagaggaaaaaagaattttcttcctccctcatatctaatgatggggtttagcttcctttttaaggtactcttcaacttcttggttatttatttgtttttttcctgattttcattagtcttgtctgaagctccgtcactgaaaaataactgtttctttaggtagatgagtcttgtgtttggagacatcagggtgaacgaaaagtcagagtacaggatgaagacatggagacactggcaagttgtacaagtgaactcatatcagaagaaatggaacaattagatggaggtgacacgagcagtgatgaggataaagaagaacatgaaactcctgtggaagtagaactcatgactcaggttgaccaagaggatatcactcttcagagtggcagagatgaactaaatgaggagctcattcaggaagaaagctctgaagacgaaggagaatatgaagaggttagaaaagatcaggattctgttggtgaaatgaaggatgaaggggaagagacattaaattatcctgatactaccattgacttgtctcaccttcaaccccaaaggtccatccagaaattggcttcaaaagaggaatcttctaattctagtgacagtaaatcacagagccggagacatttgtcagccaaggaaagaagggaaatgaaaaagaaaaaacttccaagtgactcaggagatttagaagcgttagagggaaaggataaagaaaaagaaagtactgtacacattgaaactcatcagaacacaagcaaaaatgttgcggctgtgcagccaatgaaacgaggacaaaagagtaaaatgaaaaaaatgaaagaaaaatacaaagaccaggatgaagaagaccgtgaacttatcatgaagttgctggggtctgcaggttcaaacaaagaagaaaaagggaagaaggggaagaaaggaaaaacaaaggacgaacctgtgaagaaacagccccagaaacctagaggtggacagagggtctctgacaacattaagaaagaaactccgttccttgaggttataactcatgagttacaagactttgctgtagatgatccacatgatgacaaggaagagcaagatctggatcaacagggaaatgaggaaaacctatttgattctttgacaggccagccacatcctgaagatgtactactgtttgccattccaatatgtgccccttacaccaccatgacaaactacaaatataaagtgaaacttactcctggagtgcagaaaaagggaaaagctgcaaaaacagccttgaatagtttcatgcattccaaagaagcaacagcaagagaaaaagacttattccgcagcgtaaaggacacagatttatcaagaaacattcctggcaaagtgaaagtgtctgcacccaatcttctgaacgtaaaaaggaaatagctgaaatgaaattctaaaatatttgagaagagccaattttatagccttttggaagttcaaagatgaaagcaccatgtatcaggatttccgcattataaaaatgaactaaacattgccttgctatattcaccaaaaggacttacttcttgttttttcccagttttatatagaggaaacactgtctatgataggatttccaaaagtatttgtggacagttaaatgctaattaatatacatctgtagttattctacattttcttgaaatttgggaggttaataccaagtattcatttcatgatgtaaagaaactgaacagtgaagtggcttgattgcttaaactattgacttggtaagtctactgtatataacatctaatatatatattacaggccaaatgaactaaacattgccttgctatattcaccaaaaggacttaattcttgtttttttcccagttttatatagaggaaacactatgataggatttcctaaagtatttgtggacagttaaatgctaattatatacatctgtagttattctacattttcttgaaatttgagaggttaataccaagtattcatttcatgatgtaaagaaactgaacagtgaagtggcttgattgcttaaactattgacttggtaagtctactgtatataacatctaatatatatatattataggccagctacaaggggtttaaatatttaggattgtgtcttgaaaactaagtattggagtggattttcttctgctttcattgatacttgtcagaaaaaaatattagaccaaaatgtaaaatataagtaataattctca

SEQ ID NO: 379094 - DNA, 4292 bp, Homo sapiens
gcggaggagaagtggcgtcgagtccggccgggcagtagaggaaattgcggtagtgaccctcgggcctcgccatgaagagccgctttagcaccattgacctccgcgccgtactcgcggagctgaatgctagcttgctaggaatgagagtaaacaatgtttatgatgtggataataagacataccttattcgtcttcaaaaaccggactttaaagctacacttttacttgaatctggcatacgaattcatacaacagaatttgagtggcctaagaatatgatgccgtctagttttgccatgaagtgccgaaaacatttgaagagtcggagattagtcagtgcaaaacagcttggtgtggatagaattgtagattttcaatttggaagtgatgaagctgcttaccatttaatcattgagctctatgatagggggaacattgttcttacagattatgagtacgtaattttaaatattctaaggtttcgaactgatgaggcagatgatgttaaatttgctgttcgtgaacgctatccacttgatcatgctagagctgctgaacctttgcttactttggaaaggttgactgaaatagtagccagcgcacctaagggtgaactactgaagagggtgcttaacccattacttccctatggaccagctctcattgaacactgtcttttagaaaatggattctcgggtaatgtcaaagtggatgaaaaacttgaaactaaagatattgaaaaagtacttgtttctctgcagaaagcagaagactatatgaaaacaacatccaacttcagtgggaagggatatatcattcagaaaagagaaataaaaccatgcttggaagcagataaaccagttgaagacatactgacgtatgaggaatttcatcctttcttgttttctcaacattcacaatgtccatatatagaatttgaatcatttgacaaggcggtggatgaattttattccaagatagaaggccagaaaattgacttaaaagctttacaacaggaaaagcaagcattgaagaaattagataatgttcgaaaggatcacgaaaacagattggaagctcttcagcaggctcaggaaatagacaaactgaaaggagagctcatagaaatgaacctacaaatagttgacagagccattcaggtagttcgaagtgctttagctaaccagatagattggacagaaattgggttaattgtgaaagaagcccaggctcaaggagaccctgttgcaagtgcaatcaaagaattaaaactacaaacaaaccatgttacaatgctgctaagaaatccatacttgttatcagaggaggaagatgatgatgttgatggtgacgtcaatgttgagaaaaatgaaactgaaccaccaaaaggaaaaaagaaaaaacaaaagaataaacagctgcagaagcctcagaaaaataagcccttacttgtagatgttgatctcagcttgtcagcatatgccaatgccaaaaagtattatgatcacaagagatatgctgctaagaaaacacaaaagactgttgaagctgctgagaaggcattcaagtcagcagaaaagaaaacaaagcaaacattaaaagaagttcagactgttacctctattcaaaaagcaagaaaagtatattggtttgagaaatttctgtggttcattagctcagagaactatctaattataggtggacgagatcagcaacagaatgaaataattgtgaaaagatacttgacaccaggagacatttatgtacatgctgatcttcatggagctactagctgtgtaattaagaatccaacaggagaacccatccccccacggaccttgactgaagctggcacaatggcactttgctacagtgctgcttgggatgcacgagttatcactagtgcttggtgggtgtaccatcatcaggtatctaaaacagcaccaactggagaatatttgacaacaggaagcttcatgataagaggaaaaaagaattttcttcctccctcatatctaatgatggggtttagcttcctttttaaggtagatgagtcttgtgtttggagacatcagggtgaacgaaaagtcagagtacaggatgaagacatggagacactggcaagttgtacaagtgaactcatatcagaagaaatggaacaattagatggaggtgacacgagcagtgatgaggataaagaagaacatgaaactcctgtggaagtagaactcatgactcaggttgaccaagaggatatcactcttcagagtggcagagatgaactaaatgaggagctcattcaggaagaaagctctgaagacgaaggagaatatgaagaggttagaaaagatcaggattctgttggtgaaatgaaggatgaaggggaagagacattaaattatcctgatactaccattgacttgtctcaccttcaaccccaaaggtccatccagaaattggcttcaaaagaggaatcttctaattctagtgacagtaaatcacagagccggagacatttgtcagccaaggaaagaagggaaatgaaaaagaaaaaacttccaagtgactcaggagatttagaagcgttagagggaaaggataaagaaaaagaaagtactgtacacattgaaactcatcagaacacaagcaaaaatgttgcggctgtgcagccaatgaaacgaggacaaaagagtaaaatgaaaaaaatgaaagaaaaatacaaagaccaggatgaagaagaccgtgaacttatcatgaagttgctggggtctgcaggttcaaacaaagaagaaaaagggaagaaggggaagaaaggaaaaacaaaggacgaacctgtgaagaaacagccccagaaacctagaggtggacagagggtctctgacaacattaagaaagaaactccgttccttgaggttataactcatgagttacaagactttgctgtagatgatccacatgatgacaaggaagagcaagatctggatcaacagggaaatgaggaaaacctatttgattctttgacaggccagccacatcctgaagatgtactactgtttgccattccaatatgtgccccttacaccaccatgacaaactacaagtaagttaccattagttgacagaatggcttttgtgaattgttttgtaacatctatttagtaacacatgtaattcctttttaaagatataaagtgaaacttactcctggagtgcagaaaaagggaaaaggtatttaaatttgtttttttgaattatgattttaaacagttcagtgacttaacagtagattattcttactcttttttgtatttacagctgcaaaaacagccttgaatagtttcatgcattccaaagaagcaacagcaagagaaaaagacttattccgcagcgtaaaggacacagatttatcaagaaacattcctggcaaagtgaaagtgtctgcacccaatcttctgaacgtaaaaaggaaatagctgaaatgaaattctaaaatatttgagaagagccaattttatagccttttggaagttcaaagatgaaagcaccatgtatcaggatttccgcattataaaaatgaactaaacattgccttgctatattcaccaaaaggacttacttcttgttttttcccagttttatatagaggaaacactgtctatgataggatttccaaaagtatttgtggacagttaaatgctaattaatatacatctgtagttattctacattttcttgaaatttgggaggttaataccaagtattcatttcatgatgtaaagaaactgaacagtgaagtggcttgattgcttaaactattgacttggtaagtctactgtatataacatctaatatatatattacaggccaaatgaactaaacattgccttgctatattcaccaaaaggacttaattcttgtttttttcccagttttatatagaggaaacactatgataggatttcctaaagtatttgtggacagttaaatgctaattatatacatctgtagttattctacattttcttgaaatttgagaggttaataccaagtattcatttcatgatgtaaagaaactgaacagtgaagtggcttgattgcttaaactattgacttggtaagtctactgtatataacatctaatatatatatattataggccagctacaaggggtttaaatatttaggattgtgtcttgaaaactaagtattggagtggattttcttctgctttcattgatacttgtcagaaaaaaatattagaccaaaatgtaaaatataagtaataattctca

SEQ ID NO: 379095 - DNA, 4207 bp, Homo sapiens
gcggaggagaagtggcgtcgagtccggccgggcagtagaggaaattgcggtagtgaccctcgggcctcgccatgaagagccgctttagcaccattgacctccgcgccgtactcgcggagctgaatgctagcttgctaggaatgagagtaaacaatgtttatgatgtggataataagacataccttattcgtcttcaaaaaccggactttaaagctacacttttacttgaatctggcatacgaattcatacaacagaatttgagtggcctaagaatatgatgccgtctagttttgccatgaagtgccgaaaacatttgaagagtcggagattagtcagtgcaaaacagcttggtgtggatagaattgtagattttcaatttggaagtgatgaagctgcttaccatttaatcattgagctctatgatagggggaacattgttcttacagattatgagtacgtaattttaaatattctaaggtttcgaactgatgaggcagatgatgttaaatttgctgttcgtgaacgctatccacttgatcatgctagagctgctgaacctttgcttactttggaaaggttgactgaaatagtagccagcgcacctaagggtgaactactgaagagggtgcttaacccattacttccctatggaccagctctcattgaacactgtcttttagaaaatggattctcgggtaatgtcaaagtggatgaaaaacttgaaactaaagatattgaaaaagtacttgtttctctgcagaaagcagaagactatatgaaaacaacatccaacttcagtgggaagggatatatcattcagaaaagagaaataaaaccatgcttggaagcagataaaccagttgaagacatactgacgtatgaggaatttcatcctttcttgttttctcaacattcacaatgtccatatatagaatttgaatcatttgacaaggcggtggatgaattttattccaagatagaaggccagaaaattgacttaaaagctttacaacaggaaaagcaagcattgaagaaattagataatgttcgaaaggatcacgaaaacagattggaagctcttcagcaggctcaggtattatgtttggctttctcagtgctttttcaaaaatgttaactttaactggcaatgtagtaaatgtgtgtggtttgttttttaaggaaatagacaaactgaaaggagagctcatagaaatgaacctacaaatagttgacagagccattcaggtagttcgaagtgctttagctaaccagatagattggacagaaattgggttaattgtgaaagaagcccaggctcaaggagaccctgttgcaagtgcaatcaaagaattaaaactacaaacaaaccatgttacaatgctgctaagaaatccatacttgttatcagaggaggaagatgatgatgttgatggtgacgtcaatgttgagaaaaatgaaactgaaccaccaaaaggaaaaaagaaaaaacaaaagaataaacagctgcagaagcctcagaaaaataagcccttacttgtagatgttgatctcagcttgtcagcatatgccaatgccaaaaagtattatgatcacaagagatatgctgctaagaaaacacaaaagactgttgaagctgctgagaaggcattcaagtcagcagaaaagaaaacaaagcaaacattaaaagaagttcagactgttacctctattcaaaaagcaagaaaagtatattggtttgagaaatttctgtggttcattagctcagagaactatctaattataggtggacgagatcagcaacagaatgaaataattgtgaaaagatacttgacaccaggagacatttatgtacatgctgatcttcatggagctactagctgtgtaattaagaatccaacaggagaacccatccccccacggaccttgactgaagctggcacaatggcactttgctacagtgctgcttgggatgcacgagttatcactagtgcttggtgggtgtaccatcatcaggtatctaaaacagcaccaactggagaatatttgacaacaggaagcttcatgataagaggaaaaaagaattttcttcctccctcatatctaatgatggggtttagcttcctttttaaggtagatgagtcttgtgtttggagacatcagggtgaacgaaaagtcagagtacaggatgaagacatggagacactggcaagttgtacaagtgaactcatatcagaagaaatggaacaattagatggaggtgacacgagcagtgatgaggataaagaagaacatgaaactcctgtggaagtagaactcatgactcaggttgaccaagaggatatcactcttcagagtggcagagatgaactaaatgaggagctcattcaggaagaaagctctgaagacgaaggagaatatgaagaggttagaaaagatcaggattctgttggtgaaatgaaggatgaaggggaagagacattaaattatcctgatactaccattgacttgtctcaccttcaaccccaaaggtccatccagaaattggcttcaaaagaggaatcttctaattctagtgacagtaaatcacagagccggagacatttgtcagccaaggaaagaagggaaatgaaaaagaaaaaacttccaagtgactcaggagatttagaagcgttagagggaaaggataaagaaaaagaaagtactgtacacattgaaactcatcagaacacaagcaaaaatgttgcggctgtgcagccaatgaaacgaggacaaaagagtaaaatgaaaaaaatgaaagaaaaatacaaagaccaggatgaagaagaccgtgaacttatcatgaagttgctggggtctgcaggttcaaacaaagaagaaaaagggaagaaggggaagaaaggaaaaacaaaggacgaacctgtgaagaaacagccccagaaacctagaggtggacagagggtctctgacaacattaagaaagaaactccgttccttgaggttataactcatgagttacaagactttgctgtagatgatccacatgatgacaaggaagagcaagatctggatcaacagggaaatgaggaaaacctatttgattctttgacaggccagccacatcctgaagatgtactactgtttgccattccaatatgtgccccttacaccaccatgacaaactacaaatataaagtgaaacttactcctggagtgcagaaaaagggaaaagctgcaaaaacagccttgaatagtttcatgcattccaaagaagcaacagcaagagaaaaagacttattccgcagcgtaaaggacacagatttatcaagaaacattcctggcaaagtgaaagtgtctgcacccaatcttctgaacgtaaaaaggaaatagctgaaatgaaattctaaaatatttgagaagagccaattttatagccttttggaagttcaaagatgaaagcaccatgtatcaggatttccgcattataaaaatgaactaaacattgccttgctatattcaccaaaaggacttacttcttgttttttcccagttttatatagaggaaacactgtctatgataggatttccaaaagtatttgtggacagttaaatgctaattaatatacatctgtagttattctacattttcttgaaatttgggaggttaataccaagtattcatttcatgatgtaaagaaactgaacagtgaagtggcttgattgcttaaactattgacttggtaagtctactgtatataacatctaatatatatattacaggccaaatgaactaaacattgccttgctatattcaccaaaaggacttaattcttgtttttttcccagttttatatagaggaaacactatgataggatttcctaaagtatttgtggacagttaaatgctaattatatacatctgtagttattctacattttcttgaaatttgagaggttaataccaagtattcatttcatgatgtaaagaaactgaacagtgaagtggcttgattgcttaaactattgacttggtaagtctactgtatataacatctaatatatatatattataggccagctacaaggggtttaaatatttaggattgtgtcttgaaaactaagtattggagtggattttcttctgctttcattgatacttgtcagaaaaaaatattagaccaaaatgtaaaatataagtaataattctca

SEQ ID NO: 379096 - DNA, 3995 bp, Homo sapiens
gcggaggagaagtggcgtcgagtccggccgggcagtagaggaaattgcggtagtgaccctcgggcctcgccatgaagagccgctttagcaccattgacctccgcgccgtactcgcggagctgaatgctagcttgctaggaatgagagtaaacaatgtttatgatgtggataataagacataccttattcgtcttcaaaaaccggactttaaagctacacttttacttgaatctggcatacgaattcatacaacagaatttgagtggcctaagaatatgatgccgtctagttttgccatgaaggggaacattgttcttacagattatgagtacgtaattttaaatattctaaggtttcgaactgatgaggcagatgatgttaaatttgctgttcgtgaacgctatccacttgatcatgctagagctgctgaacctttgcttactttggaaaggttgactgaaatagtagccagcgcacctaagggtgaactactgaagagggtgcttaacccattacttccctatggaccagctctcattgaacactgtcttttagaaaatggattctcgggtaatgtcaaagtggatgaaaaacttgaaactaaagatattgaaaaagtacttgtttctctgcagaaagcagaagactatatgaaaacaacatccaacttcagtgggaagggatatatcattcagaaaagagaaataaaaccatgcttggaagcagataaaccagttgaagacatactgacgtatgaggaatttcatcctttcttgttttctcaacattcacaatgtccatatatagaatttgaatcatttgacaaggcggtggatgaattttattccaagatagaaggccagaaaattgacttaaaagctttacaacaggaaaagcaagcattgaagaaattagataatgttcgaaaggatcacgaaaacagattggaagctcttcagcaggctcaggaaatagacaaactgaaaggagagctcatagaaatgaacctacaaatagttgacagagccattcaggtagttcgaagtgctttagctaaccagatagattggacagaaattgggttaattgtgaaagaagcccaggctcaaggagaccctgttgcaagtgcaatcaaagaattaaaactacaaacaaaccatgttacaatgctgctaagaaatccatacttgttatcagaggaggaagatgatgatgttgatggtgacgtcaatgttgagaaaaatgaaactgaaccaccaaaaggaaaaaagaaaaaacaaaagaataaacagctgcagaagcctcagaaaaataagcccttacttgtagatgttgatctcagcttgtcagcatatgccaatgccaaaaagtattatgatcacaagagatatgctgctaagaaaacacaaaagactgttgaagctgctgagaaggcattcaagtcagcagaaaagaaaacaaagcaaacattaaaagaagttcagactgttacctctattcaaaaagcaagaaaagtatattggtttgagaaatttctgtggttcattagctcagagaactatctaattataggtggacgagatcagcaacagaatgaaataattgtgaaaagatacttgacaccaggagacatttatgtacatgctgatcttcatggagctactagctgtgtaattaagaatccaacaggagaacccatccccccacggaccttgactgaagctggcacaatggcactttgctacagtgctgcttgggatgcacgagttatcactagtgcttggtgggtgtaccatcatcaggtatctaaaacagcaccaactggagaatatttgacaacaggaagcttcatgataagaggaaaaaagaattttcttcctccctcatatctaatgatggggtttagcttcctttttaaggtagatgagtcttgtgtttggagacatcagggtgaacgaaaagtcagagtacaggatgaagacatggagacactggcaagttgtacaagtgaactcatatcagaagaaatggaacaattagatggaggtgacacgagcagtgatgaggataaagaagaacatgaaactcctgtggaagtagaactcatgactcaggttgaccaagaggatatcactcttcagagtggcagagatgaactaaatgaggagctcattcaggaagaaagctctgaagacgaaggagaatatgaagaggttagaaaagatcaggattctgttggtgaaatgaaggatgaaggggaagagacattaaattatcctgatactaccattgacttgtctcaccttcaaccccaaaggtccatccagaaattggcttcaaaagaggaatcttctaattctagtgacagtaaatcacagagccggagacatttgtcagccaaggaaagaagggaaatgaaaaagaaaaaacttccaagtgactcaggagatttagaagcgttagagggaaaggataaagaaaaagaaagtactgtacacattgaaactcatcagaacacaagcaaaaatgttgcggctgtgcagccaatgaaacgaggacaaaagagtaaaatgaaaaaaatgaaagaaaaatacaaagaccaggatgaagaagaccgtgaacttatcatgaagttgctggggtctgcaggttcaaacaaagaagaaaaagggaagaaggggaagaaaggaaaaacaaaggacgaacctgtgaagaaacagccccagaaacctagaggtggacagagggtctctgacaacattaagaaagaaactccgttccttgaggttataactcatgagttacaagactttgctgtagatgatccacatgatgacaaggaagagcaagatctggatcaacagggaaatgaggaaaacctatttgattctttgacaggccagccacatcctgaagatgtactactgtttgccattccaatatgtgccccttacaccaccatgacaaactacaaatataaagtgaaacttactcctggagtgcagaaaaagggaaaagctgcaaaaacagccttgaatagtttcatgcattccaaagaagcaacagcaagagaaaaagacttattccgcagcgtaaaggacacagatttatcaagaaacattcctggcaaagtgaaagtgtctgcacccaatcttctgaacgtaaaaaggaaatagctgaaatgaaattctaaaatatttgagaagagccaattttatagccttttggaagttcaaagatgaaagcaccatgtatcaggatttccgcattataaaaatgaactaaacattgccttgctatattcaccaaaaggacttacttcttgttttttcccagttttatatagaggaaacactgtctatgataggatttccaaaagtatttgtggacagttaaatgctaattaatatacatctgtagttattctacattttcttgaaatttgggaggttaataccaagtattcatttcatgatgtaaagaaactgaacagtgaagtggcttgattgcttaaactattgacttggtaagtctactgtatataacatctaatatatatattacaggccaaatgaactaaacattgccttgctatattcaccaaaaggacttaattcttgtttttttcccagttttatatagaggaaacactatgataggatttcctaaagtatttgtggacagttaaatgctaattatatacatctgtagttattctacattttcttgaaatttgagaggttaataccaagtattcatttcatgatgtaaagaaactgaacagtgaagtggcttgattgcttaaactattgacttggtaagtctactgtatataacatctaatatatatatattataggccagctacaaggggtttaaatatttaggattgtgtcttgaaaactaagtattggagtggattttcttctgctttcattgatacttgtcagaaaaaaatattagaccaaaatgtaaaatataagtaataattctca

SEQ ID NO: 379097 - DNA, 3447 bp, Homo sapiens
gcggaggagaagtggcgtcgagtccggccgggcagtagaggaaattgcggtagtgaccctcgggcctcgccatgaagagccgctttagcaccattgacctccgcgccgtactcgcggagctgaatgctagcttgctaggaatgagagtaaacaatgtttatgatgtggataataagacataccttattcgtcttcaaaaaccggactttaaagctacacttttacttgaatctggcatacgaattcatacaacagaatttgagtggcctaagaatatgatgccgtctagttttgccatgaagtgccgaaaacatttgaagagtcggagattagtcagtgcaaaacagcttggtgtggatagaattgtagattttcaatttggaagtgatgaagctgcttaccatttaatcattgagctctatgatagggggaacattgttcttacagattatgagtacgtaattttaaatattctaaggtttcgaactgatgaggcagatgatgttaaatttgctgttcgtgaacgctatccacttgatcatgctagagctgctgaacctttgcttactttggaaaggttgactgaaatagtagccagcgcacctaagggtgaactactgaagagggtgcttaacccattacttccctatggaccagctctcattgaacactgtcttttagaaaatggattctcgggtaatgtcaaagtggatgaaaaacttgaaactaaagatattgaaaaagtacttgtttctctgcagaaagcagaagactatatgaaaacaacatccaacttcagtgggaagggatatatcattcagaaaagagaaataaaaccatgcttggaagcagataaaccagttgaagacatactgacgtatgaggaatttcatcctttcttgttttctcaacattcacaatgtccatatatagaatttgaatcatttgacaaggcggtggatgaattttattccaagatagaaggccagaaaattgacttaaaagctttacaacaggaaaagcaagcattgaagaaattagataatgttcgaaaggatcacgaaaacagattggaagctcttcagcaggctcaggaaatagacaaactgaaaggagagctcatagaaatgaacctacaaatagttgacagagccattcaggtagttcgaagtgctttagctaaccagatagattggacagaaattgggttaattgtgaaagaagcccaggctcaaggagaccctgttgcaagtgcaatcaaagaattaaaactacaaacaaaccatgttacaatgctgctaagaaatccatacttgttatcagaggaggaagatgatgatgttgatggtgacgtcaatgttgagaaaaatgaaactgaaccaccaaaaggaaaaaagaaaaaacaaaagaataaacagctgcagaagcctcagaaaaataagcccttacttgtagatgttgatctcagcttgtcagcatatgccaatgccaaaaagtattatgatcacaagagatatgctgctaagaaaacacaaaagactgttgaagctgctgagaaggcattcaagtcagcagaaaagaaaacaaagcaaacattaaaagaagttcagactgttacctctattcaaaaagcaagaaaagtatattggtttgagaaatttctgtggttcattagctcagagaactatctaattataggtggacgagatcagcaacagaatgaaataattgtgaaaagatacttgacaccaggagacatttatgtacatgctgatcttcatggagctactagctgtgtaattaagaatccaacaggagaacccatccccccacggaccttgactgaagctggcacaatggcactttgctacagtgctgcttgggatgcacgagttatcactagtgcttggtgggtgtaccatcatcaggtatctaaaacagcaccaactggagaatatttgacaacaggaagcttcatgataagaggaaaaaagaattttcttcctccctcatatctaatgatggggtttagcttcctttttaaggtagatgagtcttgtgtttggagacatcagggtgaacgaaaagtcagagtacaggatgaagacatggagacactggcaagttgtacaagtgaactcatatcagaagaaatggaacaattagatggaggtgacacgagcagtgatgaggataaagaagaacatgaaactcctgtggaagtagaactcatgactcaggttgaccaagaggatatcactcttcagagtggcagagatgaactaaatgaggagctcattcaggaagaaagctctgaagacgaaggagaatatgaagaggttagaaaagatcaggattctgttggtgaaatgaaggatgaaggggaagagacattaaattatcctgatactaccattgacttgtctcaccttcaaccccaaaggtccatccagaaattggcttcaaaagaggaatcttctaattctagtgacagtaaatcacagagccggagacatttgtcagccaaggaaagaagggaaatgaaaaagaaaaaacttccaagtgactcaggagatttagaagcgttagagggaaaggataaagaaaaagaaagtactgtacacattgaaactcatcagaacacaagcaaaaatgttgcggctgtgcagccaatgaaacgaggacaaaagagtaaaatgaaaaaaatgaaagaaaaatacaaagaccaggatgaagaagaccgtgaacttatcatgaagttgctggggtctgcaggttcaaacaaagaagaaaaagggaagaaggggaagaaaggaaaaacaaaggacgaacctgtgaagaaacagccccagaaacctagaggtggacagagggtctctgacaacattaagaaagaaactccgttccttgaggttataactcatgagttacaagactttgctgtagatgatccacatgatgacaaggaagagcaagatctggatcaacagggaaatgaggaaaacctatttgattctttgacaggccagccacatcctgaagatgtactactgtttgccattccaatatgtgccccttacaccaccatgacaaactacaaatataagtgaaactttactcctggaggtgcagaaaaagggaaaagctgaataacagacttgaatagtttcatgcagtcaaagaagcacaagcagagaagaagactattcgcaggttaagacacaggattattagaacattcggaagtgaaaggtttgccacatctctgaagtaagaggattgctgaatgaggttgactcggaaggcgcggtaagcattggagttcagggaaacagggtcggtggttaaaggcaatgtggtgtgcaaggatttgtgcattgtgaagttatagtcattgggagaagagaagacggggggaaggaaaaaggggagagaaaaaagggcaat

SEQ ID NO: 379098 - DNA, 3610 bp, Homo sapiens
gcggaggagaagtggcgtcgagtccggccgggcagtagaggaaattgcggtagtgaccctcgggcctcgccatgaagagccgctttagcaccattgacctccgcgccgtactcgcggagctgaatgctagcttgctaggaatgagagtaaacaatgtttatgatgtggataataagacataccttattcgtcttcaaaaaccggactttaaagctacacttttacttgaatctggcatacgaattcatacaacagaatttgagtggcctaagaatatgatgccgtctagttttgccatgaagtgccgaaaacatttgaagagtcggagattagtcagtgcaaaacagcttggtgtggatagaattgtagattttcaatttggaagtgatgaagctgcttaccatttaatcattgagctctatgatagggggaacattgttcttacagattatgagtacgtaattttaaatattctaaggtttcgaactgatgaggcagatgatgttaaatttgctgttcgtgaacgctatccacttgatcatgctagagctgctgaacctttgcttactttggaaaggttgactgaaatagtagccagcgcacctaagggtgaactactgaagagggtgcttaacccattacttccctatggaccagctctcattgaacactgtcttttagaaaatggattctcgggtaatgtcaaagtggatgaaaaacttgaaactaaagatattgaaaaagtacttgtttctctgcagaaagcagaagactatatgaaaacaacatccaacttcagtgggaagggatatatcattcagaaaagagaaataaaaccatgcttggaagcagataaaccagttgaagacatactgacgtatgaggaatttcatcctttcttgttttctcaacattcacaatgtccatatatagaatttgaatcatttgacaaggcggtggatgaattttattccaagatagaaggccagaaaattgacttaaaagctttacaacaggaaaagcaagcattgaagaaattagataatgttcgaaaggatcacgaaaacagattggaagctcttcagcaggctcaggaaatagacaaactgaaaggagagctcatagaaatgaacctacaaatagttgacagagccattcaggtagttcgaagtgctttagctaaccagatagattggacagaaattgggttaattgtgaaagaagcccaggctcaaggagaccctgttgcaagtgcaatcaaagaattaaaactacaaacaaaccatgttacaatgctgctaagaaatccatacttgttatcagaggaggaagatgatgatgttgatggtgacgtcaatgttgagaaaaatgaaactgaaccaccaaaaggaaaaaagaaaaaacaaaagaataaacagctgcagaagcctcagaaaaataagcccttacttgtagatgttgatctcagcttgtcagcatatgccaatgccaaaaagtattatgatcacaagagatatgctgctaagaaaacacaaaagactgttgaagctgctgagaaggcattcaagtcagcagaaaagaaaacaaagcaaacattaaaagaagttcagactgttacctctattcaaaaagcaagaaaagtatattggtttgagaaatttctgtggttcattagctcagagaactatctaattataggtggacgagatcagcaacagaatgaaataattgtgaaaagatacttgacaccaggagacatttatgtacatgctgatcttcatggagctactagctgtgtaattaagaatccaacaggagaacccatccccccacggaccttgactgaagctggcacaatggcactttgctacagtgctgcttgggatgcacgagttatcactagtgcttggtgggtgtaccatcatcaggtatctaaaacagcaccaactggagaatatttgacaacaggaagcttcatgataagaggaaaaaagaattttcttcctccctcatatctaatgatggggtttagcttcctttttaaggtagatgagtcttgtgtttggagacatcagggtgaacgaaaagtcagagtacaggatgaagacatggagacactggcaagttgtacaagtgaactcatatcagaagaaatggaacaattagatggaggtgacacgagcagtgatgaggataaagaagaacatgaaactcctgtggaagtagaactcatgactcaggttgaccaagaggatatcactcttcagagtggcagagatgaactaaatgaggagctcattcaggaagaaagctctgaagacgaaggagaatatgaagaggttagaaaagatcaggattctgttggtgaaatgaaggatgaaggggaagagacattaaattatcctgatactaccattgacttgtctcaccttcaaccccaaaggtccatccagaaattggcttcaaaagaggaatcttctaattctagtgacagtaaatcacagagccggagacatttgtcagccaaggaaagaagagatggggtttcaccgtgttaggcaggattgtctcgatcttctgacctcgcgatccacccgccttggcctcccaaagtgctggattacagtcaaccaaccggtcaacagatgttttattgaatgcctaagacctgccaatgctatgttggtacaaagactacaaatcccagtgcctggccatcaaggtgatcaggggcaaaatgtgcctagtgagtaaggatgagtcaggggtgacaatatgttgagcttggatgatggaaagaaagataaatccatgagagatgaaaaacttgcatctttttcccacatgatgattttaagcatctttgtattttctaacttggtgattatcaagtgaagcagaagccatgaccatttatatactgtatatgtgccttccccatggaacttttttagggcactaagaatttcaaattctaagaatgaaatgttttcatgtcttttttattcagggaaatgaaaaagaaaaaacttccaagtgactcaggagatttagaagcgttagagggaaaggataaagaaaaagaaagtactgtacacattgaaactcatcagaacacaagcaaaaatgttgcggctgtgcagccaatgaaacgaggacaaaagatggaggtgacacgagcagtgatgaggataaagaagaacatgaaactcctgtggaagtagaactcatgactcaggttgaccacgaggatatcactcttcagagtggcagagatgaactaaatgaggagctcattcaggaagaaagctctgaagacgaaggagaatatgaagaggttagaaaagatcaggattctgttggtgaaatgaaggatgaacggggaagagacacttaaacttactcctgatactaccccctcgacttgtctcaccttcaacccccaaggtccatccagatataggcttcaacagaggtatcttctaattctcgtgacagtaaatcacagagccggagcacatctcccggctctaggacaggccgccaaattgaacaagaatcacacgttacaactgactccctgagtgtaagacgccccccgagtgaatcc

SEQ ID NO: 379099 - DNA, 2750 bp, Homo sapiens
gcggaggagaagtggcgtcgagtccggccgggcagtagaggaaattgcggtagtgaccctcgggcctcgccatgaagagccgctttagcaccattgacctccgcgccgtactcgcggagctgaatgctagcttgctaggaatgagagtaaacaatgtttatgatgtggataataagacataccttattcgtcttcaaaaaccggactttaaagctacacttttacttgaatctggcatacgaattcatacaacagaatttgagtggcctaagaatatgatgccgtctagttttgccatgaagtgccgaaaacatttgaagagtcggagattagtcagtgcaaaacagcttggtgtggatagaattgtagattttcaatttggaagtgatgaagctgcttaccatttaatcattgagctctatgatagggggaacattgttcttacagattatgagtacgtaattttaaatattctaaggtttcgaactgatgaggcagatgatgttaaatttgctgttcgtgaacgctatccacttgatcatgctagagctgctgaacctttgcttactttggaaaggttgactgaaatagtagccagcgcacctaagggtgaactactgaagagggtgcttaacccattacttccctatggaccagctctcattgaacactgtcttttagaaaatggattctcgggtaatgtcaaagtggatgaaaaacttgaaactaaagatattgaaaaagtacttgtttctctgcagaaagcagaagactatatgaaaacaacatccaacttcagtgggaagggatatatcattcagaaaagagaaataaaaccatgcttggaagcagataaaccagttgaagacatactgacgtatgaggaatttcatcctttcttgttttctcaacattcacaatgtccatatatagaatttgaatcatttgacaaggcggtggatgaattttattccaagatagaaggccagaaaattgacttaaaagctttacaacaggaaaagcaagcattgaagaaattagataatgttcgaaaggatcacgaaaacagattggaagctcttcagcaggctcaggaaatagacaaactgaaaggagagctcatagaaatgaacctacaaatagttgacagagccattcaggtagttcgaagtgctttagctaaccagatagattggacagaaattgggttaattgtgaaagaagcccaggctcaaggagaccctgttgcaagtgcaatcaaagaattaaaactacaaacaaaccatgttacaatgctgctaagaaatccatacttgttatcagaggaggaagatgatgatgttgatggtgacgtcaatgttgagaaaaatgaaactgaaccaccaaaaggaaaaaagaaaaaacaaaagaataaacagctgcagaagcctcagaaaaataagcccttacttgtagatgttgatctcagcttgtcagcatatgccaatgccaaaaagtattatgatcacaagagatatgctgctaagaaaacacaaaagactgttgaagctgctgagaaggcattcaagtcagcagaaaagaaaacaaagcaaacattaaaagaagttcagactgttacctctattcaaaaagcaagaaaagtatattggtttgagaaatttctgtggttcattagctcagagaactatctaattataggtggacgagatcagcaacagaatgaaataattgtgaaaagatacttgacaccaggagacatttatgtacatgctgatcttcatggagctactagctgtgtaattaagaatccaacaggagaacccatccccccacggaccttgactgaagctggcacaatggcactttgctacagtgctgcttgggatgcacgagttatcactagtgcttggtgggtgtaccatcatcaggtatctaaaacagcaccaactggagaatatttgacaacaggaagcttcatgataagaggaaaaaagaattttcttcctccctcatatctaatgatggggtttagcttcctttttaaggtagatgagtcttgtgtttggagacatcagggtgaacgaaaagtcagagtacaggatgaagacatggagacactggcaagttgtacaagtgaactcatatcagaagaaatggaacaattagatggaggtgacacgagcagtgatgaggataaagaagaacatgaaactcctgtggaagtagaactcatgactcaggttgaccaagaggatatcactcttcagagtggcagagatgaactaaatgaggagctcattcaggaagaaagctctgaagacgaaggagaatatgaagaggttagaaaagatcaggattctgttggtgaaatgaaggatgaaggggaagagacattaaattatcctgatactaccattgacttgtctcaccttcaaccccaaaggtccatccagaaattggcttcaaaagaggaatcttctaattctagtgacagtaaatcacagagccggagacatttgtcagccaaggaaagaagggaaatgaaaaagaaaaaacttccaagtgactcaggagatttagaagcgttagagggaaaggataaagaaaaagaaagtactgtacacattgaaactcatcagaacacaagcaaaaatgttgcggctgtgcagccaatgaaacgaggacaaaagatgtaaaatgaacaacacatgaaaagacaaatacctagagcccgaacgaaccccctgtga

SEQ ID NO: 379100 - DNA, 2410 bp, Homo sapiens
gcggaggagaagtggcgtcgagtccggccgggcagtagaggaaattgcggtagtgaccctcgggcctcgccatgaagagccgctttagcaccattgacctccgcgccgtactcgcggagctgaatgctagcttgctaggaatgagagtaaacaatgtttatgatgtggataataagacataccttattcgtcttcaaaaaccggactttaaagctacacttttacttgaatctggcatacgaattcatacaacagaatttgagtggcctaagaatatgatgccgtctagttttgccatgaagtgccgaaaacatttgaagagtcggagattagtcagtgcaaaacagcttggtgtggatagaattgtagattttcaatttggaagtgatgaagctgcttaccatttaatcattgagctctatgatagggggaacattgttcttacagattatgagtacgtaattttaaatattctaaggtttcgaactgatgaggcagatgatgttaaatttgctgttcgtgaacgctatccacttgatcatgctagagctgctgaacctttgcttactttggaaaggttgactgaaatagtagccagcgcacctaagggtgaactactgaagagggtgcttaacccattacttccctatggaccagctctcattgaacactgtcttttagaaaatggattctcgggtaatgtcaaagtggatgaaaaacttgaaactaaagatattgaaaaagtacttgtttctctgcagaaagcagaagactatatgaaaacaacatccaacttcagtgggaagggatatatcattcagaaaagagaaataaaaccatgcttggaagcagataaaccagttgaagacatactgacgtatgaggaatttcatcctttcttgttttctcaacattcacaatgtccatatatagaatttgaatcatttgacaaggcggtggatgaattttattccaagatagaaggccagaaaattgacttaaaagctttacaacaggaaaagcaagcattgaagaaattagataatgttcgaaaggatcacgaaaacagattggaagctcttcagcaggctcaggaaatagacaaactgaaaggagagctcatagaaatgaacctacaaatagttgacagagccattcaggtagttcgaagtgctttagctaaccagatagattggacagaaattgggttaattgtgaaagaagcccaggctcaaggagaccctgttgcaagtgcaatcaaagaattaaaactacaaacaaaccatgttacaatgctgctaagaaatccatacttgttatcagaggaggaagatgatgatgttgatggtgacgtcaatgttgagaaaaatgaaactgaaccaccaaaaggaaaaaagaaaaaacaaaagaataaacagctgcagaagcctcagaaaaataagcccttacttgtagatgttgatctcagcttgtcagcatatgccaatgccaaaaagtattatgatcacaagagatatgctgctaagaaaacacaaaagactgttgaagctgctgagaaggcattcaagtcagcagaaaagaaaacaaagcaaacattaaaagaagttcagactgttacctctattcaaaaagcaagaaaagtatattggtttgagaaatttctgtggttcattagctcagagaactatctaattataggtggacgagatcagcaacagaatgaaataattgtgaaaagatacttgacaccaggagacatttatgtacatgctgatcttcatggagctactagctgtgtaattaagaatccaacaggagaacccatccccccacggaccttgactgaagctggcacaatggcactttgctacagtgctgcttgggatgcacgagttatcactagtgcttggtgggtgtaccatcatcaggtatctaaaacagcaccaactggagaatatttgacaacaggaagcttcatgataagaggaaaaaagaattttcttcctccctcatatctaatgatggggtttagcttcctttttaaggtactcttcaacttcttggttatttatttgtttttttcctgattttcattagtcttgtctgaagctccgtcactgaaaaataactgtttctttaggtagatgagtcttgtgtttggagacatcagggtgaacgaaaagtcagagtacaggatgaagacatggagacactggcaagttgtacaagtgaactcatatcagaagaaatggaacaattaggtagtttatagattttaagaaattagcttgtgatgttttttgttacctagttttgcttctaaatccttagaagatcatgtctctttgggataatctaaatttcaaaaaaaccccgaaaacccaaagtacgtgctgttttactgaatttt

SEQ ID NO: 379101 - DNA, 2106 bp, Homo sapiens
gcggaggagaagtggcgtcgagtccggccgggcagtagaggaaattgcggtagtgaccctcgggcctcgccatgaagagccgctttagcaccattgacctccgcgccgtactcgcggagctgaatgctagcttgctaggaatgagagtaaacaatgtttatgatgtggataataagacataccttattcgtcttcaaaaaccggactttaaagctacacttttacttgaatctggcatacgaattcatacaacagaatttgagtggcctaagaatatgatgccgtctagttttgccatgaagtgccgaaaacatttgaagagtcggagattagtcagtgcaaaacagcttggtgtggatagaattgtagattttcaatttggaagtgatgaagctgcttaccatttaatcattgagctctatgatagggggaacattgttcttacagattatgagtacgtaattttaaatattctaaggtttcgaactgatgaggcagatgatgttaaatttgctgttcgtgaacgctatccacttgatcatgctagagctgctgaacctttgcttactttggaaaggttgactgaaatagtagccagcgcacctaagggtgaactactgaagagggtgcttaacccattacttccctatggaccagctctcattgaacactgtcttttagaaaatggattctcgggtaatgtcaaagtggatgaaaaacttgaaactaaagatattgaaaaagtacttgtttctctgcagaaagcagaagactatatgaaaacaacatccaacttcagtgggaagggatatatcattcagaaaagagaaataaaaccatgcttggaagcagataaaccagttgaagacatactgacgtatgaggaatttcatcctttcttgttttctcaacattcacaatgtccatatatagaatttgaatcatttgacaaggcggtggatgaattttattccaagatagaaggccagaaaattgacttaaaagctttacaacaggaaaagcaagcattgaagaaattagataatgttcgaaaggatcacgaaaacagattggaagctcttcagcaggctcaggaaatagacaaactgaaaggagagctcatagaaatgaacctacaaatagttgacagagccattcaggtagttcgaagtgctttagctaaccagatagattggacagaaattgggttaattgtgaaagaagcccaggctcaaggagaccctgttgcaagtgcaatcaaagaattaaaactacaaacaaaccatgttacaatgctgctaagaaatccatacttgttatcagaggaggaagatgatgatgttgatggtgacgtcaatgttgagaaaaatgaaactgaaccaccaaaaggaaaaaagaaaaaacaaaagaataaacagctgcagaagcctcagaaaaataagcccttacttgtagatgttgatctcagcttgtcagcatatgccaatgccaaaaagtattatgatcacaagagatatgctgctaagaaaacacaaaagactgttgaagctgctgagaaggcattcaagtcagcagaaaagaaaacaaagcaaacattaaaagaagttcagactgttacctctattcaaaaagcaagaaaagtatattggtttgagaaatttctgtggttcattagctcagagaactatctaattataggtggacgagatcagcaacagaatgaaataattgtgaaaagatacttgacaccaggagacatttatgtacatgctgatcttcatggagctactagctgtgtaattaagaatccaacaggagaacccatccccccacggaccttgactgaagctggcacaatggcactttgctacagtgctgcttgggatgcacgagttatcactagtgcttggtgggtgtaccatcatcaggtatctaaaacagcaccaactggagaatatttgacaacaggaagcttcatgataagaggaaaaaagaattttcttcctccctcatatctaatgatggggtttagcttcctttttaaggtagatgagtcttgtgtttggagacatctaccttaaaaaggaagctaaaccggcgcggccg

SEQ ID NO: 379102 - DNA, 2644 bp, Homo sapiens
ccccttttaaaagcaccgttttaacctcccagttctggaaaatggttaccgggtatctctatttaagggaaaaaaaattaaataaaacactttgggttttcccaaaaaaaaaaaaaaaaaaagaaagaaaattattgatgtagtggattctttgtttttttctttgttacttccaaaggcttatctgtcattaaaggggtatctttccctttagtattgagaatttgtacgaaattataaacttttcagaagacagtgtggcttacttgactctgactttactttctcctcaagtggaaaaagaaaactagagtatttttttaaataagaatataatgtattattgtgttcttcaggtatctaaaacagcaccaactggagaatatttgacaacaggaagcttcatgataagaggaaaaaagaattttcttcctccctcatatctaatgatggggtttagcttcctttttaaggtactcttcaacttcttggttatttatttgtttttttcctgattttcattagtcttgtctgaagctccgtcactgaaaaataactgtttctttaggtagatgagtcttgtgtttggagacatcagggtgaacgaaaagtcagagtacaggatgaagacatggagacactggcaagttgtacaagtgaactcatatcagaagaaatggaacaattagatggaggtgacacgagcagtgatgaggataaagaagaacatgaaactcctgtggaagtagaactcatgactcaggttgaccaagaggatatcactcttcagagtggcagagatgaactaaatgaggagctcattcaggaagaaagctctgaagacgaaggagaatatgaagaggttagaaaagatcaggattctgttggtgaaatgaaggatgaaggggaagagacattaaattatcctgatactaccattgacttgtctcaccttcaaccccaaaggtccatccagaaattggcttcaaaagaggaatcttctaattctagtgacagtaaatcacagagccggagacatttgtcagccaaggaaagaagggaaatgaaaaagaaaaaacttccaagtgactcaggagatttagaagcgttagagggaaaggataaagaaaaagaaagtactgtacacattgaaactcatcagaacacaagcaaaaatgttgcggctgtgcagccaatgaaacgaggacaaaagagtaaaatgaaaaaaatgaaagaaaaatacaaagaccaggatgaagaagaccgtgaacttatcatgaagttgctggggtctgcaggttcaaacaaagaagaaaaagggaagaaggggaagaaaggaaaaacaaaggacgaacctgtgaagaaacagccccagaaacctagaggtggacagagggtctctgacaacattaagaaagaaactccgttccttgaggttataactcatgagttacaagactttgctgtagatgatccacatgatgacaaggaagagcaagatctggatcaacagggaaatgaggaaaacctatttgattctttgacaggccagccacatcctgaagatgtactactgtttgccattccaatatgtgccccttacaccaccatgacaaactacaaatataaagtgaaacttactcctggagtgcagaaaaagggaaaagctgcaaaaacagccttgaatagtttcatgcattccaaagaagcaacagcaagagaaaaagacttattccgcagcgtaaaggacacagatttatcaagaaacattcctggcaaagtgaaagtgtctgcacccaatcttctgaacgtaaaaaggaaatagctgaaatgaaattctaaaatatttgagaagagccaattttatagccttttggaagttcaaagatgaaagcaccatgtatcaggatttccgcattataaaaatgaactaaacattgccttgctatattcaccaaaaggacttacttcttgttttttcccagttttatatagaggaaacactgtctatgataggatttccaaaagtatttgtggacagttaaatgctaattaatatacatctgtagttattctacattttcttgaaatttgggaggttaataccaagtattcatttcatgatgtaaagaaactgaacagtgaagtggcttgattgcttaaactattgacttggtaagtctactgtatataacatctaatatatatattacaggccaaatgaactaaacattgccttgctatattcaccaaaaggacttaattcttgtttttttcccagttttatatagaggaaacactatgataggatttcctaaagtatttgtggacagttaaatgctaattatatacatctgtagttattctacattttcttgaaatttgagaggttaataccaagtattcatttcatgatgtaaagaaactgaacagtgaagtggcttgattgcttaaactattgacttggtaagtctactgtatataacatctaatatatatatattataggccagctacaaggggtttaaatatttaggattgtgtcttgaaaactaagtattggagtggattttcttctgctttcattgatacttgtcagaaaaaaatattagaccaaaatgtaaaatataagtaataattctca

SEQ ID NO: 379103 - DNA, 2066 bp, Homo sapiens
cctgaactaagacgttggcattgggaacagaaagaaggataccacagtaataaaatttacccttcctacttaacctgtgtatttttaatccatttagtcaaccaaccggtcaacagatgttttattgaatgcctaagacctgccaatgctatgttggtacaaagactacaaatcccagtgcctggccatcaaggtgatcaggggcaaaatgtgcctagtgagtaaggatgagtcaggggtgacaatatgttgagcttggatgatggaaagaaagataaatccatgagagatgaaaaacttgcatctttttcccacatgatgattttaagcatctttgtattttctaacttggtgattatcaagtgaagcagaagccatgaccatttatatactgtatatgtgccttccccatggaacttttttagggcactaagaatttcaaattctaagaatgaaatgttttcatgtcttttttattcagggaaatgaaaaagaaaaaacttccaagtgactcaggagatttagaagcgttagagggaaaggataaagaaaaagaaagtactgtacacattgaaactcatcagaacacaagcaaaaatgttgcggctgtgcagccaatgaaacgaggacaaaagagtaaaatgaaaaaaatgaaagaaaaatacaaagaccaggatgaagaagaccgtgaacttatcatgaagttgctggggtctgcaggttcaaacaaagaagaaaaagggaagaaggggaagaaaggaaaaacaaaggacgaacctgtgaagaaacagccccagaaacctagaggtggacagagggtctctgacaacattaagaaagaaactccgttccttgaggttataactcatgagttacaagactttgctgtagatgatccacatgatgacaaggaagagcaagatctggatcaacagggaaatgaggaaaacctatttgattctttgacaggccagccacatcctgaagatgtactactgtttgccattccaatatgtgccccttacaccaccatgacaaactacaaatataaagtgaaacttactcctggagtgcagaaaaagggaaaagctgcaaaaacagccttgaatagtttcatgcattccaaagaagcaacagcaagagaaaaagacttattccgcagcgtaaaggacacagatttatcaagaaacattcctggcaaagtgaaagtgtctgcacccaatcttctgaacgtaaaaaggaaatagctgaaatgaaattctaaaatatttgagaagagccaattttatagccttttggaagttcaaagatgaaagcaccatgtatcaggatttccgcattataaaaatgaactaaacattgccttgctatattcaccaaaaggacttacttcttgttttttcccagttttatatagaggaaacactgtctatgataggatttccaaaagtatttgtggacagttaaatgctaattaatatacatctgtagttattctacattttcttgaaatttgggaggttaataccaagtattcatttcatgatgtaaagaaactgaacagtgaagtggcttgattgcttaaactattgacttggtaagtctactgtatataacatctaatatatatattacaggccaaatgaactaaacattgccttgctatattcaccaaaaggacttaattcttgtttttttcccagttttatatagaggaaacactatgataggatttcctaaagtatttgtggacagttaaatgctaattatatacatctgtagttattctacattttcttgaaatttgagaggttaataccaagtattcatttcatgatgtaaagaaactgaacagtgaagtggcttgattgcttaaactattgacttggtaagtctactgtatataacatctaatatatatatattataggccagctacaaggggtttaaatatttaggattgtgtcttgaaaactaagtattggagtggattttcttctgctttcattgatacttgtcagaaaaaaatattagaccaaaatgtaaaatataagtaataattctca

SEQ ID NO: 379104 - DNA, 1497 bp, Homo sapiens
gcggaggagaagtggcgtcgagtccggccgggcagtagaggaaattgcggtagtgaccctcgggcctcgccatgaagagccgctttagcaccattgacctccgcgccgtactcgcggagctgaatgctagcttgctaggaatgagagtaaacaatgtttatgatgtggataataagacataccttattcgtcttcaaaaaccggactttaaagctacacttttacttgaatctggcatacgaattcatacaacagaatttgagtggcctaagaatatgatgccgtctagttttgccatgaagtgccgaaaacatttgaagagtcggagattagtcagtgcaaaacagcttggtgtggatagaattgtagattttcaatttggaagtgatgaagctgcttaccatttaatcattgagctctatgatagggggaacattgttcttacagattatgagtacgtaattttaaatattctaaggtttcgaactgatgaggcagatgatgttaaatttgctgttcgtgaacgctatccacttgatcatgctagagctgctgaacctttgcttactttggaaaggttgactgaaatagtagccagcgcacctaagggtgaactactgaagagggtgcttaacccattacttccctatggaccagctctcattgaacactgtcttttagaaaatggattctcgggtaatgtcaaagtggatgaaaaacttgaaactaaagatattgaaaaagtacttgtttctctgcagaaagcagaagactatatgaaaacaacatccaacttcagtgggaagggatatatcattcagaaaagagaaataaaaccatgcttggaagcagataaaccagttgaagacatactgacgtatgaggaatttcatcctttcttgttttctcaacattcacaatgtccatatatagaatttgaatcatttgacaaggcggtggatgaattttattccaagatagaaggccagaaaattgacttaaaagctttacaacaggtatgtattattaaaaacacatattaaaccagctagtctttagcggcttgatgggtagatgatataggaaagggtagcctttcagaaagagtgtaagaagtagtatgggaactctctgacctgcctctttatttatgataaaggtttatgaagaaggtccatgggggattttattgttgaaaagtatgtcctcatttgtttcatgagtatttcagatattctgtaaaaaaaggaaaatacggtgggaacgtgaggcctgttatttacaccttaatgtggtttgctcagaacaacccaaagcttctcaaacattgctgttaaggagatactgttttagggagattttaaataggccagaggaggggatattgtttatcattaaactgtttcttttttaaatggactttaaagccaagtcttaatatgttttctgtgtatcatgactccaaaagaagtgatatacagtattttcccagcacat

SEQ ID NO: 379105 - DNA, 375 bp, Homo sapiens
aaactgtcctggcaagaacaatcataaaacatgaattaagtatacaaaaaagtttaaaagcatttgagagcaaccaagtagtcaggacttaaaagtctaataataatataaaaaagaacacattgaagggaaactaatattctgtgctactttagcctttgaggtattcttcaaatcctaagcaatgcaaaataacggtataaaaagccaaatagaaattggcaatagagagtccaaaaaactaagaagagtttttagcagacacactgctgatgaaatagaaattgtacttcaaagactgtcaatgtggaggtcctaatccaagcttttagttgagacccctgaagagccaggccttagaagaaagaaaaaact

SEQ ID NO: 379106 - DNA, 408 bp, Homo sapiens
tgaagtattaatagtgatagaaaaacgtaagaagtaaagaataaattacattcaactgtgttgaaaatgctcataatttataaacatgattgctttttcttccctctatgagatgattacaagtggctcaaagcaaaggatgtgaatagaatcaaaatatttaattaattgaccattgaagtgataggggctgatagtagatttcctgtcactaaatgaaagacatagtcaagctgggataaatgtgattggccaaatatctccacgacgtgtatgtccgctttctgtcatgtgtctgtggacactgccggtgatttgaatcaatataacattttttattattgtaaataaaatgcttcatttagttctttctctgacatgaggaaaaattgttctctgatgaactac

SEQ ID NO: 379107 - DNA, 268 bp, Homo sapiens
tctgaaactctttacttacgagaattttttgtacattaatgagttgactttacttgaaatagccatcagaattataattgcagtctcctaaatttaatatttttaaattatttcaaaagaatatgactcacagcaactcaaggaaggaataagtggaaatcttttcttataggcttatatgttgtatacatcaaaaaaataaagtcacttaaagagaaaatgatggggagtcttttgaggcagtgatgttaactgtctttttcacatc

SEQ ID NO: 379108 - DNA, 1213 bp, Homo sapiens
gcgggtctttgctaaaccaatcctttggctgagagcgggaagtccgtcctaacgcgctggccggacatcagcagcagcaacgtgtgcatgagctcagctcggaaacccaaactcagattttatatcaggaaaactcacaattgaggtttttttcggggagtgggtgggggagggatctgggatgggtgtattaacagcaacaaatttcattcgagtggactcaaaaactaatcagacttatgagttagcgcattaaactgtgaagttcttgctcagaaaggcctttgtcttcaccggaaaggataaaatagttgtagaagtccgtgaacatgctaacctgtgtctccagaacatccatatagtccatggaagaaaatccagctgagaaaacaaatcactaaactgtgataagaaaataatgaacaaacatgtaaaacctgtgggaaaaaaaaaataaaggaagtatgtacacttactttggagaaaacaaatactgaaacatgcttgctttttaactgacgtaaattcagtagaggacaacacaattcttttttctaaccatcttagggaacaatacattgcaataattgatataaatgccatcactgtaataaactttagagacttttttttataaaagttgttggtcatcttcttgtttgctgtaaccttcactatgtcacatgagtcgattcaccgattgcatttgtctcacaaccaggaagaaaagcaaaaggaagaaaacgtttaggttcaatcatcagtctgcggtgtagactcgaaagagatgacaggtcactcatgttaatggtattatttataatctcattctgtgtacaacattgtggtttttgtacccaccaaaaagaataaaacagcagatgttcttacaatatctacagagcttaaaagttttttcttatcgttataaaagttatttgagaaattataagactataagagagattgtattagtggtgggccatagtggaaaatgtagctagccctcattattttttgcatactaagctacccctccttttcagatctttgactcattaacagattaaactgtcaaagatggagtctttgagttggggaatgaatcactgtcctaacaacaacataccttgtaattgtgtgttgaaattttacttgactgtattttgctgcataaaattatgtgtctcttgggcttcttcccttattccta

SEQ ID NO: 379109 - DNA, 313 bp, Homo sapiens
tgaaggggtctgctgtcagcttgagaaactaagaccgaactatgaccaccctatcttcaactggtccagaatagggctttgcaaaaattacgttctttctttctccgttaaccctgattggagaaacctgcccagatcttggctggtttggaagcgggaagtgtcaacaaaagtgaagagtctcacaaagccagtagctcgggagaccccaagagcgggccagaaacgacctttccgttggaaaacgggcccctctcccacctgctgcaggtccccggacccgccctcctgcgcctcgaccacaggcgcggcc

SEQ ID NO: 379110 - DNA, 1102 bp, Homo sapiens
  misc_feature (449)..(450): n is a, c, g, or t
  misc_feature (546)..(546): n is a, c, g, or t
  misc_feature (629)..(629): n is a, c, g, or t
tgaatgataagattaccacttttcagatcattaactttacatataagaaaaattccctgagtaagccattgctgggggaaaaattataaacttttcatgtcatgatactttatttatttccataaaaacttaacatcacttcttgatattttctaattgagagctctttattgaaaaatagcaactttctaaattaagagctccttattgaaaatagcagtttgtgcacacaatagcataacattcttttctgtattttgagaattaagaaaataaatgtttttaaagatatatgccaatagtgatatttaacacataaaggtgtgatgtatttttgaagtgtcttagaagaaagccaatgtggatattgcagggtcactgtggaaatgtgtatcagtgaccgtttagttgtaaatgcacaaaagagaaagaatgtcagccttagaggnntatcctgcttttcccaattttagaaccaggaagtttttactgaaatggctttgtggaacttacttacaagctaagtaaccttcccagtagttttantatggacagtaattagtgctttcgcttttctgatgaagatgtgtaaaaaaaaacaggttaggaatttcctctcccccaccagnctcattctgtggaataagcagaagcaggacgacagccagctggagtctgactgcagggactcgcttcctcaacaccctgacctcacactggctcagcggaaggtctgaactgtgctgaaatgttatagaacaaatgtgaataaagctgtgggtagggaggggagagctagtgggagagatacattctgttgctttaagtgatggccattctttcttatttcttgtttccacaaaacgttttccatttgcctaacaaacttcttaatatatttccataagataattttaatacttttttaaatttataatttgattttgatgtcttttctccctactcccagggaacagaaaatagggtagctgttattgctctggagtgttttgtcacccttccatgacgcctcctctgtgcatttgagttcactgtttatgctcaacactgaatttcaacaaaatgcctcatttggaactta

SEQ ID NO: 379111 - DNA, 385 bp, Homo sapiens
actcccttccggatgtatcccttacgtctcatctcccttaccgtctcatctcccttaccgtctcatctcccttaccatctgcagtccttgtttctccactacacaagaaacacatccaaaacaagcaacaccttttcacagcttgtctctctcaatagtaacaacaacaaactagttatttctcccagctccagtatgaaagttcccagtagaggttcagttcacctatccttcccatggacagatctgcgtggctaggagaaagttctatgactcggcccatctctgaagccaaggggactagggggttgtggggaggtgggtattaatgaagggcagcactgacctagccactaataatcctcctgaacttcgcagcctcccc

SEQ ID NO: 379112 - DNA, 462 bp, Homo sapiens
tcttttactttcaaatgtcaaatacctaaacactaccttaagggtaaggaggcctaataattaatgtagtcagatcataaaaagtatgctctagtagcctcagggatccaggaatttctctctcatctcaattcgcctctttctaccccaaccatctgcagtccttgtttctccactacacaagaaacacatccaaaacaagcaacaccttttcacagcttgtctctctcaatagtaacaacaacaaactagttatttctcccagctccagtatgaaagttcccagtagaggttcagttcacctatccttcccatggacagatctgcgtggctaggagaaagttctatgactcggcccatctctgaagccaaggggactagggggttgtggggaggtgggtattaatgaagggcagcactgacctagccactaataatcctcctgaacttcgcagcctcccc

SEQ ID NO: 379113 - DNA, 425 bp, Homo sapiens
gaacaggatttgaatagtaagtcaagtgcttggtctcctgtactagaagcaacagtagctctcagaagtgtgaattttattttttcaatgtaggtagcttatgaggcagacaggagaatccaaaatgagcaagtactctttggcatgttgaggttgtaactactagtcttttatgtagattttgtttttattagtatgaaaaatacttagtgcagtctgaaaactgtgaggttgatgggtgttattaatagcaaatcaaagtaattttcttatgtgcattaccaataaaaacagggaaatatttgtgtatctttcatgttttgtacttagtaatttttcaaaattctctacccacttaactgtttttccaaaataaaagactcccccccgattgaaaaatattcattgttcttttaaaaaaagaa

SEQ ID NO: 379114 - DNA, 472 bp, Homo sapiens
gagactgcaccactgcactccagcctggcgacagagcgagattccatctcaaaaaaaaaaaacaaaaaaagacatacttttccaattagggtaaacgtgcgattcgcaagggagggtgggggataggagtggtccctctgctacagcacaaggcgtgttcggacatgtctgggcaagtccgggcacaacaagagcgggagggctgctcacaggctagaaacaagaaagtacaaggaggtgaggctccgaaccaaggacaaggacattacacaattaaaccctttgaagacgaattcaccatctctggcagtcagaatgatagagggagacaattgcagatagaacaaggcctttgggagaacggggagttgaagtggaggaggtgatgctggagtactgggaatgttctatttcacgatgagtgtgaattacagtttatggaactgtgagtttatgtttgataacacttctc

SEQ ID NO: 379115 - DNA, 359 bp, Homo sapiens
tttttttttttgagacagggtctcactctgtcgcccaagctggaatgcagtggtacaaaaaatacatttatataaaggtacatataaattaactcttgagaactgtatacaccacaagtgtggggcaaatactgagcttaaattattacctgataaattaaaaatgtaaaaaatacgcaaactaaaatggaatttttaaaggtcatctagtccaacaaccattatagcatatagtttgaatgtaaaacacctttaatagcgccattgtgttatctttaaaaagttgggtctgctatcaactataccaataacaagatatatcagcttagacccacctcagttttcctaggcctttcttt

SEQ ID NO: 379116 - DNA, 1013 bp, Homo sapiens
gaggaagtagggggctgggaatccgggactgtgggggcaagttgacggctcccagggtcgtcggggctgagccgagagggtggttagaatttctatattttggggtccctccctccgtatggggtaagactcagtgcagggagagcccagcctatgaaaccgcctgggaggtctgcaggatcaaggctttccagtcggccggagccagcgggcgcccccggaggctggagtgcaatggcgcgatctcagctcactgcagcctccgcctcccgggttcaagcgattcttctgcctcagcctcccgagtagcagattatgagcttacagaaagcctggcctacattttactctttttggatttcttcctcatcaagagactgctgcggtgcctgtcatgtgacagcggcatggacatatgccccaggctttcctgctggggtccatccatgagcctgcaggtgccctcatggagccccagccctgccctggaagcttggctgagagcttcctggaggaggagcttcggctcaatgctgagctgagccagctgcagttttcggagcctgtgggcatcatctacaatcccgtggagtatgcatgggagccacatcgcaactacgtgactcgctactgccagggccccaaggaagtactcttcctgggcatgaaccctggaccttttggcatggcccagactggggtgccctttggggaagtaagcatggtccgggactggttgggcattgtggggcctgtgctgacccctccccaagagcatcctaaacgaccagtgctgggactggagtgcccacagtcagaaggaccaagacaaagcatgggacatgaaattaagagtgaacttcttatgggaggctgcagctggatcagaggaaaaatccagtgtgacagagtgcaagtcagaagacctggcttttcatcccagctttgaaacttggaactttttgattgacaaattaataaacctctctatgcctcaggctcctcatctgtaa

SEQ ID NO: 379117 - DNA, 2612 bp, Homo sapiens
agacggatggggtgctggaccaggctggagtgcaatggcgcgatctcagctcactgcagcctccgcctcccgggttcaagcgattcttctgcctcagcctcccgagtaggtgacagcggcatggacatatgccccaggctttcctgctggggtccatccatgagcctgcaggtgccctcatggagccccagccctgccctggaagcttggctgagagcttcctggaggaggagcttcggctcaatgctgagctgagccagctgcagttttcggagcctgtgggcatcatctacaatcccgtggagtatgcatgggagccacatcgcaactacgtgactcgctactgccagggccccaaggaagtactcttcctgggcatgaaccctggaccttttggcatggcccagactggggtaaagggtttggcttccccagtgggtggagtggggggttctaggtggatgcttggctgggtgtgctgtggagaaggagcatgtgcatggctgtagacatgtgtaggtcctcccgccccattctgtctcaacacatatactggctcctgtggtccggggccctctcccagcgtctctgcccgtaattaaccaagcacattaatggtagtttcgttttccctgcgagctggccagtaattgcctctgagagcccttccttccgccagccccatccttactttactggatctcccctgtccctgaagtgtggttggggtcagaagagggactaggactgctgggtcctcagaagagactggttgacaggggtgggtatgtaagagatgcagggcgttctgggaacctgggttctgtttcctagctaaggcgaggttcaaaacagagcctggctccagtgcctgcccgcttttctttcagggctcaggatgagtgactgcccccagtgggggtgcttggcaggtgggggaggggaagaggcttcagggcagaaggctcaatcgcttttattgaccccaactgggtgatgaaaggtgatcaatgatgatcgatggaaatgacagcctgaggcttggggctgagagggcatccagacagcagtggtcagcccatccttgtgcctcctttaaccctggctgcctttctgtctcagaccatctgtctgtccccagtactaaccatcaaaccctgtgtagggctagatatctcaatgtagtccctgtacttatcccaaaggctagttgggctagagggaaacaaattcttctggaccacggttcacaatgaagaactggaaaaagacagacaggctcaaaccatagggccaagaatccttgtctcaggcctttgggtgaaggtaggggtagggggtgcaggctggatcctcatgtaaggtataaagaagtcagttggtccagagcccgggcctcaggtctccagtttgaagcctttcatgtctctctccttcctcacagtgccctttggggaagtaagcatggtccgggactggttgggcattgtggggcctgtgctgacccctccccaagagcatcctaaacgaccagtgctgggactggagtgcccacagtcagaagtgagtggtgcccgattctggggctttttccggaacctctgtggacagcctgaggtcttcttccatcactgttttgtccacaatctatgccctctgcttttcctggctcccagcgggcgcaaccttactcctgctgagctgcctgccaagcagcgagaacagcttcttgggatctgtgatgcagccctctgccggcaggtgcagctgctgggggtgcggctggtggtgggagttgggcgactggcagagcagcgggcacgacgggctctggcaggcctgatgccagaggtccaggtggaagggctcctgcatccctctccccgtaacccacaggccaacaagggctgggaggcagtggccaaggaaagattgaatgagctggggctgctgccactgctgttgaaatgagtgcccttggggccttgcatgggacacattcaagacctcgaagtcattcttggccaagcagatgacaacacatctcctggactggagcaaaaggtccttctgtgcaccctggtcgctgggaaacgtattctttgatctgttgaactgtcttccaacctgccatggcagttttgacactactcctgtttgccctcctgattcctgctttctttaccttttaacattgcccctttcaggggaccccactttgtagggaatctgcagaaggtgtgcttttgcacttgcagactgctctacctcagtgtttccttgggagactttattcagctgagagtgccctagacagtaacttctaaggtcacgtttactatttcagaggaaatatcttgccaggatacctacccatccttatagaacagttgcctttagctgacccctttcctcacagggaccaagacaaagcatgggacatgaaattaagagtgaacttcttatgggaggctgcagctggatcagaggaaaaatccagtgtgacagagtgcaagtcagaagacctggcttttcatcccagctttgaaacttggaactttttgattgacaaattaataaacctctctatgcctcaggctcctcatctgtaa

SEQ ID NO: 379118 - DNA, 783 bp, Homo sapiens
gaggaagtagggggctgggaatccgggactgtgggggcaagttgacggctcccagggtcgtcggggctgagccgagaggcagattatgagcttacagaaagcctggcctacattttactctttttggatttcttcctcatcaagagactgctgcggtgcctgtcatgtgacagcggcatggacatatgccccaggctttcctgctggggtccatccatgagcctgcaggtgccctcatggagccccagccctgccctggaagcttggctgagagcttcctggaggaggagcttcggctcaatgctgagctgagccagctgcagttttcggagcctgtgggcatcatctacaatcccgtggagtatgcatgggagccacatcgcaactacgtgactcgctactgccagggccccaaggaagtactcttcctgggcatgaaccctggaccttttggcatggcccagactggggtgccctttggggaagtaagcatggtccgggactggttgggcattgtggggcctgtgctgacccctccccaagagcatcctaaacgaccagtgctgggactggagtgcccacagtcagaaggaccaagacaaagcatgggacatgaaattaagagtgaacttcttatgggaggctgcagctggatcagaggaaaaatccagtgtgacagagtgcaagtcagaagacctggcttttcatcccagctttgaaacttggaactttttgattgacaaattaataaacctctctatgcctcaggctcctcatctgtaa

SEQ ID NO: 379119 - DNA, 735 bp, Homo sapiens
ggacgcgtgggtcgacccacgcgtccgggaacagattatgagcttacagaaagcctggcctacattttactctttttggatttcttcctcatcaagagactgctgcggtgcctgtcatgtgacagcggcatggacatatgccccaggctttcctgctggggtccatccatgagcctgcaggtgccctcatggagccccagccctgccctggaagcttggctgagagcttcctggaggaggagcttcggctcaatgctgagctgagccagctgcagttttcggagcctgtgggcatcatctacaatcccgtggagtatgcatgggagccacatcgcaactacgtgactcgctactgccagggccccaaggaagtactcttcctgggcatgaaccctggaccttttggcatggcccagactggggtgccctttggggaagtaagcatggtccgggactggttgggcattgtggggcctgtgctgacccctccccaagagcatcctaaacgaccagtgctgggactggagtgcccacagtcagaaggaccaagacaaagcatgggacatgaaattaagagtgaacttcttatgggaggctgcagctggatcagaggaaaaatccagtgtgacagagtgcaagtcagaagacctggcttttcatcccagctttgaaacttggaactttttgattgacaaattaataaacctctctatgcctcaggctcctcatctgtaa

SEQ ID NO: 379120 - DNA, 1783 bp, Homo sapiens
gaggaagtagggggctgggaatccgggactgtgggggcaagttgacggctcccagggtcgtcggggctgagccgagagggtggttagaatttctatattttggggtccctccctccgtatggggtaagactcagtgcagggagagcccagcctatgaaaccgcctgggaggtctgcaggatcaaggctttccagtcggccggagccagcgggcgcccccggagcagattatgagcttacagaaagcctggcctacattttactctttttggatttcttcctcatcaagagactgctgcggtgcctgtcatgtgacagcggcatggacatatgccccaggctttcctgctggggtccatccatgagcctgcaggtgccctcatggagccccagccctgccctggaagcttggctgagagcttcctggaggaggagcttcggctcaatgctgagctgagccagctgcagttttcggagcctgtgggcatcatctacaatcccgtggagtatgcatgggagccacatcgcaactacgtgactcgctactgccagggccccaaggaagtactcttcctgggcatgaaccctggaccttttggcatggcccagactggggtgccctttggggaagtaagcatggtccgggactggttgggcattgtggggcctgtgctgacccctccccaagagcatcctaaacgaccagtgctgggactggagtgcccacagtcagaagtgagtggtgcccgattctggggctttttccggaacctctgtggacagcctgaggtcttcttccatcactgttttgtccacaatctatgccctctgcttttcctggctcccagcgggcgcaaccttactcctgctgagctgcctgccaagcagcgagaacagcttcttgggatctgtgatgcagccctctgccggcaggtgcagctgctgggggtgcggctggtggtgggagttgggcgactggcagagcagcgggcacgacgggctctggcaggcctgatgccagaggtccaggtggaagggctcctgcatccctctccccgtaacccacaggccaacaagggctgggaggcagtggccaaggaaagattgaatgagctggggctgctgccactgctgttgaaatgagtgcccttggggccttgcatgggacacattcaagacctcgaagtcattcttggccaagcagatgacaacacatctcctggactggagcaaaaggtccttctgtgcaccctggtcgctgggaaacgtattctttgatctgttgaactgtcttccaacctgccatggcagttttgacactactcctgtttgccctcctgattcctgctttctttaccttttaacattgcccctttcaggggaccccactttgtagggaatctgcagaaggtgtgcttttgcacttgcagactgctctacctcagtgtttccttgggagactttattcagctgagagtgccctagacagtaacttctaaggtcacgtttactatttcagaggaaatatcttgccaggatacctacccatccttatagaacagttgcctttagctgacccctttcctcacagggaccaagacaaagcatgggacatgaaattaagagtgaacttcttatgggaggctgcagctggatcagaggaaaaatccagtgtgacagagtgcaagtcagaagacctggcttttcatcccagctttgaaacttggaactttttgattgacaaattaataaacctctctatgcctcaggctcctcatctgtaa

SEQ ID NO: 379121 - DNA, 1683 bp, Homo sapiens
gaggaagtagggggctgggaatccgggactgtgggggcaagttgacggctcccagggtcgtcggggctgagccgagagggtggttagaatttctatattttggggtccctccctccgtatgggcagattatgagcttacagaaagcctggcctacattttactctttttggatttcttcctcatcaagagactgctgcggtgcctgtcatgtgacagcggcatggacatatgccccaggctttcctgctggggtccatccatgagcctgcaggtgccctcatggagccccagccctgccctggaagcttggctgagagcttcctggaggaggagcttcggctcaatgctgagctgagccagctgcagttttcggagcctgtgggcatcatctacaatcccgtggagtatgcatgggagccacatcgcaactacgtgactcgctactgccagggccccaaggaagtactcttcctgggcatgaaccctggaccttttggcatggcccagactggggtgccctttggggaagtaagcatggtccgggactggttgggcattgtggggcctgtgctgacccctccccaagagcatcctaaacgaccagtgctgggactggagtgcccacagtcagaagtgagtggtgcccgattctggggctttttccggaacctctgtggacagcctgaggtcttcttccatcactgttttgtccacaatctatgccctctgcttttcctggctcccagcgggcgcaaccttactcctgctgagctgcctgccaagcagcgagaacagcttcttgggatctgtgatgcagccctctgccggcaggtgcagctgctgggggtgcggctggtggtgggagttgggcgactggcagagcagcgggcacgacgggctctggcaggcctgatgccagaggtccaggtggaagggctcctgcatccctctccccgtaacccacaggccaacaagggctgggaggcagtggccaaggaaagattgaatgagctggggctgctgccactgctgttgaaatgagtgcccttggggccttgcatgggacacattcaagacctcgaagtcattcttggccaagcagatgacaacacatctcctggactggagcaaaaggtccttctgtgcaccctggtcgctgggaaacgtattctttgatctgttgaactgtcttccaacctgccatggcagttttgacactactcctgtttgccctcctgattcctgctttctttaccttttaacattgcccctttcaggggaccccactttgtagggaatctgcagaaggtgtgcttttgcacttgcagactgctctacctcagtgtttccttgggagactttattcagctgagagtgccctagacagtaacttctaaggtcacgtttactatttcagaggaaatatcttgccaggatacctacccatccttatagaacagttgcctttagctgacccctttcctcacagggaccaagacaaagcatgggacatgaaattaagagtgaacttcttatgggaggctgcagctggatcagaggaaaaatccagtgtgacagagtgcaagtcagaagacctggcttttcatcccagctttgaaacttggaactttttgattgacaaattaataaacctctctatgcctcaggctcctcatctgtaa

SEQ ID NO: 379122 - DNA, 1519 bp, Homo sapiens
tggggtgggggaaaggaaccggaaacgggatggggagctggaccaggtgacagcggcatggacatatgccccaggctttcctgctggggtccatccatgagcctgcaggtgccctcatggagccccagccctgccctggaagcttggctgagagcttcctggaggaggagcttcggctcaatgctgagctgagccagctgcagttttcggagcctgtgggcatcatctacaatcccgtggagtatgcatgggagccacatcgcaactacgtgactcgctactgccagggccccaaggaagtactcttcctgggcatgaaccctggaccttttggcatggcccagactggggtgccctttggggaagtaagcatggtccgggactggttgggcattgtggggcctgtgctgacccctccccaagagcatcctaaacgaccagtgctgggactggagtgcccacagtcagaagtgagtggtgcccgattctggggctttttccggaacctctgtggacagcctgaggtcttcttccatcactgttttgtccacaatctatgccctctgcttttcctggctcccagcgggcgcaaccttactcctgctgagctgcctgccaagcagcgagaacagcttcttgggatctgtgatgcagccctctgccggcaggtgcagctgctgggggtgcggctggtggtgggagttgggcgactggcagagcagcgggcacgacgggctctggcaggcctgatgccagaggtccaggtggaagggctcctgcatccctctccccgtaacccacaggccaacaagggctgggaggcagtggccaaggaaagattgaatgagctggggctgctgccactgctgttgaaatgagtgcccttggggccttgcatgggacacattcaagacctcgaagtcattcttggccaagcagatgacaacacatctcctggactggagcaaaaggtccttctgtgcaccctggtcgctgggaaacgtattctttgatctgttgaactgtcttccaacctgccatggcagttttgacactactcctgtttgccctcctgattcctgctttctttaccttttaacattgcccctttcaggggaccccactttgtagggaatctgcagaaggtgtgcttttgcacttgcagactgctctacctcagtgtttccttgggagactttattcagctgagagtgccctagacagtaacttctaaggtcacgtttactatttcagaggaaatatcttgccaggatacctacccatccttatagaacagttgcctttagctgacccctttcctcacagggaccaagacaaagcatgggacatgaaattaagagtgaacttcttatgggaggctgcagctggatcagaggaaaaatccagtgtgacagagtgcaagtcagaagacctggcttttcatcccagctttgaaacttggaactttttgattgacaaattaataaacctctctatgcctcaggctcctcatctgtaa

SEQ ID NO: 379123 - DNA, 1988 bp, Homo sapiens
gaggaagtagggggctgggaatccgggactgtgggggcaagttgacggctcccagggtcgtcggggctgagccgagagggtggttagaatttctatattttggggtccctccctccgtatggggtaagactcagtgcagggagagcccagcctatgaaaccgcctgggaggtctgcaggatcaaggctttccagtcggccggagccagcgggcgcccccggaggctggagtgcaatggcgcgatctcagctcactgcagcctccgcctcccgggttcaagcgattcttctgcctcagcctcccgagtagcagattatgagcttacagaaagcctggcctacattttactctttttggatttcttcctcatcaagagactgctgcggtgcctgtcatatggggtctcattatgtcagccaggctggtcttgaactcctggcctcaagcaattcttctgccttggcctctcaaagtgctgggattacaggcatgagccactgtgcccagcacagaaggtgacagcggcatggacatatgccccaggctttcctgctggggtccatccatgagcctgcaggtgccctcatggagccccagccctgccctggaagcttggctgagagcttcctggaggaggagcttcggctcaatgctgagctgagccagctgcagttttcggagcctgtgggcatcatctacaatcccgtggagtatgcatgggagccacatcgcaactacgtgactcgctactgccagggccccaaggaagtactcttcctgggcatgaaccctggaccttttggcatggcccagactggggtgccctttggggaagtaagcatggtccgggactggttgggcattgtggggcctgtgctgacccctccccaagagcatcctaaacgaccagtgctgggactggagtgcccacagtcagaagtgagtggtgcccgattctggggctttttccggaacctctgtggacagcctgaggtcttcttccatcactgttttgtccacaatctatgccctctgcttttcctggctcccagcgggcgcaaccttactcctgctgagctgcctgccaagcagcgagaacagcttcttgggatctgtgatgcagccctctgccggcaggtgcagctgctgggggtgcggctggtggtgggagttgggcgactggcagagcagcgggcacgacgggctctggcaggcctgatgccagaggtccaggtggaagggctcctgcatccctctccccgtaacccacaggccaacaagggctgggaggcagtggccaaggaaagattgaatgagctggggctgctgccactgctgttgaaatgagtgcccttggggccttgcatgggacacattcaagacctcgaagtcattcttggccaagcagatgacaacacatctcctggactggagcaaaaggtccttctgtgcaccctggtcgctgggaaacgtattctttgatctgttgaactgtcttccaacctgccatggcagttttgacactactcctgtttgccctcctgattcctgctttctttaccttttaacattgcccctttcaggggaccccactttgtagggaatctgcagaaggtgtgcttttgcacttgcagactgctctacctcagtgtttccttgggagactttattcagctgagagtgccctagacagtaacttctaaggtcacgtttactatttcagaggaaatatcttgccaggatacctacccatccttatagaacagttgcctttagctgacccctttcctcacagggaccaagacaaagcatgggacatgaaattaagagtgaacttcttatgggaggctgcagctggatcagaggaaaaatccagtgtgacagagtgcaagtcagaagacctggcttttcatcccagctttgaaacttggaactttttgattgacaaattaataaacctctctatgcctcaggctcctcatctgtaa

SEQ ID NO: 379124 - DNA, 3529 bp, Homo sapiens
gttagtataagtaacatgaaaacattctcctccgcataagcctgcgtcagttcagtgttttaatagctggacccagattatgagcttacagaaagcctggcctacattttactctttttggatttcttcctcatcaagagactgctgcggtgcctgtcatgtgacagcggcatggacatatgccccaggctttcctgctggggtccatccatgagcctgcaggtgccctcatggagccccagccctgccctggaagcttggctgagagcttcctggaggaggagcttcggctcaatgctgagctgagccagctgcagttttcggagcctgtgggcatcatctacaatcccgtggagtatgcatgggagccacatcgcaactacgtgactcgctactgccagggccccaaggaagtactcttcctgggcatgaaccctggaccttttggcatggcccagactggggtgccctttggggaagtaagcatggtccgggactggttgggcattgtggggcctgtgctgacccctccccaagagcatcctaaacgaccagtgctgggactggagtgcccacagtcagaagtgagtggtgcccgattctggggctttttccggaacctctgtggacagcctgaggtcttcttccatcactgttttgtccacaatctatgccctctgcttttcctggctcccagcgggcgcaaccttactcctgctgagctgcctgccaagcagcgagaacagcttcttgggatctgtgatgcagccctctgccggcaggtgcagctgctgggggtgcggctggtggtgggagttgggcgactggcagagcagcgggcacgacgggctctggcaggcctgatgccagaggtccaggtggaagggctcctgcatccctctccccgtaacccacaggccaacaagggctgggaggcagtggccaaggaaagattgaatgagctggggctgctgccactgctgttgaaatgagtgcccttggggccttgcatgggacacattcaagacctcgaagtcattcttggccaagcagatgacaacacatctcctggactggagcaaaaggtccttctgtgcaccctggtcgctgggaaacgtattctttgatctgttgaactgtcttccaacctgccatggcagttttgacactactcctgtttgccctcctgattcctgctttctttaccttttaacattgcccctttcaggggaccccactttgtagggaatctgcagaaggtgtgcttttgcacttgcagactgctctacctcagtgtttccttgggagactttattcagctgagagtgccctagacagtaacttctaaggtcacgtttactatttcagaggaaatatcttgccaggatacctacccatccttatagaacagttgcctttagctgacccctttcctcacagggaccaagacaaagcatgggacatgaaattaagagtgaacttcttatgggaggctgcagctggatcagaggaaaaatccagtgtgacagagtgcaagtcagaagacctggcttttcatcccagctttgaaacttggaactttttgattgacaaattaataaacctctctatgcctcaggctcctcatctgtaatgtaaaacagggatgcctaccttatggggttggtgtgaggattaactgagatcacacttgaaagtgccttgcatgggcttggcatgtgggtgctcattacatagtcttcttgttttcttgcctctgggttgaggattcacagcactgcactacaagggtagcccctctccattctggataccttgctaggagagagtctgggcttccacctgcggccagggtgaagggaaaattcttgccatgtcagagatggatcaatgactatgaaaaaactagcctgtgattttttttcactctaagcattaagagctcctaaagccttttgtcttgttacttttttccccctcttgcatgctagaggtggaaggtagtcatttagatttcccccctcttccctcttcattgttggccaggggttctcttgggcagctgggggaaggatgtagtagatctctcttttttttttttttttgagatggagtctcatgctgttgcccaggctggagtgcagtggcatggtctcagttcactgcaacatctgctttcccggttcaagtgattctcctgcctcagcctcctgtatagctggaattacaggcatgtgccaccacgcctggctaatttttgtatttttattaaagacagtgtttcaccatgttggccaggctggtctcaaactcctgacttcaagtaatccacctgtcttggcctcccaaagtgctgctgcctggctggatgtagcagatctccaattgccttaccaaacctgcagggtctctgttaagtgtctgttaggggtcttatatgatactctggacaccgtgagaaacaggtgatggggcagatgggaacctggtatccaactcattttttatgtctgctgaatggttgactgggtgcccctttggtaagggctgggaaagtgaaccaagttgggagcagagcaggtcttgagaccaccttaatgaggaacacatggtctacttcctatctcctgggacacaggtcatttccagcttccagaattagtaagatttttcatataaatcctcccctacttcattgtataataaagaatttggcctttgtcttcagttcctgagaaggagactctaaatccttggaatttcccaagtaataggagtatctttgtttttcgtggcaggtccctgaaactacacctgaatttatgttgagatttgaccttaggctgcacctaattttatattgaatttgatctcagaccacacctgagtttgctgtaagatttgactgaggatggaggctgaccatgccagaatgaccaaccatatagttacagggctgggactttgagctggatgataccagcttgatccccagggaggggagaggggctagagattgagttcagccacatgccgatgattttaaccaattatatctatggtaaaactctagatataaaaacttctgacacaggttttggtcagcttcctggctggtgaacacatggatgtgctgagggatgtgcattggtatcctgtttctatgagcagagggcacacatctgtgcctgggacactcctggaccctaccatatatttgtcttcatttggctggttctgatttgtatcttttgtaatagaaccataatcataagtatagagttttcctgagttccgtgagtcattctaggaaattctccaacctcagggtgggtggcggggggttgtggagactcctgaatttatagccagttggtcagaagtgcaggtggtctggggatcctcaagctcgcaactgacatctgaagtgagagcagtcttggtggggagtatgcccttaaaccccgagggtatgcactaactccctgtagttagcatcagaattgcattacagtattgaacttccaca

SEQ ID NO: 379125 - DNA, 1835 bp, Homo sapiens
  misc_feature (1634)..(1634): n is a, c, g, or t
  misc_feature (1645)..(1645): n is a, c, g, or t
  misc_feature (1647)..(1647): n is a, c, g, or t
  misc_feature (1794)..(1794): n is a, c, g, or t
gttagtataagtaacatgaaaacattctcctccgcataagcctgcgtcagttcagtgttttaatagctggacccagattatgagcttacagaaagcctggcctacattttactctttttggatttcttcctcatcaagagactgctgcggtgcctgtcatgtgacagcggcatggacatatgccccaggctttcctgctggggtccatccatgagcctgcaggtgccctcatggagccccagccctgccctggaagcttggctgagagcttcctggaggaggagcttcggctcaatgctgagctgagccagctgcagttttcggagcctgtgggcatcatctacaatcccgtggagtatgcatgggagccacatcgcaactacgtgactcgctactgccagggccccaaggaagtactcttcctgggcatgaaccctggaccttttggcatggcccagactggggtgccctttggggaagtaagcatggtccgggactggttgggcattgtggggcctgtgctgacccctccccaagagcatcctaaacgaccagtgctgggactggagtgcccacagtcagaagtgagtggtgcccgattctggggctttttccggaacctctgtggacagcctgaggtcttcttccatcactgttttgtccacaatctatgccctctgcttttcctggctcccagcgggcgcaaccttactcctgctgagctgcctgccaagcagcgagaacagcttcttgggatctgtgatgcagccctctgccggcaggtgcagctgctgggggtgcggctggtggtgggagttgggcgactggcagagcagcgggcacgacgggctctggcaggcctgatgccagaggtccaggtggaagggctcctgcatccctctccccgtaacccacaggccaacaagggctgggaggcagtggccaaggaaagattgaatgagctggggctgctgccactgctgttgaaatgagtgcccttggggccttgcatgggacacattcaagacctcgaagtcattcttggccaagcagatgacaacacatctcctggactggagcaaaaggtccttctgtgcaccctggtcgctgggaaacgtattctttgatctgttgaactgtcttccaacctgccatggcagttttgacactactcctgtttgccctcctgattcctgctttctttaccttttaacattgcccctttcaggggaccccactttgtagggaatctgcagaaggtgtgcttttgcacttgcagactgctctacctcagtgtttccttgggagactttattcagctgagagtgccctagacagtaacttctaaggtcacgtttactatttcagaggaaatatcttgccaggatacctacccatccttatagaacagttgcctttagctgacccctttcctcacagggaccaagacaaagcatgggacatgaaattaagagtgaacttcttatgggaggctgcagctggatcagaggaaaaatccagtgtgacagagtgcaagtcagaagacctggcttttcatcccagctttgaaacttggaactttttgattgacaaattaataaacctctctatgcctcaggctcctcatctgtaangaaaagaaaancngaataaacaggaacagaaggccctctctgacaaaaaacccgaaatacgtacccaccctgtttgtctttcgcgtgggaaaaagaaataaatatggttatttgttttcctgtcggcccgcttgggcccagtgatttttagattgggaanggtataaaattaagggccggggtttacaacggggggatggg

SEQ ID NO: 379126 - DNA, 2909 bp, Homo sapiens
gaggaagtagggggctgggaatccgggactgtgggggcaagttgacggctcccagggtcgtcggggctgagccgagagggtggttagaatttctatattttggggtccctccctccgtatggggtaagactcagtgcagggagagcccagcctatgaaaccgcctgggaggtctgcaggatcaaggctttccagtcggccggagccagcgggcgcccccggaggctggagtgcaatggcgcgatctcagctcactgcagcctccgcctcccgggttcaagcgattcttctgcctcagcctcccgagtagcagattatgagcttacagaaagcctggcctacattttactctttttggatttcttcctcatcaagagactgctgcggtgcctgtcatgtgacagcggcatggacatatgccccaggctttcctgctggggtccatccatgagcctgcaggtgccctcatggagccccagccctgccctggaagcttggctgagagcttcctggaggaggagcttcggctcaatgctgagctgagccagctgcagttttcggagcctgtgggcatcatctacaatcccgtggagtatgcatgggagccacatcgcaactacgtgactcgctactgccagggccccaaggaagtactcttcctgggcatgaaccctggaccttttggcatggcccagactggggtgccctttggggaagtaagcatggtccgggactggttgggcattgtggggcctgtgctgacccctccccaagagcatcctaaacgaccagtgctgggactggagtgcccacagtcagaaggaccaagacaaagcatgggacatgaaattaagagtgaacttcttatgggaggctgcagctggatcagaggaaaaatccagtgtgacagagtgcaagtcagaagacctggcttttcatcccagctttgaaacttggaactttttgattgacaaattaataaacctctctatgcctcaggctcctcatctgtaatgtaaaacagggatgcctaccttatggggttggtgtgaggattaactgagatcacacttgaaagtgccttgcatgggcttggcatgtgggtgctcattacatagtcttcttgttttcttgcctctgggttgaggattcacagcactgcactacaagggtagcccctctccattctggataccttgctaggagagagtctgggcttccacctgcggccagggtgaagggaaaattcttgccatgtcagagatggatcaatgactatgaaaaaactagcctgtgattttttttcactctaagcattaagagctcctaaagccttttgtcttgttacttttttccccctcttgcatgctagaggtggaaggtagtcatttagatttcccccctcttccctcttcattgttggccaggggttctcttgggcagctgggggaaggatgtagtagatctctcttttttttttttttttgagatggagtctcatgctgttgcccaggctggagtgcagtggcatggtctcagttcactgcaacatctgctttcccggttcaagtgattctcctgcctcagcctcctgtatagctggaattacaggcatgtgccaccacgcctggctaatttttgtatttttattaaagacagtgtttcaccatgttggccaggctggtctcaaactcctgacttcaagtaatccacctgtcttggcctcccaaagtgctgctgcctggctggatgtagcagatctccaattgccttaccaaacctgcagggtctctgttaagtgtctgttaggggtcttatatgatactctggacaccgtgagaaacaggtgatggggcagatgggaacctggtatccaactcattttttatgtctgctgaatggttgactgggtgcccctttggtaagggctgggaaagtgaaccaagttgggagcagagcaggtcttgagaccaccttaatgaggaacacatggtctacttcctatctcctgggacacaggtcatttccagcttccagaattagtaagatttttcatataaatcctcccctacttcattgtataataaagaatttggcctttgtcttcagttcctgagaaggagactctaaatccttggaatttcccaagtaataggagtatctttgtttttcgtggcaggtccctgaaactacacctgaatttatgttgagatttgaccttaggctgcacctaattttatattgaatttgatctcagaccacacctgagtttgctgtaagatttgactgaggatggaggctgaccatgccagaatgaccaaccatatagttacagggctgggactttgagctggatgataccagcttgatccccagggaggggagaggggctagagattgagttcagccacatgccgatgattttaaccaattatatctatggtaaaactctagatataaaaacttctgacacaggttttggtcagcttcctggctggtgaacacatggatgtgctgagggatgtgcattggtatcctgtttctatgagcagagggcacacatctgtgcctgggacactcctggaccctaccatatatttgtcttcatttggctggttctgatttgtatcttttgtaatagaaccataatcataagtatagagttttcctgagttccgtgagtcattctaggaaattctccaacctcagggtgggtggcggggggttgtggagactcctgaatttatagccagttggtcagaagtgcaggtggtctggggatcctcaagctcgcaactgacatctgaagtgagagcagtcttggtggggagtatgcccttaaaccccgagggtatgcactaactccctgtagttagcatcagaattgcattacagtattgaacttccaca

SEQ ID NO: 379127 - DNA, 942 bp, Homo sapiens
gttagtataagtaacatgaaaacattctcctccgcataagcctgcgtcagttcagtgttttaatagctggacccagattatgagcttacagaaagcctggcctacattttactctttttggatttcttcctcatcaagagactgctgcggtgcctgtcatatggggtctcattatgtcagccaggctggtcttgaactcctggcctcaagcaattcttctgccttggcctctcaaagtgctgggattacaggcatgagccactgtgcccagcacagaaggtagttttaaacaaaagtgaaaaagaagatggacattgctgagcaggtgacagcggcatggacatatgccccaggctttcctgctggggtccatccatgagcctgcaggtgccctcatggagccccagccctgccctggaagcttggctgagagcttcctggaggaggagcttcggctcaatgctgagctgagccagctgcagttttcggagcctgtgggcatcatctacaatcccgtggagtatgcatgggagccacatcgcaactacgtgactcgctactgccagggccccaaggaagtactcttcctgggcatgaaccctggaccttttggcatggcccagactggggtgccctttggggaagtaagcatggtccgggactggttgggcattgtggggcctgtgctgacccctccccaagagcatcctaaacgaccagtgctgggactggagtgcccacagtcagaaggaccaagacaaagcatgggacatgaaattaagagtgaacttcttatgggaggctgcagctggatcagaggaaaaatccagtgtgacagagtgcaagtcagaagacctggcttttcatcccagctttgaaacttggaactttttgattgacaaattaataaacctctctatgcctcaggctcctcatctgtaa

SEQ ID NO: 379128 - DNA, 2043 bp, Homo sapiens
gaggaagtagggggctgggaatccgggactgtgggggcaagttgacggctcccagggtcgtcggggctgagccgagagggtggttagaatttctatattttggggtccctccctccgtatggggtaagactcagtgcagggagagcccagcctatgaaaccgcctgggaggtctgcaggatcaaggctttccagtcggccggagccagcgggcgcccccggaggctggagtgcaatggcgcgatctcagctcactgcagcctccgcctcccgggttcaagcgattcttctgcctcagcctcccgagtagcagattatgagcttacagaaagcctggcctacattttactctttttggatttcttcctcatcaagagactgctgcggtgcctgtcatgtgacagcggcatggacatatgccccaggctttcctgctggggtccatccatgagcctgcaggtgccctcatggagccccagccctgccctggaagcttggctgagagcttcctggaggaggagcttcggctcaatgctgagctgagccagctgcagttttcggagcctgtgggcatcatctacaatcccgtggagtatgcatgggagccacatcgcaactacgtgactcgctactgccagggccccaaggaagtactcttcctgggcatgaaccctggaccttttggcatggcccagactggggtaaagggtttggcttccccagtgggtggagtggggggttctaggtggatgcttggctgggtgtgctgtggagaaggagcatgtgcatggctgtagacatgtgtaggtcctcccgccccattctgtctcaacacatatactggctcctgtggtccggggccctctcccagcgtctctgcccgtaattaaccaagcacattaatggtagtttcgttttccctgcgagctggccagtaattgcctctgagagcccttccttccgccagccccatccttactttactggatctcccctgtccctgaagtgtggttggggtcagaagagggactaggactgctgggtcctcagaagagactggttgacaggggtgggtatgtaagagatgcagggcgttctgggaacctgggttctgtttcctagctaaggcgaggttcaaaacagagcctggctccagtgcctgcccgcttttctttcagggctcaggatgagtgactgcccccagtgggggtgcttggcaggtgggggaggggaagaggcttcagggcagaaggctcaatcgcttttattgaccccaactgggtgatgaaaggtgatcaatgatgatcgatggaaatgacagcctgaggcttggggctgagagggcatccagacagcagtggtcagcccatccttgtgcctcctttaaccctggctgcctttctgtctcagaccatctgtctgtccccagtactaaccatcaaaccctgtgtagggctagatatctcaatgtagtccctgtacttatcccaaaggctagttgggctagagggaaacaaattcttctggaccacggttcacaatgaagaactggaaaaagacagacaggctcaaaccatagggccaagaatccttgtctcaggcctttgggtgaaggtaggggtagggggtgcaggctggatcctcatgtaaggtataaagaagtcagttggtccagagcccgggcctcaggtctccagtttgaagcctttcatgtctctctccttcctcacagtgccctttggggaagtaagcatggtccgggactggttgggcattgtggggcctgtgctgacccctccccaagagcatcctaaacgaccagtgctgggactggagtgcccacagtcagaaggaccaagacaaagcatgggacatgaaattaagagtgaacttcttatgggaggctgcagctggatcagaggaaaaatccagtgtgacagagtgcaagtcagaagacctggcttttcatcccagctttgaaacttggaactttttgattgacaaattaataaacctctctatgcctcaggctcctcatctgtaa

SEQ ID NO: 379129 - DNA, 1633 bp, Homo sapiens
gttagtataagtaacatgaaaacattctcctccgcataagcctgcgtcagttcagtgttttaatagctggacccagattatgagcttacagaaagcctggcctacattttactctttttggatttcttcctcatcaagagactgctgcggtgcctgtcatgtgacagcggcatggacatatgccccaggctttcctgctggggtccatccatgagcctgcaggtgccctcatggagccccagccctgccctggaagcttggctgagagcttcctggaggaggagcttcggctcaatgctgagctgagccagctgcagttttcggagcctgtgggcatcatctacaatcccgtggagtatgcatgggagccacatcgcaactacgtgactcgctactgccagggccccaaggaagtactcttcctgggcatgaaccctggaccttttggcatggcccagactggggtgccctttggggaagtaagcatggtccgggactggttgggcattgtggggcctgtgctgacccctccccaagagcatcctaaacgaccagtgctgggactggagtgcccacagtcagaagtgagtggtgcccgattctggggctttttccggaacctctgtggacagcctgaggtcttcttccatcactgttttgtccacaatctatgccctctgcttttcctggctcccagcgggcgcaaccttactcctgctgagctgcctgccaagcagcgagaacagcttcttgggatctgtgatgcagccctctgccggcaggtgcagctgctgggggtgcggctggtggtgggagttgggcgactggcagagcagcgggcacgacgggctctggcaggcctgatgccagaggtccaggtggaagggctcctgcatccctctccccgtaacccacaggccaacaagggctgggaggcagtggccaaggaaagattgaatgagctggggctgctgccactgctgttgaaatgagtgcccttggggccttgcatgggacacattcaagacctcgaagtcattcttggccaagcagatgacaacacatctcctggactggagcaaaaggtccttctgtgcaccctggtcgctgggaaacgtattctttgatctgttgaactgtcttccaacctgccatggcagttttgacactactcctgtttgccctcctgattcctgctttctttaccttttaacattgcccctttcaggggaccccactttgtagggaatctgcagaaggtgtgcttttgcacttgcagactgctctacctcagtgtttccttgggagactttattcagctgagagtgccctagacagtaacttctaaggtcacgtttactatttcagaggaaatatcttgccaggatacctacccatccttatagaacagttgcctttagctgacccctttcctcacagggaccaagacaaagcatgggacatgaaattaagagtgaacttcttatgggaggctgcagctggatcagaggaaaaatccagtgtgacagagtgcaagtcagaagacctggcttttcatcccagctttgaaacttggaactttttgattgacaaattaataaacctctctatgcctcaggctcctcatctgtaa

SEQ ID NO: 379130 - DNA, 750 bp, Homo sapiens
tggggtgggggaaaggaaccggaaacgggatggggagctggaccagcagattatgagcttacagaaagcctggcctacattttactctttttggatttcttcctcatcaagagactgctgcggtgcctgtcatgtgacagcggcatggacatatgccccaggctttcctgctggggtccatccatgagcctgcaggtgccctcatggagccccagccctgccctggaagcttggctgagagcttcctggaggaggagcttcggctcaatgctgagctgagccagctgcagttttcggagcctgtgggcatcatctacaatcccgtggagtatgcatgggagccacatcgcaactacgtgactcgctactgccagggccccaaggaagtactcttcctgggcatgaaccctggaccttttggcatggcccagactggggtgccctttggggaagtaagcatggtccgggactggttgggcattgtggggcctgtgctgacccctccccaagagcatcctaaacgaccagtgctgggactggagtgcccacagtcagaaggaccaagacaaagcatgggacatgaaattaagagtgaacttcttatgggaggctgcagctggatcagaggaaaaatccagtgtgacagagtgcaagtcagaagacctggcttttcatcccagctttgaaacttggaactttttgattgacaaattaataaacctctctatgcctcaggctcctcatctgtaa

SEQ ID NO: 379131 - DNA, 1869 bp, Homo sapiens
gaggaagtagggggctgggaatccgggactgtgggggcaagttgacggctcccagggtcgtcggggctgagccgagagggtggttagaatttctatattttggggtccctccctccgtatggggtaagactcagtgcagggagagcccagcctatgaaaccgcctgggaggtctgcaggatcaaggctttccagtcggccggagccagcgggcgcccccggaggctggagtgcaatggcgcgatctcagctcactgcagcctccgcctcccgggttcaagcgattcttctgcctcagcctcccgagtagcagattatgagcttacagaaagcctggcctacattttactctttttggatttcttcctcatcaagagactgctgcggtgcctgtcatgtgacagcggcatggacatatgccccaggctttcctgctggggtccatccatgagcctgcaggtgccctcatggagccccagccctgccctggaagcttggctgagagcttcctggaggaggagcttcggctcaatgctgagctgagccagctgcagttttcggagcctgtgggcatcatctacaatcccgtggagtatgcatgggagccacatcgcaactacgtgactcgctactgccagggccccaaggaagtactcttcctgggcatgaaccctggaccttttggcatggcccagactggggtgccctttggggaagtaagcatggtccgggactggttgggcattgtggggcctgtgctgacccctccccaagagcatcctaaacgaccagtgctgggactggagtgcccacagtcagaagtgagtggtgcccgattctggggctttttccggaacctctgtggacagcctgaggtcttcttccatcactgttttgtccacaatctatgccctctgcttttcctggctcccagcgggcgcaaccttactcctgctgagctgcctgccaagcagcgagaacagcttcttgggatctgtgatgcagccctctgccggcaggtgcagctgctgggggtgcggctggtggtgggagttgggcgactggcagagcagcgggcacgacgggctctggcaggcctgatgccagaggtccaggtggaagggctcctgcatccctctccccgtaacccacaggccaacaagggctgggaggcagtggccaaggaaagattgaatgagctggggctgctgccactgctgttgaaatgagtgcccttggggccttgcatgggacacattcaagacctcgaagtcattcttggccaagcagatgacaacacatctcctggactggagcaaaaggtccttctgtgcaccctggtcgctgggaaacgtattctttgatctgttgaactgtcttccaacctgccatggcagttttgacactactcctgtttgccctcctgattcctgctttctttaccttttaacattgcccctttcaggggaccccactttgtagggaatctgcagaaggtgtgcttttgcacttgcagactgctctacctcagtgtttccttgggagactttattcagctgagagtgccctagacagtaacttctaaggtcacgtttactatttcagaggaaatatcttgccaggatacctacccatccttatagaacagttgcctttagctgacccctttcctcacagggaccaagacaaagcatgggacatgaaattaagagtgaacttcttatgggaggctgcagctggatcagaggaaaaatccagtgtgacagagtgcaagtcagaagacctggcttttcatcccagctttgaaacttggaactttttgattgacaaattaataaacctctctatgcctcaggctcctcatctgtaa

SEQ ID NO: 379132 - DNA, 1769 bp, Homo sapiens
gaggaagtagggggctgggaatccgggactgtgggggcaagttgacggctcccagggtcgtcggggctgagccgagagggtggttagaatttctatattttggggtccctccctccgtatggggctggagtgcaatggcgcgatctcagctcactgcagcctccgcctcccgggttcaagcgattcttctgcctcagcctcccgagtagcagattatgagcttacagaaagcctggcctacattttactctttttggatttcttcctcatcaagagactgctgcggtgcctgtcatgtgacagcggcatggacatatgccccaggctttcctgctggggtccatccatgagcctgcaggtgccctcatggagccccagccctgccctggaagcttggctgagagcttcctggaggaggagcttcggctcaatgctgagctgagccagctgcagttttcggagcctgtgggcatcatctacaatcccgtggagtatgcatgggagccacatcgcaactacgtgactcgctactgccagggccccaaggaagtactcttcctgggcatgaaccctggaccttttggcatggcccagactggggtgccctttggggaagtaagcatggtccgggactggttgggcattgtggggcctgtgctgacccctccccaagagcatcctaaacgaccagtgctgggactggagtgcccacagtcagaagtgagtggtgcccgattctggggctttttccggaacctctgtggacagcctgaggtcttcttccatcactgttttgtccacaatctatgccctctgcttttcctggctcccagcgggcgcaaccttactcctgctgagctgcctgccaagcagcgagaacagcttcttgggatctgtgatgcagccctctgccggcaggtgcagctgctgggggtgcggctggtggtgggagttgggcgactggcagagcagcgggcacgacgggctctggcaggcctgatgccagaggtccaggtggaagggctcctgcatccctctccccgtaacccacaggccaacaagggctgggaggcagtggccaaggaaagattgaatgagctggggctgctgccactgctgttgaaatgagtgcccttggggccttgcatgggacacattcaagacctcgaagtcattcttggccaagcagatgacaacacatctcctggactggagcaaaaggtccttctgtgcaccctggtcgctgggaaacgtattctttgatctgttgaactgtcttccaacctgccatggcagttttgacactactcctgtttgccctcctgattcctgctttctttaccttttaacattgcccctttcaggggaccccactttgtagggaatctgcagaaggtgtgcttttgcacttgcagactgctctacctcagtgtttccttgggagactttattcagctgagagtgccctagacagtaacttctaaggtcacgtttactatttcagaggaaatatcttgccaggatacctacccatccttatagaacagttgcctttagctgacccctttcctcacagggaccaagacaaagcatgggacatgaaattaagagtgaacttcttatgggaggctgcagctggatcagaggaaaaatccagtgtgacagagtgcaagtcagaagacctggcttttcatcccagctttgaaacttggaactttttgattgacaaattaataaacctctctatgcctcaggctcctcatctgtaa

SEQ ID NO: 379133 - DNA, 1582 bp, Homo sapiens
agacggatggggtgctggaccaggctggagtgcaatggcgcgatctcagctcactgcagcctccgcctcccgggttcaagcgattcttctgcctcagcctcccgagtaggtgacagcggcatggacatatgccccaggctttcctgctggggtccatccatgagcctgcaggtgccctcatggagccccagccctgccctggaagcttggctgagagcttcctggaggaggagcttcggctcaatgctgagctgagccagctgcagttttcggagcctgtgggcatcatctacaatcccgtggagtatgcatgggagccacatcgcaactacgtgactcgctactgccagggccccaaggaagtactcttcctgggcatgaaccctggaccttttggcatggcccagactggggtgccctttggggaagtaagcatggtccgggactggttgggcattgtggggcctgtgctgacccctccccaagagcatcctaaacgaccagtgctgggactggagtgcccacagtcagaagtgagtggtgcccgattctggggctttttccggaacctctgtggacagcctgaggtcttcttccatcactgttttgtccacaatctatgccctctgcttttcctggctcccagcgggcgcaaccttactcctgctgagctgcctgccaagcagcgagaacagcttcttgggatctgtgatgcagccctctgccggcaggtgcagctgctgggggtgcggctggtggtgggagttgggcgactggcagagcagcgggcacgacgggctctggcaggcctgatgccagaggtccaggtggaagggctcctgcatccctctccccgtaacccacaggccaacaagggctgggaggcagtggccaaggaaagattgaatgagctggggctgctgccactgctgttgaaatgagtgcccttggggccttgcatgggacacattcaagacctcgaagtcattcttggccaagcagatgacaacacatctcctggactggagcaaaaggtccttctgtgcaccctggtcgctgggaaacgtattctttgatctgttgaactgtcttccaacctgccatggcagttttgacactactcctgtttgccctcctgattcctgctttctttaccttttaacattgcccctttcaggggaccccactttgtagggaatctgcagaaggtgtgcttttgcacttgcagactgctctacctcagtgtttccttgggagactttattcagctgagagtgccctagacagtaacttctaaggtcacgtttactatttcagaggaaatatcttgccaggatacctacccatccttatagaacagttgcctttagctgacccctttcctcacagggaccaagacaaagcatgggacatgaaattaagagtgaacttcttatgggaggctgcagctggatcagaggaaaaatccagtgtgacagagtgcaagtcagaagacctggcttttcatcccagctttgaaacttggaactttttgattgacaaattaataaacctctctatgcctcaggctcctcatctgtaa

SEQ ID NO: 379134 - DNA, 1725 bp, Homo sapiens
tggggtgggggaaaggaaccggaaacgggatggggagctggaccagcagattatgagcttacagaaagcctggcctacattttactctttttggatttcttcctcatcaagagactgctgcggtgcctgtcatatggggtctcattatgtcagccaggctggtcttgaactcctggcctcaagcaattcttctgccttggcctctcaaagtgctgggattacaggcatgagccactgtgcccagcacagaaggtgacagcggcatggacatatgccccaggctttcctgctggggtccatccatgagcctgcaggtgccctcatggagccccagccctgccctggaagcttggctgagagcttcctggaggaggagcttcggctcaatgctgagctgagccagctgcagttttcggagcctgtgggcatcatctacaatcccgtggagtatgcatgggagccacatcgcaactacgtgactcgctactgccagggccccaaggaagtactcttcctgggcatgaaccctggaccttttggcatggcccagactggggtgccctttggggaagtaagcatggtccgggactggttgggcattgtggggcctgtgctgacccctccccaagagcatcctaaacgaccagtgctgggactggagtgcccacagtcagaagtgagtggtgcccgattctggggctttttccggaacctctgtggacagcctgaggtcttcttccatcactgttttgtccacaatctatgccctctgcttttcctggctcccagcgggcgcaaccttactcctgctgagctgcctgccaagcagcgagaacagcttcttgggatctgtgatgcagccctctgccggcaggtgcagctgctgggggtgcggctggtggtgggagttgggcgactggcagagcagcgggcacgacgggctctggcaggcctgatgccagaggtccaggtggaagggctcctgcatccctctccccgtaacccacaggccaacaagggctgggaggcagtggccaaggaaagattgaatgagctggggctgctgccactgctgttgaaatgagtgcccttggggccttgcatgggacacattcaagacctcgaagtcattcttggccaagcagatgacaacacatctcctggactggagcaaaaggtccttctgtgcaccctggtcgctgggaaacgtattctttgatctgttgaactgtcttccaacctgccatggcagttttgacactactcctgtttgccctcctgattcctgctttctttaccttttaacattgcccctttcaggggaccccactttgtagggaatctgcagaaggtgtgcttttgcacttgcagactgctctacctcagtgtttccttgggagactttattcagctgagagtgccctagacagtaacttctaaggtcacgtttactatttcagaggaaatatcttgccaggatacctacccatccttatagaacagttgcctttagctgacccctttcctcacagggaccaagacaaagcatgggacatgaaattaagagtgaacttcttatgggaggctgcagctggatcagaggaaaaatccagtgtgacagagtgcaagtcagaagacctggcttttcatcccagctttgaaacttggaactttttgattgacaaattaataaacctctctatgcctcaggctcctcatctgtaa

SEQ ID NO: 379135 - DNA, 1760 bp, Homo sapiens
gaggaagtagggggctgggaatccgggactgtgggggcaagttgacggctcccagggtcgtcggggctgagccgagagggtggttagaatttctatattttggggtccctccctccgtatggggtaagactcagtgcagggagagcccagcctatgaaaccgcctgggaggtctgcaggatcaaggctttccagtcggccggagccagcgggcgcccccggaggctggagtgcaatggcgcgatctcagctcactgcagcctccgcctcccgggttcaagcgattcttctgcctcagcctcccgagtagcagattatgagcttacagaaagcctggcctacattttactctttttggatttcttcctcatcaagagactgctgcggtgcctgtcatgtgacagcggcatggacatatgccccaggctttcctgctggggtccatccatgagcctgcaggtgccctcatggagccccagccctgccctggaagcttggctgagagcttcctggaggaggagcttcggctcaatgctgagctgagccagctgcagttttcggagcctgtgggcatcatctacaatcccgtggagtgccctttggggaagtaagcatggtccgggactggttgggcattgtggggcctgtgctgacccctccccaagagcatcctaaacgaccagtgctgggactggagtgcccacagtcagaagtgagtggtgcccgattctggggctttttccggaacctctgtggacagcctgaggtcttcttccatcactgttttgtccacaatctatgccctctgcttttcctggctcccagcgggcgcaaccttactcctgctgagctgcctgccaagcagcgagaacagcttcttgggatctgtgatgcagccctctgccggcaggtgcagctgctgggggtgcggctggtggtgggagttgggcgactggcagagcagcgggcacgacgggctctggcaggcctgatgccagaggtccaggtggaagggctcctgcatccctctccccgtaacccacaggccaacaagggctgggaggcagtggccaaggaaagattgaatgagctggggctgctgccactgctgttgaaatgagtgcccttggggccttgcatgggacacattcaagacctcgaagtcattcttggccaagcagatgacaacacatctcctggactggagcaaaaggtccttctgtgcaccctggtcgctgggaaacgtattctttgatctgttgaactgtcttccaacctgccatggcagttttgacactactcctgtttgccctcctgattcctgctttctttaccttttaacattgcccctttcaggggaccccactttgtagggaatctgcagaaggtgtgcttttgcacttgcagactgctctacctcagtgtttccttgggagactttattcagctgagagtgccctagacagtaacttctaaggtcacgtttactatttcagaggaaatatcttgccaggatacctacccatccttatagaacagttgcctttagctgacccctttcctcacagggaccaagacaaagcatgggacatgaaattaagagtgaacttcttatgggaggctgcagctggatcagaggaaaaatccagtgtgacagagtgcaagtcagaagacctggcttttcatcccagctttgaaacttggaactttttgattgacaaattaataaacctctctatgcctcaggctcctcatctgtaa

SEQ ID NO: 379136 - DNA, 954 bp, Homo sapiens
gttagtataagtaacatgaaaacattctcctccgcataagcctgcgtcagttcagtgttttaatagctggacccagattatgagcttacagaaagcctggcctacattttactctttttggatttcttcctcatcaagagactgctgcggtgcctgtcatgtgacagcggcatggacatatgccccaggctttcctgctggggtccatccatgagcctgcaggtgccctcatggagccccagccctgccctggaagcttggctgagagcttcctggaggaggagcttcggctcaatgctgagctgagccagctgcagttttcggagcctgtgggcatcatctacaatcccgtggagtatgcatgggagccacatcgcaactacgtgactcgctactgccagggccccaaggaagtactcttcctgggcatgaaccctggaccttttggcatggcccagactggggtgccctttggggaagtaagcatggtccgggactggttgggcattgtggggcctgtgctgacccctccccaagagcatcctaaacgaccagtgctgggactggagtgcccacagtcagaagtgagtggtgcccgattctggggctttttccggaacctctgtggacagcctgaggtcttcttccatcactgttttgtccacaatctatgccctctgcttttcctggctcccagcgggcgcaaccttactcctgctgagctgcctgccaagcagcgagaacagcttcttgggatctgtgatgcagccctctgccggcaggtgcagctgctgggggtgcggctggtggtgggagtttcacggctgatacagcgacgaactactaatggctgtttttgaatggatgctatatgttctggacaatttgatatttaataagagtggactttgcctctcactatgtacggtgttatacgaccttttgatatatgat

SEQ ID NO: 379137 - DNA, 874 bp, Homo sapiens
gaggaagtagggggctgggaatccgggactgtgggggcaagttgacggctcccagggtcgtcggggctgagccgagagggtggttagaatttctatattttggggtccctccctccgtatggggtaagactcagtgcagggagagcccagcctatgaaaccgcctgggaggtctgcaggatcaaggctttccagtcggccggagccagcgggcgcccccggagcagattatgagcttacagaaagcctggcctacattttactctttttggatttcttcctcatcaagagactgctgcggtgcctgtcatgtgacagcggcatggacatatgccccaggctttcctgctggggtccatccatgagcctgcaggtgccctcatggagccccagccctgccctggaagcttggctgagagcggagcctgtgggcatcatctacaatcccgtggagtatgcatgggagccacatcgcaactacgtgactcgctactgccagggccccaaggaagtactcttcctgggcatgaaccctggaccttttggcatggcccagactggggtgccctttggggaagtaagcatggtccgggactggttgggcattgtggggcctgtgctgacccctccccaagagcatcctaaacgaccagtgctgggactggagtgcccacagtcagaaggaccaagacaaagcatgggacatgaaattaagagtgaacttcttatgggaggctgcagctggatcagaggaaaaatccagtgtgacagagtgcaagtcagaagacctggcttttcatcccagctttgaaacttggaactttttgattgacaaattaataaacctctctatgcctcaggctcctcatctgtaa

SEQ ID NO: 379138 - DNA, 3792 bp, Homo sapiens
gcgcgccggcctgagagccctgtggacaacctcgtcattgtcaggcacagagcggtagaccctgcttctctaagtgggcagcggacagcggcacgcacatttcacctgtcccgcagacaacagcaccatctgcttgggagaaccctctcccttctctgagaaagaaagatgtcgaatgggtattccacagacgagaatttccgctatctcatctcgtgcttcagggccagggtgaaaatgtacatccaggtggagcctgtgctggactacctgacctttctgcctgcagaggtgaaggagcagattcagaggacagtcgccacctccgggaacatgcaggcagttgaactgctgctgagcaccttggagaagggagtctggcaccttggttggactcgggaattcgtggaggccctccggagaaccggcagccctctggccgcccgctacatgaaccctgagctcacggacttgccctctccatcgtttgagaacgctcatgatgaatatctccaactgctgaacctccttcagcccactctggtggacaagcttctagttagagacgtcttggataagtgcatggaggaggaactgttgacaattgaagacagaaaccggattgctgctgcagaaaacaatggaaatgaatcaggtgtaagagagctactaaaaaggattgtgcagaaagaaaactggttctctgcatttctgaatgttcttcgtcaaacaggaaacaatgaacttgtccaagagttaacaggctctgattgctcagaaagcaatgcagagattgagaatttatcacaagttgatggtcctcaagtggaagagcaacttctttcaaccacagttcagccaaatctggagaaggaggtctggggcatggagaataactcatcagaatcatcttttgcagattcttctgtagtttcagaatcagacacaagtttggcagaaggaagtgtcagctgcttagatgaaagtcttggacataacagcaacatgggcagtgattcaggcaccatgggaagtgattcagatgaagagaatgtggcagcaagagcatccccggagccagaactccagctcaggccttaccaaatggaagttgcccagccagccttggaagggaagaatatcatcatctgcctccctacagggagtggaaaaaccagagtggctgtttacattgccaaggatcacttagacaagaagaaaaaagcatctgagcctggaaaagttatagttcttgtcaataaggtactgctagttgaacagctcttccgcaaggagttccaaccatttttgaagaaatggtatcgtgttattggattaagtggtgatacccaactgaaaatatcatttccagaagttgtcaagtcctgtgatattattatcagtacagctcaaatccttgaaaactccctcttaaacttggaaaatggagaagatgctggtgttcaattgtcagacttttccctcattatcattgatgaatgtcatcacaccaacaaagaagcagtgtataataacatcatgaggcattatttgatgcagaagttgaaaaacaatagactcaagaaagaaaacaaaccagtgattccccttcctcagatactgggactaacagcttcacctggtgttggaggggccacgaagcaagccaaagctgaagaacacattttaaaactatgtgccaatcttgatgcatttactattaaaactgttaaagaaaaccttgatcaactgaaaaaccaaatacaggagccatgcaagaagtttgccattgcagatgcaaccagagaagatccatttaaagagaaacttctagaaataatgacaaggattcaaacttattgtcaaatgagtccaatgtcagattttggaactcaaccctatgaacaatgggccattcaaatggaaaaaaaagctgcaaaagaaggaaatcgcaaagaacgtgtttgtgcagaacatttgaggaagtacaatgaggccctacaaattaatgacacaattcgaatgatagatgcgtatactcatcttgaaactttctataatgaagagaaagataagaagtttgcagtcatagaagatgatagtgatgagggtggtgatgatgagtattgtgatggtgatgaagatgaggatgatttaaagaaacctttgaaactggatgaaacagatagatttctcatgactttattttttgaaaacaataaaatgttgaaaaggctggctgaaaacccagaatatgaaaatgaaaagctgaccaaattaagaaataccataatggagcaatatactaggactgaggaatcagcacgaggaataatctttacaaaaacacgacagagtgcatatgcgctttcccagtggattactgaaaatgaaaaatttgctgaagtaggagtcaaagcccaccatctgattggagctggacacagcagtgagttcaaacccatgacacagaatgaacaaaaagaagtcattagtaaatttcgcactggaaaaataaatctgcttatcgctaccacagtggcagaagaaggtctggatattaaagaatgtaacattgttatccgttatggtctcgtcaccaatgaaatagccatggtccaggcccgtggtcgagccagagctgatgagagcacctacgtcctggttgctcacagtggttcaggagttatcgaacatgagacagttaatgatttccgagagaagatgatgtataaagctatacattgtgttcaaaatatgaaaccagaggagtatgctcataagattttggaattacagatgcaaagtataatggaaaagaaaatgaaaaccaagagaaatattgccaagcattacaagaataacccatcactaataactttcctttgcaaaaactgcagtgtgctagcctgttctggggaagatatccatgtaattgagaaaatgcatcacgtcaatatgaccccagaattcaaggaactttacattgtaagagaaaacaaagcactgcaaaagaagtgtgccgactatcaaataaatggtgaaatcatctgcaaatgtggccaggcttggggaacaatgatggtgcacaaaggcttagatttgccttgtctcaaaataaggaattttgtagtggttttcaaaaataattcaacaaagaaacaatacaaaaagtgggtagaattacctatcacatttcccaatcttgactattcagaatgctgtttatttagtgatgaggattagcacttgattgaagattcttttaaaatactatcagttaaacatttaatatgattatgattaatgtattcattatgctacagaactgacataagaatcaataaaatgattgttttactctgaaaaaaaaaaaaaaaaaaaaaacaaaacaacaaaaaaaaaacaaaaaaaacaaaaaagaaagggggcgggcgcgcgcgagcacaagaagagatgtccccccccaggggggcggccaagaatgtatagcagagcgttagccccgagttgttgtggtggacaacagaggggggcgcccacaataaaaaggagagaggcagatattaatacgaggcagcgaggacagcggggcgccgcggagtcttaaaacaacacgcgtggcgtgagagagggggggaacacacaggcggcgccagcggggagaaacacccggtgggagaagaagacccctctaacgatgcggggggggggggacacacatatggggggacaaacaaaaaccaccgacaagagaatattacaaaggctccccaaggggaacaaatacaa

SEQ ID NO: 379139 - DNA, 3224 bp, Homo sapiens
attgcagatccgctatccgtcgacggatagcggatctgctccttcacctctgcaggcagaaaggtcaggtagtccagcacaggctccacctggatgtacattttcaccctggccctgaagcacgaggtgaaggagcagattcagaggacagtcgccacctccgggaacatgcaggcagttgaactgctgctgagcaccttggagaagggagtctggcaccttggttggactcgggaattcgtggaggccctccggagaaccggcagccctctggccgcccgctacatgaaccctgagctcacggacttgccctctccatcgtttgagaacgctcatgatgaatatctccaactgctgaacctccttcagcccactctggtggacaagcttctagttagagacgtcttggataagtgcatggaggaggaactgttgacaattgaagacagaaaccggattgctgctgcagaaaacaatggaaatgaatcaggtgtaagagagctactaaaaaggattgtgcagaaagaaaactggttctctgcatttctgaatgttcttcgtcaaacaggaaacaatgaacttgtccaagagttaacaggctctgattgctcagaaagcaatgcagagattgagaatttatcacaagttgatggtcctcaagtggaagagcaacttctttcaaccacagttcagccaaatctggagaaggaggtctggggcatggagaataactcatcagaatcatcttttgcagattcttctgtagtttcagaatcagacacaagtttggcagaaggaagtgtcagctgcttagatgaaagtcttggacataacagcaacatgggcagtgattcaggcaccatgggaagtgattcagatgaagagaatgtggcagcaagagcatccccggagccagaactccagctcaggccttaccaaatggaagttgcccagccagccttggaagggaagaatatcatcatctgcctccctacagggagtggaaaaaccagagtggctgtttacattgccaaggatcacttagacaagaagaaaaaagcatctgagcctggaaaagttatagttcttgtcaataaggtactgctagttgaacagctcttccgcaaggagttccaaccatttttgaagaaatggtatcgtgttattggattaagtggtgatacccaactgaaaatatcatttccagaagttgtcaagtcctgtgatattattatcagtacagctcaaatccttgaaaactccctcttaaacttggaaaatggagaagatgctggtgttcaattgtcagacttttccctcattatcattgatgaatgtcatcacaccaacaaagaagcagtgtataataacatcatgaggcattatttgatgcagaagttgaaaaacaatagactcaagaaagaaaacaaaccagtgattccccttcctcagatactgggactaacagcttcacctggtgttggaggggccacgaagcaagccaaagctgaagaacacattttaaaactatgtgccaatcttgatgcatttactattaaaactgttaaagaaaaccttgatcaactgaaaaaccaaatacaggagccatgcaagaagtttgccattgcagatgcaaccagagaagatccatttaaagagaaacttctagaaataatgacaaggattcaaacttattgtcaaatgagtccaatgtcagattttggaactcaaccctatgaacaatgggccattcaaatggaaaaaaaagctgcaaaagaaggaaatcgcaaagaacgtgtttgtgcagaacatttgaggaagtacaatgaggccctacaaattaatgacacaattcgaatgatagatgcgtatactcatcttgaaactttctataatgaagagaaagataagaagtttgcagtcatagaagatgatagtgatgagggtggtgatgatgagtattgtgatggtgatgaagatgaggatgatttaaagaaacctttgaaactggatgaaacagatagatttctcatgactttattttttgaaaacaataaaatgttgaaaaggctggctgaaaacccagaatatgaaaatgaaaagctgaccaaattaagaaataccataatggagcaatatactaggactgaggaatcagcacgaggaataatctttacaaaaacacgacagagtgcatatgcgctttcccagtggattactgaaaatgaaaaatttgctgaagtaggagtcaaagcccaccatctgattggagctggacacagcagtgagttcaaacccatgacacagaatgaacaaaaagaagtcattagtaaatttcgcactggaaaaataaatctgcttatcgctaccacagtggcagaagaaggtctggatattaaagaatgtaacattgttatccgttatggtctcgtcaccaatgaaatagccatggtccaggcccgtggtcgagccagagctgatgagagcacctacgtcctggttgctcacagtggttcaggagttatcgaacatgagacagttaatgatttccgagagaagatgatgtataaagctatacattgtgttcaaaatatgaaaccagaggagtatgctcataagattttggaattacagatgcaaagtataatggaaaagaaaatgaaaaccaagagaaatattgccaagcattacaagaataacccatcactaataactttcctttgcaaaaactgcagtgtgctagcctgttctggggaagatatccatgtaattgagaaaatgcatcacgtcaatatgaccccagaattcaaggaactttacattgtaagagaaaacaaagcactgcaaaagaagtgtgccgactatcaaataaatggtgaaatcatctgcaaatgtggccaggcttggggaacaatgatggtgcacaaaggcttagatttgccttgtctcaaaataaggaattttgtagtggttttcaaaaataattcaacaaagaaacaatacaaaaagtgggtagaattacctatcacatttcccaatcttgactattcagaatgctgtttatttagtgatgaggattagcacttgattgaagattcttttaaaatactatcagttaaacatttaatatgattatgattaatgtattcattatgctacagaactgacataagaatcattttattgattcttatgtcgacgcggccgcgaatttagtagtagta

SEQ ID NO: 379140 - DNA, 666 bp, Homo sapiens
attgcagatccgctatccgtcgacggatagcggatctgctccttcacctctgcaggcagaaaggtcaggtagtccagcacaggctccacctggatgtacattttcaccctggccctgaagcacgaggtgaaggagcagattcagaggacagtcgccacctccgggaacatgcaggcagttgaactgctgctgagcaccttggagaagggagtctggcaccttggttggactcgggaattcgtggaggccctccggagaaccggcagccctctggccgcccgctacatgaaccctgagctcacggacttgccctctccatcgtttgagaacgctcatgatgaatatctccaactgctgaacctccttcagcccactctggtggacaagcttctagttagagacgtcttggataagtgcatggaggaggaactgttgacaattgaagacagaaaccggattgctgctgcagaaaacaatggaaatgaatcaggtgtaagagagctactaaaaaggattgtgcagaaagaaaactggttctctgcatttctgaatgttcttcgtcaaacaggaaacaatgaacttgtccaagagttaacaggctctgattgctcagaaagcaatgcaggtatttgtaattttactgaggaagattcttcaaattctgcc

SEQ ID NO: 379141 - DNA, 3627 bp, Homo sapiens
attgcagatccgctatccgtcgacggatagcggatctgctccttcacctctgcaggcagaaaggtcaggtagtccagcacaggctccacctggatgtacattttcaccctggccctgaagcacgaggtgaaggagcagattcagaggacagtcgccacctccgggaacatgcaggcagttgaactgctgctgagcaccttggagaagggagtctggcaccttggttggactcgggaattcgtggaggccctccggagaaccggcagccctctggccgcccgctacatgaaccctgagctcacggacttgccctctccatcgtttgagaacgctcatgatgaatatctccaactgctgaacctccttcagcccactctggtggacaagcttctagttagagacgtcttggataagtgcatggaggaggaactgttgacaattgaagacagaaaccggattgctgctgcagaaaacaatggaaatgaatcaggtgtaagagagctactaaaaaggattgtgcagaaagaaaactggttctctgcatttctgaatgttcttcgtcaaacaggaaacaatgaacttgtccaagagttaacaggctctgattgctcagaaagcaatgcagagattgagaatttatcacaagttgatggtcctcaagtggaagagcaacttctttcaaccacagttcagccaaatctggagaaggaggtctggggcatggagaataactcatcagaatcatcttttgcagattcttctgtagtttcagaatcagacacaagtttggcagaaggaagtgtcagctgcttagatgaaagtcttggacataacagcaacatgggcagtgattcaggcaccatgggaagtgattcagatgaagagaatgtggcagcaagagcatccccggagccagaactccagctcaggccttaccaaatggaagttgcccagccagccttggaagggaagaatatcatcatctgcctccctacagggagtggaaaaaccagagtggctgtttacattgccaaggatcacttagacaagaagaaaaaagcatctgagcctggaaaagttatagttcttgtcaataaggtactgctagttgaacagctcttccgcaaggagttccaaccatttttgaagaaatggtatcgtgttattggattaagtggtgatacccaactgaaaatatcatttccagaagttgtcaagtcctgtgatattattatcagtacagctcaaatccttgaaaactccctcttaaacttggaaaatggagaagatgctggtgttcaattgtcagacttttccctcattatcattgatgaatgtcatcacaccaacaaagaagcagtgtataataacatcatgaggcattatttgatgcagaagttgaaaaacaatagactcaagaaagaaaacaaaccagtgattccccttcctcagatactgggactaacagcttcacctggtgttggaggggccacgaagcaagccaaagctgaagaacacattttaaaactatgtgccaatcttgatgcatttactattaaaactgttaaagaaaaccttgatcaactgaaaaaccaaatacaggagccatgcaagaagtttgccattgcagatgcaaccagagaagatccatttaaagagaaacttctagaaataatgacaaggattcaaacttattgtcaaatgagtccaatgtcagattttggaactcaaccctatgaacaatgggccattcaaatggaaaaaaaagctgcaaaagaaggaaatcgcaaagaacgtgtttgtgcagaacatttgaggaagtacaatgaggccctacaaattaatgacacaattcgaatgatagatgcgtatactcatcttgaaactttctataatgaagagaaagataagaagtttgcagtcatagaagatgatagtgatgagggtggtgatgatgagtattgtgatggtgatgaagatgaggatgatttaaagaaacctttgaaactggatgaaacagatagatttctcatgactttattttttgaaaacaataaaatgttgaaaaggctggctgaaaacccagaatatgaaaatgaaaagctgaccaaattaagaaataccataatggagcaatatactaggactgaggaatcagcacgaggaataatctttacaaaaacacgacagagtgcatatgcgctttcccagtggattactgaaaatgaaaaatttgctgaagtaggagtcaaagcccaccatctgattggagctggacacagcagtgagttcaaacccatgacacagaatgaacaaaaagaagtcattagtaaatttcgcactggaaaaataaatctgcttatcgctaccacagtggcagaagaaggtctggatattaaagaatgtaacattgttatccgttatggtctcgtcaccaatgaaatagccatggtccaggcccgtggtcgagccagagctgatgagagcacctacgtcctggttgctcacagtggttcaggagttatcgaacatgagacagttaatgatttccgagagaagatgatgtataaagctatacattgtgttcaaaatatgaaaccagaggagtatgctcataagattttggaattacagatgcaaagtataatggaaaagaaaatgaaaaccaagagaaatattgccaagcattacaagaataacccatcactaataactttcctttgcaaaaactgcagtgtgctagcctgttctggggaagatatccatgtaattgagaaaatgcatcacgtcaatatgaccccagaattcaaggaactttacattgtaagagaaaacaaagcactgcaaaagaagtgtgccgactatcaaataaatggtgaaatcatctgcaaatgtggccaggcttggggaacaatgatggtgcacaaaggcttagatttgccttgtctcaaaataaggaattttgtagtggttttcaaaaataattcaacaaagaaacaatacaaaaagtgggtagaattacctatcacatttcccaatcttgactattcagaatgctgtttatttagtgatgaggattagcacttgattgaagattcttttaaaatactatcagttaaacatttaatatgattatgattaatgtattcattatgctacagaactgacataagaatcaataaaatgattgttttactctgaaaaaaaaaaaaaaaaaaaaaacaaaacaacaaaaaaaaaacaaaaaaaacaaaaaagaaagggggcgggcgcgcgcgagcacaagaagagatgtccccccccaggggggcggccaagaatgtatagcagagcgttagccccgagttgttgtggtggacaacagaggggggcgcccacaataaaaaggagagaggcagatattaatacgaggcagcgaggacagcggggcgccgcggagtcttaaaacaacacgcgtggcgtgagagagggggggaacacacaggcggcgccagcggggagaaacacccggtgggagaagaagacccctctaacgatgcggggggggggggacacacatatggggggacaaacaaaaaccaccgacaagagaatattacaaaggctccccaaggggaacaaatacaa

SEQ ID NO: 379142 - DNA, 473 bp, Homo sapiens
attctcctgtcttagcctcccaaagggctgcgattacaggtgtgagccactgcgcccagccataattcagtacttaattcacagagtttcttctcctctctggtaacaattaggtcccctcctctcaagaacattgcatctgatcaaactgagagccagcatgaacatggaccccaaaccagagctttcagaataacaatgaacagcaaaaaccagcctttccctacacttaggaagggactgtgaatggcagggtccaaattttcaccatccaaatagaaaacccggagctgaatgccaacatggaaaccaaaatatgtcaggaatgaagtatagtacccctttacatactcaaggtcaggataggtttggagaaatttgcatctgactatttggcctcttctagtagagaagagtttttgagacagggtcttgctttgttgcccaggctggagtgccatggcatagtcagc

SEQ ID NO: 379143 - DNA, 443 bp, Homo sapiens
ctgaggttttattactaaccataatagagcaataacaactgtttactgagtgcttcctataaaactgggtagtttagtaggtgatttacatattctcccaattatttatcatacctatctattcttggaacatgaaattagttgttgatattgatattaaacagctagcaccagaccacatgcgacaaacagccaaggtaggattcagatacatctcaggggaagctgagctgccttttgccaggggtaaggcactgtgctgtttgttaggctcttgctctttcctagggaagagtcggccctggcatgtttttgaagtgggagacacgatccgactcctcttcctggttgcttcccccaacttgtagttccactgtctctctagatctgtctaccctaatgctccaagagaccccactgcggcatcacctgtagctcttgga

SEQ ID NO: 379144 - DNA, 1008 bp, Homo sapiens
  misc_feature (4)..(4): n is a, c, g, or t
  misc_feature (6)..(6): n is a, c, g, or t
  misc_feature (13)..(13): n is a, c, g, or t
  misc_feature (730)..(730): n is a, c, g, or t
agcngnggagtcnagcggcgcccgggccagcagcgatggaatttcaaatgccttggaaagaggaatcagaatttacaaagcaggataaggctgccagagtcattcagcaggcctggaaaagtttccttaatgtcgctatatttcaacactttaaaagtctgattgatttaagaagacaaggagaaccacgtcagatagtgaaatatattaatcccaaagaggcagagcttctagatgctgctgctggcattcatgtgcgattcagattaggtggagttaaatttccacctgatatatactataagatttttactcacagacctattgaagatctctgtgctaacagccctagaaattatgcaaaacttccagcaaagcatacatctcataataaaaatgatcatcttcaggaagaggatcatagtggctggtatcatcgtatagaaaacaatggctggaggccagtttctgatacattttggctatctactgatggtatggtggtggaagacaaaaaggaaagtgaattccatttctctaaactgaagagaaggcaagatttggaaaagaaaagaaaacttagaaaaatagagtggatgaggcaaatgtactactcaggaagtctggaggctaagtcaacacatcatgaaactctaggactaattcacactgcaacaaaggggctgattagagcttttgaagatggggggatagattctgtgatggaatnggaagtggatgaagtgctgaactggacaaatacactgaactttgatgaagacacaaaaaaaatggagaaaagcctggttctagaaaataatgcatttctactctacaaatcttcctcatttgtttacttacattattgaggacttcatgaaatcctaggcctcccatcatcttggtccccattctagcagccaattggtacataagaggcaaaaatttatatgttggaatcttcattccgtctctctaccattaaaaaaaagacacaaaattaagaaa

SEQ ID NO: 379145 - DNA, 897 bp, Homo sapiens
  misc_feature (4)..(4): n is a, c, g, or t
  misc_feature (6)..(6): n is a, c, g, or t
  misc_feature (13)..(13): n is a, c, g, or t
agcngnggagtcnagcggcgcccgggccagcagcgatggtctaattttaggttagggacctgcgcaattttgtggatgcaactctgtctctatgcacgttaagaaaggtttatttgaagtcatacaacagggaatttcaaatgccttggaaagaggaatcagaatttacaaagcaggataaggctgccagagtcattcagcaggcctggaaaagtttccttaatgtcgctatatttcaacactttaaaagtctgattgatttaagaagacaaggagaaccacgtcagatagtgaaatatattaatcccaaagaggcagagcttctagatgctgctgctggcattcatgtgcgattcagattaggtggagttaaatttccacctgatatatactataagatttttactcacagacctattgaagatctctgtgctaacagccctagaaattatgcaaaacttccagcaaagcatacatctcataataaaaatgatcatcttcaggaagaggatcatagtggctggtatcatcgtatagaaaacaatggctggaggccagtttctgatacataatggctatctactgatggtatggatggtggacagacaaagaaggcaacaggagatccaatagcatcataaacagacacgagaaggcaagacttaggcaaacagaacacggacaaaccttacgaaaaaaaaatagaagtcgactgaaggcacaccggtaacgacaggtcaaggaaagaccggacaggcctacaggacaacaaccaaactcagtgaaaaagccgtagggaactcagatccacgcacgggcaaaccacacgagggggatgcagacaccagccgaacaacgactgccgcgggactgaaccgcgaagacggaacgaggcgg

SEQ ID NO: 379146 - DNA, 944 bp, Homo sapiens
  misc_feature (666)..(666): n is a, c, g, or t
ttcggcacaggcgggccagcagcgattggaatttcaaatgccttggaaagaggaatcagaatttacaaagcaggataaggctgccagagtcattcagcaggcctggaaaagtttccttaatgtcgctatatttcaacactttaaaagtctgattgatttaagaagacaaggagaaccacgtcagatagtgaaatatattaatcccaaagaggttaaatttccacctgatatatactataagatttttactcacagacctattgaagatctctgtgctaacagccctagaaattatgcaaaacttccagcaaagcatacatctcataataaaaatgatcatcttcaggaagaggatcatagtggctggtatcatcgtatagaaaacaatggctggaggccagtttctgatacattttggctatctactgatggtatggtggtggaagacaaaaaggaaagtgaattccatttctctaaactgaagagaaggcaagatttggaaaagaaaagaaaacttagaaaaatagagtggatgaggcaaatgtactactcaggaagtctggaggctaagtcaacacatcatgaaactctaggactaattcacactgcaacaaaggggctgattagagcttttgaagatggggggatagattctgtgatggaatnggaagtggatgaagtgctgaactggacaaatacactgaactttgatgaagacacaaaaaaaatggagaaaagcctggttctagaaaataatgcatttctactctacaaatcttcctcatttgtttacttacattattgaggacttcatgaaatcctaggcctcccatcatcttggtccccattctagcagccaattggtacataagaggcaaaaatttatatgttggaatcttcattccgtctctctaccattaaaaaaaagacacaaaattaagaaa

SEQ ID NO: 379147 - DNA, 533 bp, Homo sapiens
aggtccccaaggttgctgccgttcttagcctagatttaaaaacctttaatttttcactattttatgtagttccatatgcatatggagatttcatgatcattaggtgaaaattactctttaaattaattattcatagtaaagggaaagggtttgccttttgaaaaaagtatatcttttccatttttctaagtcttctacagtttaggccataccggttttcagaaatcccttctagttaaagtctactaaacactaactaacttactctttactttctcaagcactaatggaaatactggattataaccaatctaatactctctgggcatttctactagacactttgctcagtgtgatttaaggcagtttataatcactccttgtggtcttgaggccagttttcaattcatgagactcatatatcctagctagttttaattaattttgcaaggaagatgccaggagaagcaatattaaatgctttcttataatcaggttatttcatcttttgcgttctcgtcagccactaatct

SEQ ID NO: 379148 - DNA, 732 bp, Homo sapiens
cctcccaaagtgctgggattacagatgtgagccactgcgcccagccttctttttatatttttaaatgtgtcttccccaaatataaatggttggtaagcatgccaaatatattcaataacccccctcctttatttttttttgttgaagtgaggctctccctatgttgcctaagctggtcttgaactcctggtctcaagcaatcctcctacctcagcctcctgctgtgttcatctacaaattgataagagtgaaagtcataatcctacaggaggattaccctatttatttcacaaaccctatttctaccggattttcatacaaggaatacaggcatgtgtttcacctcattaatttattttttcacttagttttgatgatattcacatatattatcaagtgtgcaaacattaaattcttgtgtacaaaactcaaatggtcttccaaataattccccattcttttttcttataaactttcacagctttacccttgacagactttactcaaggaaatctaagttggtcatatgtggctctttcactgattgctatttacttcattgtccagtagcttatgtatgaaaatataattataaaatgtaagggtcctacttccagtgaaactgaagggacttaggcccacttttatcctttactgagagcttatctctacttgataaaatttctactgtattcttggcttaactcaggtcctgtgattaaaaaaaaaatg

SEQ ID NO: 379149 - DNA, 191 bp, Homo sapiens
cgtaatttcactggaaaggagtcatgagtcaaaactcacttggagggttactaagccagaaagcatcagagttgctgaattaagccagagccaagggacttgcctcaacatcccatcatcagtgagaagtggccatgtcaccagtataagctgtcacctcactcttgcaaccatccgctctttctgttcat

SEQ ID NO: 379150 - DNA, 496 bp, Homo sapiens
ttagacagtctaaaatctgtctagtttgcctgaagcttatgtttctccggggaaggtttccgtcactttattttcttccacttattgggccatgttttctgagtttttgttgttgttgttagaaattaggcattgtggaaaaaacaacctccttttccggtttttgcagactgactcttttccagggaggatttttgctattatcttggtattcgttctaagctttgggatcaatctgaggagaaggtttaagattttctcaggcctttttggagcatggatcttacctttgcttgtggctttttccattttctcataggcaactgcttttaaatatttatttgtcccaagagtctctcctctgggcctttgatggtctgttgtatgtctccacccataatatcttgccccaggcatctgctcttcaatctgtctgcatctttgccaagcatgatccagtgcttttcttccctaaggtgtgagatcctcaaaacag

SEQ ID NO: 379151 - DNA, 617 bp, Homo sapiens
tgccaaatactattatataatgattaattctattactaattattattcatgatccccttcctttaatttcccctgtatccctgaccatattccaggtttggtgagtataatacacacacttcccaagagctgcatgagtgggatgctttattggctactttgtctgatttagaaggatctcagaagtggtattcagtaccccagtggatgtgctgccatgtgaagcttcatcagtgttcaatgggcagggattggtttgctcgtccttgagtccttcatgtctattgttcctgcccaaattgcccatgcaaaattcagagttaggagggattgggagtggctggatgcctcccagcagattgactttgaaatttcaacaaaaattcctgtcccctcattaaaaaaaaatcttaattcctttcatgtaccattgtagattctttagattattttattcattataatcttataaagccagaatctatatggtccagtctctcagtgcagggtcaaatagacaggtcaatatccaaatgttcattaaaaataattttgtttgtcaggagatcgagaccatcctggtgaacacggtgaaacccagtctctactaaaaatac

SEQ ID NO: 379152 - DNA, 569 bp, Homo sapiens
tgacacacttagcaggcacaggcaggccggacagttgcaggcctcctctacagggtgggggagcacagcctgtgtgtactcatttccttctcttgagtaccactaatttgatagttcacgtatcctctactaagaggtagagtgagacagcttagggacatcagaagtactactttcggttcttccacatggaaacatgaggaacgaggaataagtattctttccctaacacttacagtgcacttaagacaaagttttttttttttttggactgaatatacgtcgatggacacaggcccagatatggagaaagggcaggtttcctctaggcaagatttgcacggggaacctgaagctcacatagcttcagccctgcgccacagcttagccttagtcacataggtttccctaggtcatagcccagtctcaggctgcccactttatttgaaggcaagggaaaaacaacagtccaaataagataatttgaaacaagcatcttttcatttagttttctgctacaaagttgtctttaatttcttctcctgtatcatttgccatgggtgggaggg

SEQ ID NO: 379153 - DNA, 966 bp, Homo sapiens
aaccaaagccatttcatttggctggggggttggggagtggggaggaaaacaatctttattttaccccatctattgaagagtattattacatttgaaataaaacttccatcagtacagataaccacatgtgcaatgttgggatgttattttgggcttggcttatcgagtagtcaatggaaggattcccgtcccctctctcggcagcttagtaactgctgtagccagctcggctcccttccctgtgtatctgtgtcctgctaacagccaagagatgttgcaagggaggaaatgtgagagaccttgaacctgtcaggtttatttgttttgtttttaaaggcatgttgaagtttagttctttacccttctcctaaaatctttttttaatcagcctcaaggttaaaataaggagtgactacagtatgtaaaataaggaaaggaagcattaatggtgtgatgtgacctgcctgtttttttgtaaacaagagaataggaaatgttttcaaggtagtttcacatgtcttgcaccaagctcatgcctcttgcttttcctttttgactttatctccctcagtttttcttctgctgtggccagaaagacagtcactacagttgactattgatacaaaggtgcaacagaaatattatccctgcatttttaaatataagaagtagacattaattttaccatggtgcctccctaatgtaagtgatatttattggtggttttcaacaaaggttaactattaaagaaagaaatatttgtctttatcttccttttccccttgcctcagtcgtgttattcacccctattcttgatatttcaaaggaggagattcagtagcattttcctttatattatacacatgtgtctatcccatttcaaggctcaagtcttacccccaactcatcggctcccaataggaaataaagaccatttctgcccttagttgttttacatgcaagata

SEQ ID NO: 379154 - DNA, 3745 bp, Homo sapiens
gagatcaccccagagagcattctgtctgcacttccaaaacccagacacagtcagcccctgcactgcaaggcctgtcatctttacttcagagtgttactgggaacccagttccagccagtgaagctgcctcacagagcacttcagcctcccctgccaacaccacagtctctaccataaagggaagaaatctgccctccagtgcccaaccttttattcccaaaagcttcaactattctcctaactcatcaacttctgaagtctcttcaacttcagccagcaaggcctcaattgggcaaagcccagggctcccaagcactacttttaaactaccttccaactctttggggtttacagctacccacaatactagccctgctgccccacctactgaagttaccatctgccaatcttcagaggtctccaagccaaagctggagtcagagtccacctccccaagcctggaaatgaagattcacaacttcttaaaaggtaatcctggtttcagtggcttaaacttaaacatcccaatcctgagcagtttggggtccagcgccccatcagagagccatccctcagacttccagcgtggccctactagcacctcaatcgacaacattgatggaacccctgtacgggatgaacggagtgggacacccacccaggatgagatgatggacaagcccacatccagcagtgtagatactatgtccctgctttctaagatcattagccctggttcctcaacacccagcagtacaagatcaccaccccctgggagagatgaaagctacccccgagagctctccaattctgtatctacatatcgaccctttggtctgggcagtgaatctccctataagcagccttctgatggaatggagagaccatcttccctgatggactcttcacaggaaaagttctacccagatacttctttccaagaagatgaggattaccgagattttgagtattcagggcctccaccctctgccatgatgaacctagagaagaaaccagccaaatctatcctgaaatcaagcaagctgtctgataccaccgagtaccagccaattctgtccagttatagccacagagcccaagaatttggggtaaagtctgccttccctccatctgtaagggccctcctggactctagtgagaactgtgaccgtctctcatcttcccctgggctatttggtgccttcagcgtaagagggaatgaacctgggtctgaccggtcaccatcaccgagtaagaatgattcatttttcacccctgactccaaccacaatagcttgtctcaatctaccactgggcatctcagtttgccacagaagcagtacccagactctcctcacccagtcccacatcgttcccttttctctccgcagaacacccttgccgctcccacgggtcacccacccacgtcaggcgtggagaaagtcctggcctccaccatttccaccacgtcgacgattgaatttaagaatatgcttaaaaacgcctcacgtaagccctcagatgataagcattttggccaggctcccagcaagggcactccaagtgatggtgtcagtctctcaaacctcacccaacccagcttgaccgccactgatcagcagcaacaagaagagcactaccgcatagaaacccgcgtctcctcctcctgcttagacttgcctgatagcacagaagaaaagggggcccctatagaaaccttgggttatcacagtgcatccaataggaggatgtcaggggagccgatccagaccgtagagtccatccgagttcctgggaagggaaatagaggacatgggcgtgaggcttcaagggtgggttggtttgatctgagcacatcaggtagctcttttgacaatggcccttcaagtgcctctgagttggcatcccttgggggtgggggcagcggaggcctcactggctttaaaacagcaccatacaaggaacgggcacctcaatttcaggagagtgtcggcagctttcgttccaacagtttcaactcaacatttgagcatcatcttcccccatcccccttggaacatgggacacccttccagagagagccagtggggccatcatctgccccacctgtccctcctaaggatcatggtggtatcttctctcgagatgcacccactcatctaccctctgtggatctttcgaaccccttcacaaaggaggcagccctggcccatgctgccccaccccctcctcctggagagcacagtggaattcctttccctaccccacctcctcctccccctcctggggaacatagcagcagtggtgggagtggtgtccccttttctactccaccccctcctccaccccctgttgaccactctggagttgtacccttcccagccccaccactggcagagcacggagtggcaggggctgtggcagtatttcccaaggaccatagttccctccttcaagggaccctggctgagcattttggggtactcccaggacccagggaccacgggggccccacccaacgggacctcaacggccctggccttagccgtgtacgagagagcctcaccctaccctcccattctctggaacacctgggcccaccccatggaggaggaggtgggggaggcagcaacagcagcagtggcccccccttgggtccctcacacagagacaccatcagccggagtggtataatcttacggagtccccggccagactttcggcctagggaaccttttctcagcagagacccatttcacagtttaaagagacccaggccaccttttgctaggggccctccgttctttgcaccaaaacgcccattcttccctcccaggtactgatggaaaccgagggaaaggcattttgaacagtctagagaacattggaagtaggagtttggtttattgttgttgtttttatttgttttctctttctcgattttttttttattataacaaagggcctctcttccaaagtaagaaatcacatacgcttacgttttactattcaattcaatcctccctcccattgcacttatctaccttccccaagttgtttgtattaaaaaaaaaaaaaaaaaaaaaaaaaaaaagagttaaacaaaacaaaaccaagggccctttctttggggggggggggtttgggggggtggggggggacaaaacactttttttttgccccctattcttattggcacacagctatttttcttacctttctgtgaacgtatacgatttcttcccgtctcatgcaccgacagtggatcacccccgtgtgtgtgttcacccggtgtggggcctgtgtacatcttctgggggggccgtgcggccttttctctggcggagcatagcccacgggcggcgggatatctccggctcccgctctttgtgcctggcacgcatttagccggacaccgtgtcggtggtgactccccggcgtcggaggcaccacgcctttcccccgggaggacgactatctcaggggagccccggcgcaacaaacccacgccaagagtaaacatctgttcgcaagggggcgacgagacattggcttgacaacacacctgtttatactcgctgcttagaggtctaattgtgggctagcggctctcaaaaagggggacttggtctaacaagtttaaaagcattagtaacccccattctactgtaagaacctttttcttaacccccgcactcaagggtcaaagaacgcggggcggagcactacacgccatgttcaacag

SEQ ID NO: 379155 - DNA, 3427 bp, Homo sapiens
gagatcaccccagagagcattctgtctgcacttccaaaacccagacacagtcagcccctgcactgcaaggcctgtcatctttacttcagagtgttactgggaacccagttccagccagtgaagctgcctcacagagcacttcagcctcccctgccaacaccacagtctctaccataaagggaagaaatctgccctccagtgcccaaccttttattcccaaaagcttcaactattctcctaactcatcaacttctgaagtctcttcaacttcagccagcaaggcctcaattgggcaaagcccagggctcccaagcactacttttaaactaccttccaactctttggggtttacagctacccacaatactagccctgctgccccacctactgaagttaccatctgccaatcttcagaggtctccaagccaaagctggagtcagagtccacctccccaagcctggaaatgaagattcacaacttcttaaaaggtaatcctggtttcagtggcttaaacttaaacatcccaatcctgagcagtttggggtccagcgccccatcagagagccatccctcagacttccagcgtggccctactagcacctcaatcgacaacattgatggaacccctgtacgggatgaacggagtgggacacccacccaggatgagatgatggacaagcccacatccagcagtgtagatactatgtccctgctttctaagatcattagccctggttcctcaacacccagcagtacaagatcaccaccccctgggagagatgaaagctacccccgagagctctccaattctgtatctacatatcgaccctttggtctgggcagtgaatctccctataagcagccttctgatggaatggagagaccatcttccctgatggactcttcacaggaaaagttctacccagatacttctttccaagaagatgaggattaccgagattttgagtattcagggcctccaccctctgccatgatgaacctagagaagaaaccagccaaatctatcctgaaatcaagcaagctgtctgataccaccgagtaccagccaattctgtccagttatagccacagagcccaagaatttggggtaaagtctgccttccctccatctgtaagggccctcctggactctagtgagaactgtgaccgtctctcatcttcccctgggctatttggtgccttcagcgtaagagggaatgaacctgggtctgaccggtcaccatcaccgagtaagaatgattcatttttcacccctgactccaaccacaatagcttgtctcaatctaccactgggcatctcagtttgccacagaagcagtacccagactctcctcacccagtcccacatcgttcccttttctctccgcagaacacccttgccgctcccacgggtcacccacccacgtcaggcgtggagaaagtcctggcctccaccatttccaccacgtcgacgattgaatttaagaatatgcttaaaaacgcctcacgtaagccctcagatgataagcattttggccaggctcccagcaagggcactccaagtgatggtgtcagtctctcaaacctcacccaacccagcttgaccgccactgatcagcagcaacaagaagagcactaccgcatagaaacccgcgtctcctcctcctgcttagacttgcctgatagcacagaagaaaagggggcccctatagaaaccttgggttatcacagtgcatccaataggaggatgtcaggggagccgatccagaccgtagagtccatccgagttcctgggaagggaaatagaggacatgggcgtgaggcttcaagggtgggttggtttgatctgagcacatcaggtagctcttttgacaatggcccttcaagtgcctctgagttggcatcccttgggggtgggggcagcggaggcctcactggctttaaaacagcaccatacaaggaacgggcacctcaatttcaggagagtgtcggcagctttcgttccaacagtttcaactcaacatttgagcatcatcttcccccatcccccttggaacatgggacacccttccagagagagccagtggggccatcatctgccccacctgtccctcctaaggatcatggtggtatcttctctcgagatgcacccactcatctaccctctgtggatctttcgaaccccttcacaaaggaggcagccctggcccatgctgccccaccccctcctcctggagagcacagtggaattcctttccctaccccacctcctcctccccctcctggggaacatagcagcagtggtgggagtggtgtccccttttctactccaccccctcctccaccccctgttgaccactctggagttgtacccttcccagccccaccactggcagagcacggagtggcaggggctgtggcagtatttcccaaggaccatagttccctccttcaagggaccctggctgagcattttggggtactcccaggacccagggaccacgggggccccacccaacgggacctcaacggccctggccttagccgtgtacgagagagcctcaccctaccctcccattctctggaacacctgggcccaccccatggaggaggaggtgggggaggcagcaacagcagcagtggcccccccttgggtccctcacacagagacaccatcagccggagtggtataatcttacggagtccccggccagactttcggcctagggaaccttttctcagcagagacccatttcacagtttaaagagacccaggccaccttttgctaggggccctccgttctttgcaccaaaacgcccattcttccctcccaggtactgatggaaaccgagggaaaggcattttgaacagtctagagaacattggaagtaggagtttggtttattgttgttgtttttatttgttttctctttctcgattttttttttattataacaaagggcctctcttccaaagtaagaaatcacatacgcttacgttttactattcaattcaatcctccctcccattgcacttatctaccttccccaagttgtttgtattaaaaaaaaaaaaaaaaaaaaaaaaaaaatttttgggcgcttgggccctttgaaaaagtttttaagaaccaattgcgcgtggtggggggggggctcaaaggatagtattactgtgtaaacttgtgggtacaataaacgttggttacctaaggagaagatctgtgggtcatgcactaaggtggttgggagtttttcacaatttaaaaaaaggcgccggggggggaaaacaggaggtgggttcttagaacaaaattctaggaggggaggtctcggaggcgacataaacgggagtctttttacacagagggattgtccaaagagaagaggtcgcattattaaattaacggccccggtcgtatggga

SEQ ID NO: 379156 - DNA, 2771 bp, Homo sapiens
  misc_feature (2624)..(2626): n is a, c, g, or t
gagatcaccccagagagcattctgtctgcacttccaaaacccagacacagtcagcccctgcactgcaaggcctgtcatctttacttcagagtgttactgggaacccagttccagccagtgaagctgcctcacagagcacttcagcctcccctgccaacaccacagtctctaccataaagggaagaaatctgccctccagtgcccaaccttttattcccaaaagcttcaactattctcctaactcatcaacttctgaagtctcttcaacttcagccagcaaggcctcaattgggcaaagcccagggctcccaagcactacttttaaactaccttccaactctttggggtttacagctacccacaatactagccctgctgccccacctactgaagttaccatctgccaatcttcagaggtctccaagccaaagctggagtcagagtccacctccccaagcctggaaatgaagattcacaacttcttaaaaggtaatcctggtttcagtggcttaaacttaaacatcccaatcctgagcagtttggggtccagcgccccatcagagagccatccctcagacttccagcgtggccctactagcacctcaatcgacaacattgatggaacccctgtacgggatgaacggagtgggacacccacccaggatgagatgatggacaagcccacatccagcagtgtagatactatgtccctgctttctaagatcattagccctggttcctcaacacccagcagtacaagatcaccaccccctgggagagatgaaagctacccccgagagctctccaattctgtatctacatatcgaccctttggtctgggcagtgaatctccctataagcagccttctgatggaatggagagaccatcttccctgatggactcttcacaggaaaagttctacccagatacttctttccaagaagatgaggattaccgagattttgagtattcagggcctccaccctctgccatgatgaacctagagaagaaaccagccaaatctatcctgaaatcaagcaagctgtctgataccaccgagtaccagccaattctgtccagttatagccacagagcccaagaatttggggtaaagtctgccttccctccatctgtaagggccctcctggactctagtgagaactgtgaccgtctctcatcttcccctgggctatttggtgccttcagcgtaagagggaatgaacctgggtctgaccggtcaccatcaccgagtaagaatgattcatttttcacccctgactccaaccacaatagcttgtctcaatctaccactgggcatctcagtttgccacagaagcagtacccagactctcctcacccagtcccacatcgttcccttttctctccgcagaacacccttgccgctcccacgggtcacccacccacgtcaggcgtggagaaagtcctggcctccaccatttccaccacgtcgacgattgaatttaagaatatgcttaaaaacgcctcacgtaagccctcagatgataagcattttggccaggctcccagcaagggcactccaagtgatggtgtcagtctctcaaacctcacccaacccagcttgaccgccactgatcagcagcaacaagaagagcactaccgcatagaaacccgcgtctcctcctcctgcttagacttgcctgatagcacagaagaaaagggggcccctatagaaaccttgggttatcacagtgcatccaataggaggatgtcaggggagccgatccagaccgtagagtccatccgagttcctgggaagggaaatagaggacatgggcgtgaggcttcaagggtgggttggtttgatctgagcacatcaggtagctcttttgacaatggcccttcaagtgcctctgagttggcatcccttgggggtgggggcagcggaggcctcactggctttaaaacagcaccatacaaggaacgggcacctcaatttcaggagagtgtcggcagctttcgttccaacagtttcaactcaacatttgagcatcatcttcccccatcccccttggaacatgggacacccttccagagagagccagtggggccatcatctgccccacctgtccctcctaaggatcatggtggtatcttctctcgagatgcacccactcatctaccctctgtggatctttcgaaccccttcacaaaggaggcagccctggcccatgctgccccaccccctcctcctggagagcacagtggaattcctttccctaccccacctcctcctccccctcctggggaacatagcagcagtggtgggagtggtgtccccttttctactccaccccctcctccaccccctgttgaccactctggagttgtacccttcccagccccaccactggcagagcacggagtggcaggggctgtggcagtatttcccaaggaccatagttccctccttcaagggaccctggctgagcattttggggtactcccaggacccagggaccacgggggccccacccaacgggacctcaacggccctggccttagccgtgtacgagagagcctcaccctaccctcccattctctggaacacctgggcccaccccatggaggaggaggtgggggnnnttatttttttttgcttgattatacatttttgaaactcttttaacataaacacacttaaaactgtttcaaagcaattggtcaaattgtttttataccccagaatttctttaacttataagagcatcaagctatttttttgaaaacc

SEQ ID NO: 379157 - DNA, 3099 bp, Homo sapiens
gagatcaccccagagagcattctgtctgcacttccaaaacccagacacagtcagcccctgcactgcaaggcctgtcatctttacttcagagtgttactgggaacccagttccagccagtgaagctgcctcacagagcacttcagcctcccctgccaacaccacagtctctaccataaagggaagaaatctgccctccagtgcccaaccttttattcccaaaagcttcaactattctcctaactcatcaacttctgaagtctcttcaacttcagccagcaaggcctcaattgggcaaagcccagggctcccaagcactacttttaaactaccttccaactctttggggtttacagctacccacaatactagccctgctgccccacctactgaagttaccatctgccaatcttcagaggtctccaagccaaagctggagtcagagtccacctccccaagcctggaaatgaagattcacaacttcttaaaaggtaatcctggtttcagtggcttaaacttaaacatcccaatcctgagcagtttggggtccagcgccccatcagagagccatccctcagacttccagcgtggccctactagcacctcaatcgacaacattgatggaacccctgtacgggatgaacggagtgggacacccacccaggatgagatgatggacaagcccacatccagcagtgtagatactatgtccctgctttctaagatcattagccctggttcctcaacacccagcagtacaagatcaccaccccctgggagagatgaaagctacccccgagagctctccaattctgtatctacatatcgaccctttggtctgggcagtgaatctccctataagcagccttctgatggaatggagagaccatcttccctgatggactcttcacaggaaaagttctacccagatacttctttccaagaagatgaggattaccgagattttgagtattcagggcctccaccctctgccatgatgaacctagagaagaaaccagccaaatctatcctgaaatcaagcaagctgtctgataccaccgagtaccagccaattctgtccagttatagccacagagcccaagaatttggggtaaagtctgccttccctccatctgtaagggccctcctggactctagtgagaactgtgaccgtctctcatcttcccctgggctatttggtgccttcagcgtaagagggaatgaacctgggtctgaccggtcaccatcaccgagtaagaatgattcatttttcacccctgactccaaccacaatagcttgtctcaatctaccactgggcatctcagtttgccacagaagcagtacccagactctcctcacccagtcccacatcgttcccttttctctccgcagaacacccttgccgctcccacgggtcacccacccacgtcaggcgtggagaaagtcctggcctccaccatttccaccacgtcgacgattgaatttaagaatatgcttaaaaacgcctcacgtaagccctcagatgataagcattttggccaggctcccagcaagggcactccaagtgatggtgtcagtctctcaaacctcacccaacccagcttgaccgccactgatcagcagcaacaagaagagcactaccgcatagaaacccgcgtctcctcctcctgcttagacttgcctgatagcacagaagaaaagggggcccctatagaaaccttgggttatcacagtgcatccaataggaggatgtcaggggagccgatccagaccgtagagtccatccgagttcctgggaagggaaatagaggacatgggcgtgaggcttcaagggtgggttggtttgatctgagcacatcaggtagctcttttgacaatggcccttcaagtgcctctgagttggcatcccttgggggtgggggcagcggaggcctcactggctttaaaacagcaccatacaaggaacgggcacctcaatttcaggagagtgtcggcagctttcgttccaacagtttcaactcaacatttgagcatcatcttcccccatcccccttggaacatgggacacccttccagagagagccagtggggccatcatctgccccacctgtccctcctaaggatcatggtggtatcttctctcgagatgcacccactcatctaccctctgtggatctttcgaaccccttcacaaaggaggcagccctggcccatgctgccccaccccctcctcctggagagcacagtggaattcctttccctaccccacctcctcctccccctcctggggaacatagcagcagtggtgggagtggtgtccccttttctactccaccccctcctccaccccctgttgaccactctggagttgtacccttcccagccccaccactggcagagcacggagtggcaggggctgtggcagtatttcccaaggaccatagttccctccttcaagggaccctggctgagcattttggggtactcccaggacccagggaccacgggggccccacccaacgggacctcaacggccctggccttagccgtgtacgagagagcctcaccctaccctcccattctctggaacacctgggcccaccccatggaggaggaggtgggggaggcagcaacagcagcagtggcccccccttgggtccctcacacagagacaccatcagccggagtggtataatcttacggagtccccggccagactttcggcctagggaaccttttctcagcagagacccatttcacagtttaaagagacccaggccaccttttgctaggggccctccgttctttgcaccaaaacgcccattcttccctcccaggtactgatggaaaccgagggaaaggcattttgaacagtctagagaacattggaagtaggagtttggtttattgttgttgtttttatttgttttctctttctcgattttttttttattataacaaagggcctctcttccaaagtaagaaatcacatacgcttacgttttactattcaattcaatcctccctcccattgcacttatctaccttccccaagttgtttgtcgacgcggccgcgaatttagtagtagtaggcggccgc

SEQ ID NO: 379158 - DNA, 1155 bp, Homo sapiens
gagatcaccccagagagcattctgtctgcacttccaaaacccagacacagtcagcccctgcactgcaaggcctgtcatctttacttcagagtgttactgggaacccagttccagccagtgaagctgcctcacagagcacttcagcctcccctgccaacaccacagtctctaccataaagggaagaaatctgccctccagtgcccaaccttttattcccaaaagcttcaaccattcttccctcccaggtactgatggaaaccgagggaaaggcattttgaacagtctagagaacattggaagtaggagtttggtttattgttgttgtttttatttgttttctctttctcgattttttttttattataacaaagggcctctcttccaaagtaagaaatcacatacgcttacgttttactattcaattcaatcctccctcccattgcacttatctaccttccccaagttgtttgtattaaaaaaaaaaaaaaaaaaaaaaaaaaaaagagttaaacaaaacaaaaccaagggccctttctttggggggggggggtttgggggggtggggggggacaaaacactttttttttgccccctattcttattggcacacagctatttttcttacctttctgtgaacgtatacgatttcttcccgtctcatgcaccgacagtggatcacccccgtgtgtgtgttcacccggtgtggggcctgtgtacatcttctgggggggccgtgcggccttttctctggcggagcatagcccacgggcggcgggatatctccggctcccgctctttgtgcctggcacgcatttagccggacaccgtgtcggtggtgactccccggcgtcggaggcaccacgcctttcccccgggaggacgactatctcaggggagccccggcgcaacaaacccacgccaagagtaaacatctgttcgcaagggggcgacgagacattggcttgacaacacacctgtttatactcgctgcttagaggtctaattgtgggctagcggctctcaaaaagggggacttggtctaacaagtttaaaagcattagtaacccccattctactgtaagaacctttttcttaacccccgcactcaagggtcaaagaacgcggggcggagcactacacgccatgttcaacag

SEQ ID NO: 379159 - DNA, 198 bp, Homo sapiens
gtacttcctgtgtcaacagatcaattggtagctgctaattttttcttcaagccacagatacctaaagaaagttagagacactacctggagagggcttggtagagaaacagatcttgagggcatcaaagatttttctcttgagagtcactccccacccaactttggccatggtaggagtctgtacctgcctgatgaaga

SEQ ID NO: 379160 - DNA, 254 bp, Homo sapiens
accacaaaggcagaggctggaaccacacagccacaagttgagggatgtcaacagtcaccacaagctctaagagtcaagaaacagagtttccactagagcctctgcagggagcgtggctcttccagcacctcgacttcatgataatggtttcaaatttctggcctccacaattgtgagaccatgactttcggttgttttaagccacccaatttgaggtgatttgttatggcagccttagaaaatacaagtagagg

SEQ ID NO: 379161 - DNA, 439 bp, Homo sapiens
aagggtttccaagaaagtgacatttaagcagagattcaaagaatgggcaggaaataagtagacacaatttgagggtaactgtagaatggatgatggggagaagaacattctaggcagaaggaactgcatttgtaagaccagtggtgagacagaatatgggagcatgatgagttacaagaaatgaaatatgctttgggagccaagataggaggatcatttgaggccaggagtagcagacctgactatgttccctgaacaacatagcaagacctcatctctacaaaaaaactagtcaaacgtggtattgcatgcctacagttccagacactagggcagctgaggagggaggaggcttgagcccaggagttcaaggttgaagtgagctatgatcgtgccagtgctccccagcctgggtaataaagtaagactctgtctaaaa

SEQ ID NO: 379162 - DNA, 772 bp, Homo sapiens
cttaaagttcattgttatcctgatcaccaaatccagtgacctttcacttcccttgcaactggcagtgaatcacttcttggtggatattgtctcttcttgttcatcgtggagctgaaatactctgtctttaacgtcctgattgtcttcctactgtcttctttggagtcagctttgactcctcttttccatctatccaacttacaaagtccttcagattctctttgaaaggacttagccaatcgttcttttctgttcttagtgttactctaatccaagctctgaacacctcattgatgaactactatagtggcctcctaaatcttaagcttttctgtgattgctgaagaatagattagtgaattataaattatatgctactcttcagaaatgttcagtgaaaattagtgtggcatttagagccttcatcatctagcttcagtgtaccacctagccaccactacagtccttgcattgacctactggcaccccgaataggattgcctctcttgttttgactgaccaaaaaactgcccattctttaaggtctagagatgaggtacttactaaaaaaaaaaaaaaaaaaaaaaaatcccaattcacagtaacctctttctttatttaattcttacaggggccaagtactaattatatagcacctataatggaccagacatcaagctatttgacatatatttaactttacatttagagatatgtattatttcagtttttcaactgagaaaccttgagctacagagaggctgcatgtgca

SEQ ID NO: 379163 - DNA, 969 bp, Homo sapiens
gaagaagaagaaattagtgaaaatttctaattcttaaaaatcaagtgagggccagtaggatagttgagagtaactgggagcctcagacacaagggaaatctgtgctcatccatgagttctttcccagggacctttacttagtacttatcagaaattttggggacagagaagttgaccagagaaagccccctttggttccacaggtgtgcaggtactgagaccctgcccttaggaacaggcacaaaatcccacataccaccccagatttttctctcatgtgaaaagccttacacaactaggggaagggcagaaactatagggcccacggttctgcgcttatccaaagcagaggtctgcaagccatatagagcatagtttggtgccacatgaagagggaggggcagaaaagttgtggaaaagccagcccaaggcccaggtccatggggcctaagactaaggttggactcagagaactcaaaagtttacagcagctgcgttcataattgctccaaattggaaataacccagatgtctgtcagttgaggaatggataaacaaatagtcatggattccacagaatagaattttacttggcaatagaaaggaatagagggaattttatagacctcaccactgtaccggtgatcactgaggataaccactgggacaggagccatgaaagtttcatgaaaacgttcggacaatgtaaatgtttggaagtagattaagacagttatatgccaggtgcggtggctcacgcctgtaatcccaggactttgggaggccaaagtgggtggaacacgagtcaggaatttgagaccagcctggccaagatggtgaaaccccgtgtttactaaaaatataaaaattagccgggtgcactggcgcacgcctgtagtcccagctacatgggaggctgagagaggagaatcgcttgaacttgggaggtggaggttgcagtaagcagag

SEQ ID NO: 379164 - DNA, 455 bp, Homo sapiens
tgtctttttttcccataaagtatcagatctattacttgaggtaacggacacagtataaaaaattacaaactattagtaaatttagtttccttaatattaagggcttaggatcagcgaaatgctgcataaaaattttgaaaatacaagccacaaaattgcagattttaaacaaaacttatgcttatgcagggccgggcgcggtggctcacgcttgtaatcccagcactttgggaggctgaggcgggtggatcatgaggtcaggagttcgagaccagcctggacaacatggcgaaaccccatctctgctaaaaatacaaaattagctgggcatggtggtgcgagctttgggaggccaaggcaggagaatcgcttgaaccttgggaggtggaggttgcagtgagccaagatcgctccattgcactccagcctgggcaacgagaacgaaactccatctc

SEQ ID NO: 379165 - DNA, 717 bp, Homo sapiens
aaagtttgaattacattgaacatatgtctgaaatgtaagaaggggtaagccctctttcttaccatccttcctgaccatgacccctgggagtcagatatcccaggcacagcttagctttctaaccctgctgtgttgccctccatgatctctccgaatttctctccctttcctccctttacactaaaaatgctctagttctggccttcctcatctcgttaataattaagctggctgacttaactccctgccttctggttgccctcttcaatctgtccttgtctctgtcagcagcagcatcgtcctgctcaaaaccacaaagacctcctactgtggaaagacaggtattcaggaatccacatcggcacgtctaggatcccctgtgatgtgccctgaaacaacctccactgtcttagcttttactaacatcttccataatttccaggcccagcaggcctgatcttgtgctcaacttccccaacttagtctcctccttctgtcagaaatagcctttctctatctccacctgagattaatgtatcctggagagtctatctctcttttcagtgtccatatcaagggccggctcctccagaaagcctttctataccttcaacctccaacctcatatctcatcattagaaaagatcacgttctcattagaagcccaaacctcagtatcacataatatgcccatctaacaaacctgcacatgtacac

SEQ ID NO: 379166 - DNA, 594 bp, Homo sapiens
cagagaagttaagtaagaactcagatctctctagtgtcttacatattttaactaagtctaaaatgaaaggctttgtttttagcattctaaatttctccagaagacattatctccaataataccagcctgggcggtggagcaagacctgtctcaaaacatacaataccaccaaagcctttcattttaaattctaatgtagtgtttaaagtacatttagatagcagagatattgtatgccatttgtcaattacatgaggattaaaacctcacctgagccatactgcactttctatttagaaggatgaatcatttctgggaatacagttttgtaatttacatgtggaaaatttaaaactttaaggcttcaacatgagtattttatgtacataattataggaaaccaatattctttgtagctgttgaattaagttcaaagacctttcaaagataattctaagtctttttaaaaagattatttaaagtacacagcttttcagccagtattggtgaagaaacattttgagagtatgacggaataaaacatcttcttagaaatttcagctgttttttgttgagatttgttctcttcacatg

SEQ ID NO: 379167 - DNA, 425 bp, Homo sapiens
atagacaaatacggctgggcatagtgactcactatgtaatcccagcagttttggaggctgagtcaggagcatcatttcagctcaggagtttgagaccagcctaccagcctaggcaacatggtaagacacccatctcttaaaaaaaaaattacatcaacttaaaaacttctgtgttcaaagggaataatcaataaaatgggcaacttatgggatgggagaaaataattacaaatcatatatctgataaggggttaatatacataatatataaggaacttctataactcaacaacattatgacaaataaccaattaggccaggcgcagtgcctcacacctgtaatcccagcactttgtgaggccaaggcaggaagattgctgaagaccagcctgggcaacatagaaagaccccgtctctacaaaaaa

SEQ ID NO: 379168 - DNA, 708 bp, Homo sapiens
atttcctgagcacctttcatccaggcatgatgccaggtgcaccaacttacttaatcctcatagccaccacctgagcaagctcctgttttataaatggaccagttcttgttgctattgtacaagttattttctttctataacgtcctccttgtcctccttccacattcttaaagaaacttgcccttcctttaaagtactcagggagccctgcattgcttcttgaagccttctccagcttcatcatctcacagtggtctctcttttcactaaatgtccaatatgctgcacataagtaccccaaagttagcacagaattgttccatggctgtcatatatgttaaaaatcattaaaagttcattttttctctcattatgggaaggatacatgctcctactagtaaatttagtaggtagaaaaaaattatcactatctagactgctttccatttagtctttatgcatagctttctgtctgcctatttttaccttgtgtttgtaacttactattataaaatatgcgtctctatgtgcattgtcaacattatttacaataacatggagtggattgacacgtattctctatatttggattaaaggagatagagtatgtgaaattaaatgggagaagtatctgatacataacaggcaatacaaatattatcacatagcgtcaacttatttgtgaatattgaaagctccaaaaaaaaa

SEQ ID NO: 379169 - DNA, 701 bp, Homo sapiens
agaacagagagagtttccatatatctgacacccagtttccctaatgttagcatcttgtattagtatagcacactgtgacaattattaggttggtgcaaaagtaattgcggtttttgccattgaataatgataaaccaatattggtacgttattattaactaaaatgcatacactattcagattttctgatttctttctttaacataacatcctttttctgttctaagatcccatccttgatacattacatttaggctttttgtctccttaggctccttttggctgtgacagtttctaagagttaacttgtttttgattatcttgacagttttgaggaatactggtcaggtatcttatagaccactcttcaacttggatgtttatcttatggttagactggagttatggcttttgggaagaagaccgtggagatataatgccattctcatcacatcagatcaagagtacatattgttggctggtgtggtggctcacgcctataatcccagcactttgggaggtcaaggcaggtggatcattcgaggccaggctggtctcaaacttctgagctcaagtgatccgcttgcctcggccccccaaaatgctgggattacaagcattagccaccatgcccagcctggatatggaatttttaaaaataatatattagtagtgggggcagggaggagaaaaaaagaaaa

SEQ ID NO: 379170 - DNA, 361 bp, Homo sapiens
cctgctttaggaggggtatagcaagttagttaatttctgtcgtctttctaattgcatcacatttaaggcatgttgccttaaagtcttgctgtatcttttttcttcttttgtttgtattttccctcacttcctgctcctgtggtaatcatccattttatttggtttgggtcttataggtcttgatttatgcactttccaggttgagagctcaccttttccatttggtaagaaactgagcaatggatgacggctgactagaagtagtcttctttttttatagtgatttcagctgaaacaacctgtaggtgcatgctgtttatcagtagtgctaatttgtcactaatccatactttgcttttcc

SEQ ID NO: 379171 - DNA, 1035 bp, Homo sapiens
ggtgttaaattatcctacgattaatggcagaaataggtcctgaaccaatatgcctttgagaacttaaacgcggtgagttacatacaggccctcctaactggagtcttcgctagtaccaatagttagttgctcggcgagagctcggtaaggactagccatttggaagctcgtagtactcaggttgtggtacaggagatctaacactcctacacaaatgcatgtcgtgcttatttcgtaccaaactggtctggcggcggttcttcgtccagacgctggcgggccagggtggaggtagtaacacagctcccattccccatgtagccgcgccctctccttcccctgggcgtctccggggcgtggacaggccgctgaaaggaaccggtctgcggcctgtgtgaggctccgcgggccgctgcactgcgaggccgacgcagctggagagaagttaggcaggtcctagggagggcaggctcgagtgctgggcccgcctccccgcgggactgtaggcccgggggctccgcctcgtcgcagcggcagaagtgatgccaccaaaaagaaatgaaaaatacaaacttcctattccatttccagaaggcaaggttctggatgatatggaaggcaatcagtgggtactgggcaagaagattggctctggaggatttggattgatatatttaggcagacaatgtcttcaaagagacagcagtgctgcaaaggagcaagaaaagaaggccaaagttgacacacagagaggcaaaacagtgtaggaaaaatcaacacgttttgcaaaatcaatcattgaaaatgtgtcagcattcaggagactgtctttaatttgcaatccaagtgaaatagagtatttaaatatgagaggcagtattattgagcccagcatgcctgctaccacttgtttgactagctcagaatagaacactgagaggcaagggctcaaagttaaatgaacatttatacattttaaaatcaaatgaaagattcagagtatattcatgaattaattttttttcaaaaccctaa

SEQ ID NO: 379172 - DNA, 2440 bp, Homo sapiens
ggtgttaaattatcctacgattaatggcagaaataggtcctgaaccaatatgcctttgagaacttaaacgcggtgagttacatacaggccctcctaactggagtcttcgctagtaccaatagttagttgctcggcgagagctcggtaaggactagccatttggaagctcgtagtactcaggttgtggtacaggagatctaacactcctacacaaatgcatgtcgtgcttatttcgtaccaaactggtctggcggcggttcttcgtccagacgctggcgggccagggtggaggtagtaacacagctcccattccccatgtagccgcgccctctccttcccctgggcgtctccggggcgtggacaggccgctgaaaggaaccggtctgcggcctgtgtgaggctccgcgggccgctgcactgcgaggccgacgcagctggagagaagttaggcaggtcctagggagggcaggctcgagtgctgggcccgcctccccgcgggactgtaggcccgggggctccgcctcgtcgcagcggcagaagtgatgccaccaaaaagaaatgaaaaatacaaacttcctattccatttccagaaggcaaggttctggatgatatggaaggcaatcagtgggtactgggcaagaagattggctctggaggatttggattgatatatttagctttccccacaaataaaccagagaaagatgcaagacatgtagtaaaagtggaatatcaagaaaatggcccgttattttcagaacttaaattttatcagagagttgcaaaaaaagactgtatcaaaaagtggatagaacgcaaacaacttgattatttaggaattcctctgttttatggatctggtctgactgaattcaagggaagaagttacagatttatggtaatggaaagactaggaatagatttacagaagatctcaggccagaatggtacctttaaaaagtcaactgtcctgcaattaggtatccgaatgttggatgtactggaatatatacatgaaaatgaatatgttcatggtgatataaaagcagcaaatctacttttgggttacaaaaatccagaccaggtttatcttgcagattatggactttcctacagatattgtcccaatgggaaccacaaacagtatcaggaaaatcctagaaaaggccataatgggacaatagagtttaccagcttggatgcccacaagggagtagccttgtccagacgaagtgacgttgagatcctcggctactgcatgctgcggtggttgtgtgggaaacttccctgggaacagaacctgaaggaccctgtggctgtgcagactgctaaaacaaatctgttggacgagctcccccagtcagtgcttaaatgggctccttctggaagcagttgctgtgaaatagcccaatttttggtatgtgctcatagtttagcatatgatgaaaagccaaactatcaagccctcaagaaaattttgaaccctcatggaatacctttaggaccactggacttttccacaaaaggacagagtataaatgtccatactccaaacagtcaaaaagttgattcacaaaaggctgcaacaaagcaagtcaacaaggcacacaataggttaatcgaaaaaaaagtccacagtgagagaagcgctgagtcctgtgcaacatggaaagtgcagaaagaggagaaactgattggattgatgaacaatgaagcagctcaggaaagcacaaggagaagacagaaatatcaagagtctcaagaacctttgaatgaagtaaacagtttcccacaaaaaatcagctatacacaattcccaaactcattttatgagcctcatcaagattttaccagtccagatatattcaagaagtcaagatctccatcttggtataaatacacttccacagtcagcacggggatcacagacttagaaagttcaactggactttggcctacaatttcccagtttactcttagtgaagagacaaacgcagatgtttattattatcgcatcatcatacctgtccttttgatgttagtatttcttgctttattttttctctgaagatgataccaaaattccttttgataattttttaagtttccagctcttcaccgaaatgttgtattcttatttcagtgtttccttccagacatttttaaggtaattggctttaaaaagagaacatattttaacaaagtttgtggacactctaaaaaataaaattgctttgtactagaaatagtgtcatagaatagtgtcatagtacagtttggaaaacacttctgaagtttcagatcacctaggaaatctagaaaaggagtttaatgtttttgatcagagaatttgaaaaatagaaatacagagaatgagtttcaaaagttttagataaactgatatactatatagatctatcttctagaacatattactga

SEQ ID NO: 379173 - DNA, 2594 bp, Homo sapiens
ggtgttaaattatcctacgattaatggcagaaataggtcctgaaccaatatgcctttgagaacttaaacgcggtgagttacatacaggccctcctaactggagtcttcgctagtaccaatagttagttgctcggcgagagctcggtaaggactagccatttggaagctcgtagtactcaggttgtggtacaggagatctaacactcctacacaaatgcatgtcgtgcttatttcgtaccaaactggtctggcggcggttcttcgtccagacgctggcgggccagggtggaggtagtaacacagctcccattccccatgtagccgcgccctctccttcccctgggcgtctccggggcgtggacaggccgctgaaaggaaccggtctgcggcctgtgtgaggctccgcgggccgctgcactgcgaggccgacgcagctggagagaagttaggcaggtcctagggagggcaggctcgagtgctgggcccgcctccccgcgggactgtaggcccgggggctccgcctcgtcgcagcggcaggtaggaggcggtgcgcgcggcccggcgacgggggatcctgaggcccgaagtgatgccaccaaaaagaaatgaaaaatacaaacttcctattccatttccagaaggcaaggttctggatgatatggaaggcaatcagtgggtactgggcaagaagattggctctggaggatttggattgatatatttagctttccccacaaataaaccagagaaagatgcaagacatgtagtaaaagtggaatatcaagaaaatggcccgttattttcagaacttaaattttatcagagagttgcaaaaaaagactgtatcaaaaagtggatagaacgcaaacaacttgattatttaggaattcctctgttttatggatctggtctgactgaattcaagggaagaagttacagatttatggtaatggaaagactaggaatagatttacagaagatctcaggccagaatggtacctttaaaaagtcaactgtcctgcaattaggtatccgaatgttggatgtactggaatatatacatgaaaatgaatatgttcatggtgatataaaagcagcaaatctacttttgggttacaaaaatccagaccaggtttatcttgcagattatggactttcctacagatattgtcccaatgggaaccacaaacagtatcaggaaaatcctagaaaaggccataatgggacaatagagtttaccagcttggatgcccacaagggagtagccttgtccagacgaagtgacgttgagatcctcggctactgcatgctgcggtggttgtgtgggaaacttccctgggaacagaacctgaaggaccctgtggctgtgcagactgctaaaacaaatctgttggacgagctcccccagtcagtgcttaaatgggctccttctggaagcagttgctgtgaaatagcccaatttttggtatgtgctcatagtttagcatatgatgaaaagccaaactatcaagccctcaagaaaattttgaaccctcatggaatacctttaggaccactggacttttccacaaaaggacagagtataaatgtccatactccaaacagtcaaaaagttgattcacaaaaggctgcaacaaagcaagtcaacaaggcacacaataggttaatcgaaaaaaaagtccacagtgagagaagcgctgagtcctgtgcaacatggaaagtgcagaaagaggagaaactgattggattgatgaacaatgaagcagctcaggaaagcacaaggagaagacagaaatatcaagagtctcaagaacctttgaatgaagtaaacagtttcccacaaaaaatcagctatacacaattcccaaactcattttatgagcctcatcaagattttaccagtccagatatattcaagaagtcaagatctccatcttggtataaatacacttccacagtcagcacggggatcacagacttagaaagttcaactggactttggcctacaatttcccagtttactcttagtgaagagacaaacgcagatgtttattattatcgcatcatcatacctgtccttttgatgttagtatttcttgctttattttttctctgaagatgataccaaaattccttttgataattttttaagtttccagctcttcaccgaaatgttgtattcttatttcagtgtttccttccagacatttttaaggtaattggctttaaaaagagaacatattttaacaaagtttgtggacactctaaaaaataaaattgctttgtactagaaaaaaaacatacacttaaagatgcgccaagcaaccgcaaacccggcagcaaatcgcgcgcggtcgcatccactgtcgccccgagccgccctgcctcgcgggagcgtggtcccgggcgcggcccggcgagccgcacgcgctcgtctcgcgctcgcccgcctctccgtatcaggcggcgcaggcgcgagacgagaaagagcgcggggtcttagaggcgcaggccaggacaaacgcatctctgggctcattcgagatgtcggttactggaggccggggggaagcgagtgttgggtgcggtggggg

SEQ ID NO: 379174 - DNA, 2731 bp, Homo sapiens
ggtgttaaattatcctacgattaatggcagaaataggtcctgaaccaatatgcctttgagaacttaaacgcggtgagttacatacaggccctcctaactggagtcttcgctagtaccaatagttagttgctcggcgagagctcggtaaggactagccatttggaagctcgtagtactcaggttgtggtacaggagatctaacactcctacacaaatgcatgtcgtgcttatttcgtaccaaactggtctggcggcggttcttcgtccagacgctggcgggccagggtggaggtagtaacacagctcccattccccatgtagccgcgccctctccttcccctgggcgtctccggggcgtggacaggccgctgaaaggaaccggtctgcggcctgtgtgaggctccgcgggccgctgcactgcgaggccgacgcagctggagagaagttaggcaggtcctagggagggcaggctcgagtgctgggcccgcctccccgcgggactgtaggcccgggggctccgcctcgtcgcagcggcaggtaggaggcggtgcgcgcggcccggcgacgggggatcctgaggcccgaagtgatgccaccaaaaagaaatgaaaaatacaaacttcctattccatttccagaaggcaaggttctggatgatatggaaggcaatcagtgggtactgggcaagaagattggctctggaggatttggattgatatatttagagacactggccatttttctctctccaatgcttagtgtggagtaaaggcagcttcccgcaaatttatttcaagcaagagcaatcggaagcttcgacatgtgtgaaagaggcgcatagagaacatagcttccatttcagctttccccacaaataaaccagagaaagatgcaagacatgtagtaaaagtggaatatcaagaaaatggcccgttattttcagaacttaaattttatcagagagttgcaaaaaaagactgtatcaaaaagtggatagaacgcaaacaacttgattatttaggaattcctctgttttatggatctggtctgactgaattcaagggaagaagttacagatttatggtaatggaaagactaggaatagatttacagaagatctcaggccagaatggtacctttaaaaagtcaactgtcctgcaattaggtatccgaatgttggatgtactggaatatatacatgaaaatgaatatgttcatggtgatataaaagcagcaaatctacttttgggttacaaaaatccagaccaggtttatcttgcagattatggactttcctacagatattgtcccaatgggaaccacaaacagtatcaggaaaatcctagaaaaggccataatgggacaatagagtttaccagcttggatgcccacaagggagtagccttgtccagacgaagtgacgttgagatcctcggctactgcatgctgcggtggttgtgtgggaaacttccctgggaacagaacctgaaggaccctgtggctgtgcagactgctaaaacaaatctgttggacgagctcccccagtcagtgcttaaatgggctccttctggaagcagttgctgtgaaatagcccaatttttggtatgtgctcatagtttagcatatgatgaaaagccaaactatcaagccctcaagaaaattttgaaccctcatggaatacctttaggaccactggacttttccacaaaaggacagagtataaatgtccatactccaaacagtcaaaaagttgattcacaaaaggctgcaacaaagcaagtcaacaaggcacacaataggttaatcgaaaaaaaagtccacagtgagagaagcgctgagtcctgtgcaacatggaaagtgcagaaagaggagaaactgattggattgatgaacaatgaagcagctcaggaaagcacaaggagaagacagaaatatcaagagtctcaagaacctttgaatgaagtaaacagtttcccacaaaaaatcagctatacacaattcccaaactcattttatgagcctcatcaagattttaccagtccagatatattcaagaagtcaagatctccatcttggtataaatacacttccacagtcagcacggggatcacagacttagaaagttcaactggactttggcctacaatttcccagtttactcttagtgaagagacaaacgcagatgtttattattatcgcatcatcatacctgtccttttgatgttagtatttcttgctttattttttctctgaagatgataccaaaattccttttgataattttttaagtttccagctcttcaccgaaatgttgtattcttatttcagtgtttccttccagacatttttaaggtaattggctttaaaaagagaacatattttaacaaagtttgtggacactctaaaaaataaaattgctttgtactagaaaaaaaacatacacttaaagatgcgccaagcaaccgcaaacccggcagcaaatcgcgcgcggtcgcatccactgtcgccccgagccgccctgcctcgcgggagcgtggtcccgggcgcggcccggcgagccgcacgcgctcgtctcgcgctcgcccgcctctccgtatcaggcggcgcaggcgcgagacgagaaagagcgcggggtcttagaggcgcaggccaggacaaacgcatctctgggctcattcgagatgtcggttactggaggccggggggaagcgagtgttgggtgcggtggggg

SEQ ID NO: 379175 - DNA, 2497 bp, Homo sapiens
ggtgttaaattatcctacgattaatggcagaaataggtcctgaaccaatatgcctttgagaacttaaacgcggtgagttacatacaggccctcctaactggagtcttcgctagtaccaatagttagttgctcggcgagagctcggtaaggactagccatttggaagctcgtagtactcaggttgtggtacaggagatctaacactcctacacaaatgcatgtcgtgcttatttcgtaccaaactggtctggcggcggttcttcgtccagacgctggcgggccagggtggaggtagtaacacagctcccattccccatgtagccgcgccctctccttcccctgggcgtctccggggcgtggacaggccgctgaaaggaaccggtctgcggcctgtgtgaggctccgcgggccgctgcactgcgaggccgacgcagctggagagaagttaggcaggtcctagggagggcaggctcgagtgctgggcccgcctccccgcgggactgtaggcccgggggctccgcctcgtcgcagcggcaggtaggaggcggtgcgcgcggcccggcgacgggggatcctgaggcccggtcagtctcttgctctggggtcttgggtggcgggcggcacctccgcttgcagtgccggagccgcggccccgctcggaaaagggctgccgtcggagttagatgccggggactccgggccgtcccagcccccgggcctcagctccggcccgggcagagtcgctgcttccgcgtttggttcttttttccccgctgggagtgagaacaaggcgtccccttctactcacgtttgccaaaagcgggtccgacgtgttagcggaaaaaagtgatgccaccaaaaagaaatgaaaaatacaaacttcctattccatttccagaaggcaaggttctggatgatatggaaggcaatcagtgggtactgggcaagaagattggctctggaggatttggattgatatatttagctttccccacaaataaaccagagaaagatgcaagacatgtagtaaaagtggtttatcttgcagattatggactttcctacagatattgtcccaatgggaaccacaaacagtatcaggaaaatcctagaaaaggccataatgggacaatagagtttaccagcttggatgcccacaagggagtagccttgtccagacgaagtgacgttgagatcctcggctactgcatgctgcggtggttgtgtgggaaacttccctgggaacagaacctgaaggaccctgtggctgtgcagactgctaaaacaaatctgttggacgagctcccccagtcagtgcttaaatgggctccttctggaagcagttgctgtgaaatagcccaatttttggtatgtgctcatagtttagcatatgatgaaaagccaaactatcaagccctcaagaaaattttgaaccctcatggaatacctttaggaccactggacttttccacaaaaggacagagtataaatgtccatactccaaacagtcaaaaagttgattcacaaaaggctgcaacaaagcaagtcaacaaggcacacaataggttaatcgaaaaaaaagtccacagtgagagaagcgctgagtcctgtgcaacatggaaagtgcagaaagaggagaaactgattggattgatgaacaatgaagcagctcaggaaagcacaaggagaagacagaaatatcaagagtctcaagaacctttgaatgaagtaaacagtttcccacaaaaaatcagctatacacaattcccaaactcattttatgagcctcatcaagattttaccagtccagatatattcaagaagtcaagatctccatcttggtataaatacacttccacagtcagcacggggatcacagacttagaaagttcaactggactttggcctacaatttcccagtttactcttagtgaagagacaaacgcagatgtttattattatcgcatcatcatacctgtccttttgatgttagtatttcttgctttattttttctctgaagatgataccaaaattccttttgataattttttaagtttccagctcttcaccgaaatgttgtattcttatttcagtgtttccttccagacatttttaaggtaattggctttaaaaagagaacatattttaacaaagtttgtggacactctaaaaaataaaattgctttgtactagaaaaaaaacatacacttaaagatgcgccaagcaaccgcaaacccggcagcaaatcgcgcgcggtcgcatccactgtcgccccgagccgccctgcctcgcgggagcgtggtcccgggcgcggcccggcgagccgcacgcgctcgtctcgcgctcgcccgcctctccgtatcaggcggcgcaggcgcgagacgagaaagagcgcggggtcttagaggcgcaggccaggacaaacgcatctctgggctcattcgagatgtcggttactggaggccggggggaagcgagtgttgggtgcggtggggg

SEQ ID NO: 379176 - DNA, 2638 bp, Homo sapiens
ggtgttaaattatcctacgattaatggcagaaataggtcctgaaccaatatgcctttgagaacttaaacgcggtgagttacatacaggccctcctaactggagtcttcgctagtaccaatagttagttgctcggcgagagctcggtaaggactagccatttggaagctcgtagtactcaggttgtggtacaggagatctaacactcctacacaaatgcatgtcgtgcttatttcgtaccaaactggtctggcggcggttcttcgtccagacgctggcgggccagggtggaggtagtaacacagctcccattccccatgtagccgcgccctctccttcccctgggcgtctccggggcgtggacaggccgctgaaaggaaccggtctgcggcctgtgtgaggctccgcgggccgctgcactgcgaggccgacgcagctggagagaagttaggcaggtcctagggagggcaggctcgagtgctgggcccgcctccccgcgggactgtaggcccgggggctccgcctcgtcgcagcggcaggtaggaggcggtgcgcgcggcccggcgacgggggatcctgaggcccgaagtgatgccaccaaaaagaaatgaaaaatacaaacttcctattccatttccagaaggcaaggttctggatgatatggaaggcaatcagtgggtactgggcaagaagattggctctggaggatttggattgatatatttagctttccccacaaataaaccagagaaagatgcaagacatgtagtaaaagtggaatatcaagaaaatggcccgttattttcagaacttaaattttatcagagagttgcaaaaaaagactgtatcaaaaagtggatagaacgcaaacaacttgattatttaggaattcctctgttttatggatctggtctgactgaattcaagggaagaagttacagatttatggtaatggaaagactaggaatagatttacagaagatctcaggccagaatggtacctttaaaaagtcaactgtcctgcaattaggtatccgaatgttggatgtactggaatatatacatgaaaatgaatatgttcatggtgatataaaagcagcaaatctacttttgggttacaaaaatccagaccaggtttatcttgcagattatggactttcctacagatattgtcccaatgggaaccacaaacagtatcaggaaaatcctagaaaaggccataatgggacaatagagtttaccagcttggatgcccacaagggagtagccttgtccagacgaagtgacgttgagatcctcggctactgcatgctgcggtggttgtgtgggaaacttccctgggaacagaacctgaaggaccctgtggctgtgcagactgctaaaacaaatctgttggacgagctcccccagtcagtgcttaaatgggctccttctggaagcagttgctgtgaaatagcccaatttttggtatgtgctcatagtttagcatatgatgaaaagccaaactatcaagccctcaagaaaattttgaaccctcatggaatacctttaggaccactggacttttccacaaaaggacagagtataaatgtccatactccaaacagtcaaaaagttgattcacaaaaggctgcaacaaagcaagtcaacaaggcacacaataggttaatcgaaaaaaaagtccacagtgagagaagcgctgagtcctgtgcaacatggaaagtgcagaaagaggagaaactgattggattgatgaacaatgaagcagctcaggtagaagcttaggctattgatttgaacccactattttttctaatgaaagcacaaggagaagacagaaatatcaagagtctcaagaacctttgaatgaagtaaacagtttcccacaaaaaatcagctatacacaattcccaaactcattttatgagcctcatcaagattttaccagtccagatatattcaagaagtcaagatctccatcttggtataaatacacttccacagtcagcacggggatcacagacttagaaagttcaactggactttggcctacaatttcccagtttactcttagtgaagagacaaacgcagatgtttattattatcgcatcatcatacctgtccttttgatgttagtatttcttgctttattttttctctgaagatgataccaaaattccttttgataattttttaagtttccagctcttcaccgaaatgttgtattcttatttcagtgtttccttccagacatttttaaggtaattggctttaaaaagagaacatattttaacaaagtttgtggacactctaaaaaataaaattgctttgtactagaaaaaaaacatacacttaaagatgcgccaagcaaccgcaaacccggcagcaaatcgcgcgcggtcgcatccactgtcgccccgagccgccctgcctcgcgggagcgtggtcccgggcgcggcccggcgagccgcacgcgctcgtctcgcgctcgcccgcctctccgtatcaggcggcgcaggcgcgagacgagaaagagcgcggggtcttagaggcgcaggccaggacaaacgcatctctgggctcattcgagatgtcggttactggaggccggggggaagcgagtgttgggtgcggtggggg

SEQ ID NO: 379177 - DNA, 453 bp, Homo sapiens
aattatagtggtaacagtttgaggccattagatagagatgtttgattgaaaaaaaattatcttctaggaagatctaattacttttttggttagctaaataaatttgtctgtagaaaggtgacaagtatcttttcaaataacatgaatctttttaaaaataaatttgtctttgtagtcaaaaagtggatagaacgcaaacaacttgattatttaggaattcctctgttttatggatctggtctgactgaattcaagggaagaaggtaaaatggaattattataatcaaatatttctttataactattccttatgtggtctatgagttaactattgccatgtaacaaattaccaaaacatattggcatataaccacaaacttgtattgtcttagtttctgtgagtgaggagactgcaagtggcttatctgtatgattctagatcaggatctctaa

SEQ ID NO: 379178 - DNA, 1073 bp, Homo sapiens
ggtgttaaattatcctacgattaatggcagaaataggtcctgaaccaatatgcctttgagaacttaaacgcggtgagttacatacaggccctcctaactggagtcttcgctagtaccaatagttagttgctcggcgagagctcggtaaggactagccatttggaagctcgtagtactcaggttgtggtacaggagatctaacactcctacacaaatgcatgtcgtgcttatttcgtaccaaactggtctggcggcggttcttcgtccagacgctggcgggccagggtggaggtagtaacacagctcccattccccatgtagccgcgccctctccttcccctgggcgtctccggggcgtggacaggccgctgaaaggaaccggtctgcggcctgtgtgaggctccgcgggccgctgcactgcgaggccgacgcagctggagagaagttaggcaggtcctagggagggcaggctcgagtgctgggcccgcctccccgcgggactgtaggcccgggggctccgcctcgtcgcagcggcaggtaggaggcggtgcgcgcggcccggcgacgggggatcctgaggcccggtcagtctcttgctctggggtcttgggtggcgggcggcacctccgcttgcagtgccggagccgcggccccgctcggaaaagggctgccgtcggagttagatgccggggactccgggccgtcccagcccccgggcctcagctccggcccgggcagagtcgctgcttccgcgtttggttcttttttccccgctgggagtgagaacaaggcgtccccttctactcacgtttgccaaaagcgggtccgacgtgttagcggaaaagtgggtggagtttctctttttgccggtgcagagagaacttgtggcgggaagttggggcgcggggttggccgtaggtccccggcgtgctaagggcggacggaccaggcggctgggccgcgctgcttctcgttaccttccgcagggtcaggggccgcggcggggttggaggtcagcccaggcacatgttaacccctgggtaccagtttgctcggaaactcgtgttgaggac

SEQ ID NO: 379179 - DNA, 2547 bp, Homo sapiens
ggtgttaaattatcctacgattaatggcagaaataggtcctgaaccaatatgcctttgagaacttaaacgcggtgagttacatacaggccctcctaactggagtcttcgctagtaccaatagttagttgctcggcgagagctcggtaaggactagccatttggaagctcgtagtactcaggttgtggtacaggagatctaacactcctacacaaatgcatgtcgtgcttatttcgtaccaaactggtctggcggcggttcttcgtccagacgctggcgggccagggtggaggtagtaacacagctcccattccccatgtagccgcgccctctccttcccctgggcgtctccggggcgtggacaggccgctgaaaggaaccggtctgcggcctgtgtgaggctccgcgggccgctgcactgcgaggccgacgcagctggagagaagttaggcaggtcctagggagggcaggctcgagtgctgggcccgcctccccgcgggactgtaggcccgggggctccgcctcgtcgcagcggcagaagtgatgccaccaaaaagaaatgaaaaatacaaacttcctattccatttccagaaggcaaggttctggatgatatggaaggcaatcagtgggtactgggcaagaagattggctctggaggatttggattgatatatttagctttccccacaaataaaccagagaaagatgcaagacatgtagtaaaagtggaatatcaagaaaatggcccgttattttcagaacttaaattttatcagagagttgcaaaaaaagactgtatcaaaaagtggatagaacgcaaacaacttgattatttaggaattcctctgttttatggatctggtctgactgaattcaagggaagaagttacagatttatggtaatggaaagactaggaatagatttacagaagatctcaggccagaatggtacctttaaaaagtcaactgtcctgcaattaggtatccgaatgttggatgtactggaatatatacatgaaaatgaatatgttcatggtgatataaaagcagcaaatctacttttgggttacaaaaatccagaccaggtttatcttgcagattatggactttcctacagatattgtcccaatgggaaccacaaacagtatcaggaaaatcctagaaaaggccataatgggacaatagagtttaccagcttggatgcccacaagggagtagccttgtccagacgaagtgacgttgagatcctcggctactgcatgctgcggtggttgtgtgggaaacttccctgggaacagaacctgaaggaccctgtggctgtgcagactgctaaaacaaatctgttggacgagctcccccagtcagtgcttaaatgggctccttctggaagcagttgctgtgaaatagcccaatttttggtatgtgctcatagtttagcatatgatgaaaagccaaactatcaagccctcaagaaaattttgaaccctcatggaatacctttaggaccactggacttttccacaaaaggacagagtataaatgtccatactccaaacagtcaaaaagttgattcacaaaaggctgcaacaaagcaagtcaacaaggcacacaataggttaatcgaaaaaaaagtccacagtgagagaagcgctgagtcctgtgcaacatggaaagtgcagaaagaggagaaactgattggattgatgaacaatgaagcagctcaggaaagcacaaggagaagacagaaatatcaagagtctcaagaacctttgaatgaagtaaacagtttcccacaaaaaatcagctatacacaattcccaaactcattttatgagcctcatcaagattttaccagtccagatatattcaagaagtcaagatctccatcttggtataaatacacttccacagtcagcacggggatcacagacttagaaagttcaactggactttggcctacaatttcccagtttactcttagtgaagagacaaacgcagatgtttattattatcgcatcatcatacctgtccttttgatgttagtatttcttgctttattttttctctgaagatgataccaaaattccttttgataattttttaagtttccagctcttcaccgaaatgttgtattcttatttcagtgtttccttccagacatttttaaggtaattggctttaaaaagagaacatattttaacaaagtttgtggacactctaaaaaataaaattgctttgtactagaaaaaaaacatacacttaaagatgcgccaagcaaccgcaaacccggcagcaaatcgcgcgcggtcgcatccactgtcgccccgagccgccctgcctcgcgggagcgtggtcccgggcgcggcccggcgagccgcacgcgctcgtctcgcgctcgcccgcctctccgtatcaggcggcgcaggcgcgagacgagaaagagcgcggggtcttagaggcgcaggccaggacaaacgcatctctgggctcattcgagatgtcggttactggaggccggggggaagcgagtgttgggtgcggtggggg

SEQ ID NO: 379180 - DNA, 2854 bp, Homo sapiens
ggtgttaaattatcctacgattaatggcagaaataggtcctgaaccaatatgcctttgagaacttaaacgcggtgagttacatacaggccctcctaactggagtcttcgctagtaccaatagttagttgctcggcgagagctcggtaaggactagccatttggaagctcgtagtactcaggttgtggtacaggagatctaacactcctacacaaatgcatgtcgtgcttatttcgtaccaaactggtctggcggcggttcttcgtccagacgctggcgggccagggtggaggtagtaacacagctcccattccccatgtagccgcgccctctccttcccctgggcgtctccggggcgtggacaggccgctgaaaggaaccggtctgcggcctgtgtgaggctccgcgggccgctgcactgcgaggccgacgcagctggagagaagttaggcaggtcctagggagggcaggctcgagtgctgggcccgcctccccgcgggactgtaggcccgggggctccgcctcgtcgcagcggcaggtaggaggcggtgcgcgcggcccggcgacgggggatcctgaggcccggtcagtctcttgctctggggtcttgggtggcgggcggcacctccgcttgcagtgccggagccgcggccccgctcggaaaagggctgccgtcggagttagatgccggggactccgggccgtcccagcccccgggcctcagctccggcccgggcagagtcgctgcttccgcgtttggttcttttttccccgctgggagtgagaacaaggcgtccccttctactcacgtttgccaaaagcgggtccgacgtgttagcggaaaaaagtgatgccaccaaaaagaaatgaaaaatacaaacttcctattccatttccagaaggcaaggttctggatgatatggaaggcaatcagtgggtactgggcaagaagattggctctggaggatttggattgatatatttagctttccccacaaataaaccagagaaagatgcaagacatgtagtaaaagtggaatatcaagaaaatggcccgttattttcagaacttaaattttatcagagagttgcaaaaaaagactgtatcaaaaagtggatagaacgcaaacaacttgattatttaggaattcctctgttttatggatctggtctgactgaattcaagggaagaagttacagatttatggtaatggaaagactaggaatagatttacagaagatctcaggccagaatggtacctttaaaaagtcaactgtcctgcaattaggtatccgaatgttggatgtactggaatatatacatgaaaatgaatatgttcatggtgatataaaagcagcaaatctacttttgggttacaaaaatccagaccaggtttatcttgcagattatggactttcctacagatattgtcccaatgggaaccacaaacagtatcaggaaaatcctagaaaaggccataatgggacaatagagtttaccagcttggatgcccacaagggagtagccttgtccagacgaagtgacgttgagatcctcggctactgcatgctgcggtggttgtgtgggaaacttccctgggaacagaacctgaaggaccctgtggctgtgcagactgctaaaacaaatctgttggacgagctcccccagtcagtgcttaaatgggctccttctggaagcagttgctgtgaaatagcccaatttttggtatgtgctcatagtttagcatatgatgaaaagccaaactatcaagccctcaagaaaattttgaaccctcatggaatacctttaggaccactggacttttccacaaaaggacagagtataaatgtccatactccaaacagtcaaaaagttgattcacaaaaggctgcaacaaagcaagtcaacaaggcacacaataggttaatcgaaaaaaaagtccacagtgagagaagcgctgagtcctgtgcaacatggaaagtgcagaaagaggagaaactgattggattgatgaacaatgaagcagctcaggaaagcacaaggagaagacagaaatatcaagagtctcaagaacctttgaatgaagtaaacagtttcccacaaaaaatcagctatacacaattcccaaactcattttatgagcctcatcaagattttaccagtccagatatattcaagaagtcaagatctccatcttggtataaatacacttccacagtcagcacggggatcacagacttagaaagttcaactggactttggcctacaatttcccagtttactcttagtgaagagacaaacgcagatgtttattattatcgcatcatcatacctgtccttttgatgttagtatttcttgctttattttttctctgaagatgataccaaaattccttttgataattttttaagtttccagctcttcaccgaaatgttgtattcttatttcagtgtttccttccagacatttttaaggtaattggctttaaaaagagaacatattttaacaaagtttgtggacactctaaaaaataaaattgctttgtactagaaaaaaaacatacacttaaagatgcgccaagcaaccgcaaacccggcagcaaatcgcgcgcggtcgcatccactgtcgccccgagccgccctgcctcgcgggagcgtggtcccgggcgcggcccggcgagccgcacgcgctcgtctcgcgctcgcccgcctctccgtatcaggcggcgcaggcgcgagacgagaaagagcgcggggtcttagaggcgcaggccaggacaaacgcatctctgggctcattcgagatgtcggttactggaggccggggggaagcgagtgttgggtgcggtggggg

SEQ ID NO: 379181 - DNA, 2903 bp, Homo sapiens
ggtgttaaattatcctacgattaatggcagaaataggtcctgaaccaatatgcctttgagaacttaaacgcggtgagttacatacaggccctcctaactggagtcttcgctagtaccaatagttagttgctcggcgagagctcggtaaggactagccatttggaagctcgtagtactcaggttgtggtacaggagatctaacactcctacacaaatgcatgtcgtgcttatttcgtaccaaactggtctggcggcggttcttcgtccagacgctggcgggccagggtggaggtagtaacacagctcccattccccatgtagccgcgccctctccttcccctgggcgtctccggggcgtggacaggccgctgaaaggaaccggtctgcggcctgtgtgaggctccgcgggccgctgcactgcgaggccgacgcagctggagagaagttaggcaggtcctagggagggcaggctcgagtgctgggcccgcctccccgcgggactgtaggcccgggggctccgcctcgtcgcagcggcaggtaggaggcggtgcgcgcggcccggcgacgggggatcctgaggcccggtcagtctcttgctctggggtcttgggtggcgggcggcacctccgcttgcagtgccggagccgcggccccgctcggaaaagggctgccgtcggagttagatgccggggactccgggccgtcccagcccccgggcctcagctccggcccgggcagagtcgctgcttccgcgtttggttcttttttccccgctgggagtgagaacaaggcgtccccttctactcacgtttgccaaaagcgggtccgacgtgttagcggaaaaaagtgatgccaccaaaaagaaatgaaaaatacaaacttcctattccatttccagaaggcaaggttctggatgatatggaaggcaatcagtgggtactgggcaagaagattggctctggaggatttggattgatatatttagctttccccacaaataaaccagagaaagatgcaagacatgtagtaaaagtggaatatcaagaaaatggcccgttattttcagaacttaaattttatcagagagttgcaaaaaaagactgtagtaagtaaaattagcaaagcaagctacttccatatatgtgcttgctaaatcaaaaagtggatagaacgcaaacaacttgattatttaggaattcctctgttttatggatctggtctgactgaattcaagggaagaagttacagatttatggtaatggaaagactaggaatagatttacagaagatctcaggccagaatggtacctttaaaaagtcaactgtcctgcaattaggtatccgaatgttggatgtactggaatatatacatgaaaatgaatatgttcatggtgatataaaagcagcaaatctacttttgggttacaaaaatccagaccaggtttatcttgcagattatggactttcctacagatattgtcccaatgggaaccacaaacagtatcaggaaaatcctagaaaaggccataatgggacaatagagtttaccagcttggatgcccacaagggagtagccttgtccagacgaagtgacgttgagatcctcggctactgcatgctgcggtggttgtgtgggaaacttccctgggaacagaacctgaaggaccctgtggctgtgcagactgctaaaacaaatctgttggacgagctcccccagtcagtgcttaaatgggctccttctggaagcagttgctgtgaaatagcccaatttttggtatgtgctcatagtttagcatatgatgaaaagccaaactatcaagccctcaagaaaattttgaaccctcatggaatacctttaggaccactggacttttccacaaaaggacagagtataaatgtccatactccaaacagtcaaaaagttgattcacaaaaggctgcaacaaagcaagtcaacaaggcacacaataggttaatcgaaaaaaaagtccacagtgagagaagcgctgagtcctgtgcaacatggaaagtgcagaaagaggagaaactgattggattgatgaacaatgaagcagctcaggaaagcacaaggagaagacagaaatatcaagagtctcaagaacctttgaatgaagtaaacagtttcccacaaaaaatcagctatacacaattcccaaactcattttatgagcctcatcaagattttaccagtccagatatattcaagaagtcaagatctccatcttggtataaatacacttccacagtcagcacggggatcacagacttagaaagttcaactggactttggcctacaatttcccagtttactcttagtgaagagacaaacgcagatgtttattattatcgcatcatcatacctgtccttttgatgttagtatttcttgctttattttttctctgaagatgataccaaaattccttttgataattttttaagtttccagctcttcaccgaaatgttgtattcttatttcagtgtttccttccagacatttttaaggtaattggctttaaaaagagaacatattttaacaaagtttgtggacactctaaaaaataaaattgctttgtactagaaaaaaaacatacacttaaagatgcgccaagcaaccgcaaacccggcagcaaatcgcgcgcggtcgcatccactgtcgccccgagccgccctgcctcgcgggagcgtggtcccgggcgcggcccggcgagccgcacgcgctcgtctcgcgctcgcccgcctctccgtatcaggcggcgcaggcgcgagacgagaaagagcgcggggtcttagaggcgcaggccaggacaaacgcatctctgggctcattcgagatgtcggttactggaggccggggggaagcgagtgttgggtgcggtggggg

SEQ ID NO: 379182 - DNA, 1499 bp, Homo sapiens
cagaggctgaggaagaattgggacctagcttggcctggtttatcttgcagattatggactttcctacagatattgtcccaatgggaaccacaaacagtatcaggaaaatcctagaaaaggccataatgggacaatagagtttaccagcttggatgcccacaagggagtagccttgtccagacgaagtgacgttgagatcctcggctactgcatgctgcggtggttgtgtgggaaacttccctgggaacagaacctgaaggaccctgtggctgtgcagactgctaaaacaaatctgttggacgagctcccccagtcagtgcttaaatgggctccttctggaagcagttgctgtgaaatagcccaatttttggtatgtgctcatagtttagcatatgatgaaaagccaaactatcaagccctcaagaaaattttgaaccctcatggaatacctttaggaccactggacttttccacaaaaggacagagtataaatgtccatactccaaacagtcaaaaagttgattcacaaaaggctgcaacaaagcaagtcaacaaggcacacaataggttaatcgaaaaaaaagtccacagtgagagaagcgctgagtcctgtgcaacatggaaagtgcagaaagaggagaaactgattggattgatgaacaatgaagcagctcaggaaagcacaaggagaagacagaaatatcaagagtctcaagaacctttgaatgaagtaaacagtttcccacaaaaaatcagctatacacaattcccaaactcattttatgagcctcatcaagattttaccagtccagatatattcaagaagtcaagatctccatcttggtataaatacacttccacagtcagcacggggatcacagacttagaaagttcaactggactttggcctacaatttcccagtttactcttagtgaagagacaaacgcagatgtttattattatcgcatcatcatacctgtccttttgatgttagtatttcttgctttattttttctctgaagatgataccaaaattccttttgataattttttaagtttccagctcttcaccgaaatgttgtattcttatttcagtgtttccttccagacatttttaaggtaattggctttaaaaagagaacatattttaacaaagtttgtggacactctaaaaaataaaattgctttgtactagaaaaaaaacatacacttaaagatgcgccaagcaaccgcaaacccggcagcaaatcgcgcgcggtcgcatccactgtcgccccgagccgccctgcctcgcgggagcgtggtcccgggcgcggcccggcgagccgcacgcgctcgtctcgcgctcgcccgcctctccgtatcaggcggcgcaggcgcgagacgagaaagagcgcggggtcttagaggcgcaggccaggacaaacgcatctctgggctcattcgagatgtcggttactggaggccggggggaagcgagtgttgggtgcggtggggg

SEQ ID NO: 379183 - DNA, 331 bp, Homo sapiens
gccgcatactgggcagaacgctggggccaaaaatccacaggtttctctctccatccctgctggtttctagtcccccctccccctcttccctcccaggcttaatcatattttggaacgggtgaggtcttttgttgggtgggcaccccctgattgcttgtctgtttattttttaatgtgcaactaatttgatttgaatttccttcagtttccaggccttcctagggaaagctaagggagagggaatatgctttttaaaaatcgttttctttctttctttctttctttctttctttttctttctttctttctccttctctctccttccttcctt

SEQ ID NO: 379184 - DNA, 558 bp, Homo sapiens
cgatggaaaagtctggtttgattgttaaagtaaaatatttggcctttcagagtgtgaaaacaccattgcttcattgcaaggtttaatataaacccatttttcttgcattttcttttctttcttttgtagtaaaatgtgcttgaataatattaactattctgaccattatgtgaactaaatatatatatatataaaatgatgataccttccgctcatttgcaatgtgcttttgaatacattatataatttaatccttaaaacagccctataaatctgttttttttttttttaaacaaaaaattctgctttacaaaggaagaagttgagactcagtaaaattaagtgaccatcccagagtctcagccacttaagagtagggtgaatcttggataattctggtagcaaatttatttattggtagaaaataaatgcaaactactactgcttaagatcctctaaagtttttctcttggaaaaagaatgtattagaattgtggactttctcagtgcaaggatttatttatccttggaattaggcagaataaacaattgaatgcc

SEQ ID NO: 379185 - DNA, 413 bp, Homo sapiens
attcccgctgtgccctacattgacactatcaggccagggaaactgaacccccaaaccttcattaagcagtaaccttctggagaagaaaccttttgatggctgatctggaagaaccttgagagttcagtgtatgtggactttaaagaatgtttgggccgggcatggtggctgacacctggaataccagcacttggggaggccgaggtgggtggatcacctgagctcaggagtttgaaaccagcctgagttacatggcgaaaccctgtctctacaaaaaatacaaaaattggctggatgtggtggcacacgcctgtaatcctaactactcgggaggctgaggtgggaggaccgcttaagcctgggaggtggaggtagcaggatcatgccattgcactccagcctgggtgacagag

SEQ ID NO: 379186 - DNA, 288 bp, Homo sapiens
gtgcataatgtataaaagtaaaacaataaactcagccctatgtctcagtcagggctgcagcttcataaataaagggtgagaggaaataaattaaggaaggagtagggctcagcgcataaataaggtgtggggtgtcaggtggactcagggtgggttgacgttctcagacacaggttcccatcggccacatatttgaggtctcgcgtgaggaggcggaagaggttgaaggtgacagatgcctccaggcagccagcggactcctgtaggggaggaggggatgggtcaggg

SEQ ID NO: 379187 - DNA, 633 bp, Homo sapiens
ccctaggccactttttctaacagaggaaacaaatggtccagcagtcgttcccagcagaacagcggacctggactgacacccagtgggaccagtgttgccacaccagttgataaaatgcagaaacccttctgtactcgttggtaaatatctactcccccaagtgactccaggtgccccccaccgcctggcacttcccccaggactcctacgatctggttactgcctggccgatccaaggctgtggagtcccagagccagcagttcactggtgctcattccacactggttagatacttcagttgtcacccctgggaagattctcccacctcctccctttgatggaaccaccctccccagaggctgcattgaggagactccacagactgaaaagtgagtttgcagaaaccttggggaaaagggccctttcaaagaagtggataagagggaggagatcattgagtgacccagaaagctcttttgaaaagacagactcctcaaggagagataaagaggaaagcacctctttcattttttagtgtgagctaattccatcagactgctgtcctcctggacccatctgagatgtgcagtagcaaggagaggggggatcattttagagagtgggtcattggc

SEQ ID NO: 379188 - DNA, 614 bp, Homo sapiens
tgtccctagactctgccagctcgtgcatgtagaagctcccgggaaaactgtcaacctgtgcacattcaagaccgccatatacttgttattgaaaagccatcagtcatgtgagcagaacttttttatggttgagattgtccccagggaaacccgccttgcaattcagaccttccacggagatcgattccaaactctcatcccgttcccacttcctcgttcccatggaggctgcggttctctctctctgtgccgcttacagattgtcatacctatttccaaaaatgacacagaaaacttcaacgtgtggctaaatttgaacagagaaaaataagcaaagaattcaaggcgcgaggcgttttcagggagagagggagagcttttgcatggtttgaagggatgatctttaatgagttgagggtcacctagaatagaattaaactgtagagagcaaattgttggaaatgcaaggagaaacttcggagaagactccaacacagcctggatctgggagatgagactcaggtaacaaaaagtttgaataacatggttaataagattgtggtaacagataggactgaactttgcactctgcaaacaatatacattttaaagtg

SEQ ID NO: 379189 - DNA, 103 bp, Homo sapiens
tgtagtccaggactagtttagaaatcagatatttctaaattacctgatttagattatctgatttaaattatctgattatcattaaaaacaaatgatatttgtt

SEQ ID NO: 379190 - DNA, 396 bp, Homo sapiens
gggactagattatcgagttaaatttctcatgaatagtttagtaccatccccttggtactgttctcacaatagcgagtgagtgctctcaagatctggtcatttaaaagtgtggcatctcacatgtacacacaaacatataccatatatagcaacatttgcagtccaaaagaaatataaagaacagtagagatgcaatgttaaatcataactgcataaaattaactgtagtatatactgtactactgtaacaattttgtagccacctcctgttgctattgttgtgagcccaggtgttgtgggcatctgcttagaactgcatgggacactaatcatctctgcatgagtagtttgtctctccagtaaattgcatatcacaataaaaagtgatctcttgca

SEQ ID NO: 379191 - DNA, 274 bp, Homo sapiens
tctgatatcgtcctattttcttggtttctgatttgttttctttctttctcccttgactataatctccatgaaaacaaaacaaaactaaaaacaaagctgtatttatcatgttcactggggcatcccccaaatctaagataagtggtactcaaatatcttcatataaatacatcattaagtgttgcactacatgtgtatgttgccttcttccggcactggaaaatgttcatacccttccaacggataagtaatcacacttatgatttccaaaaat

SEQ ID NO: 379192 - DNA, 366 bp, Homo sapiens
ttagtagcccaaagaactcccctagagaggaagaaatggaagaaatggcaaaacaaaaaaaggcaactgcatgagcaaagcaagagggaacgttagcttcctccaagtttagaccagaagcagaaatgaaaattgagttactgaactcaattcatgtcttaaaagttagagccacagacacaatcagagttctccttgtggaagaaaggaaaggaaacctgttttcccagcctcatctattgacccttcattcattctggagccaggttggaatcaatagtgtcttgtttggtttgaaatccttagaaaagggaatccaactcccaactgtagctacagagcttatttcagaagagcattagcatg

SEQ ID NO: 379193 - DNA, 775 bp, Homo sapiens
caatgcaatagaaaagtgagccatgttaaacaggcaaaattcattttaataatatattttatttaaccccattgtatctaaaatattgtatcagtgtgtaatcagtattttaaaattgtgggttttcacattctttttgtactacatttccaaaatcctgtgtactttacatttaacagcatatctcagttcatacgttttcatcagaaatacttgatctgtatttagatttcataaatttacagttgacaaagtagattcctgtaatacccagattgtttcaaacacacctagggactttccagtaactgcattgagtatctgggctttgcaattaacttttaaattttatttaattttaattaatttaaaacaaggcattttaatttaaaattaagatgcagttggggagctgaatgttaaattgtatttaatttggattcatgttctcagtcacactggccataattcaggggcacggtagccatatgtggttagcagccgccctattggacagcatagcactgcaccacctggtcttgctgcattaagaaatgagatggcttcattggcttactgccctcacgtgtgagggcaacttcctacttctgtcagtgagatttcttttgtgctgccatgagcccaaggtagccctcagggccccagatttgaccagatctctaagccaacttttctcttagagtcttaagactgaaattaactgatctttgaaacagaacccatcaattcatacattctacttcccatgctttaa

SEQ ID NO: 379194 - DNA, 465 bp, Homo sapiens
gaactacctgttgatttgctcctcaggactcctaaaatacatcatttagtctcaaatgtgtgttgtgtgtgtgtgtgtgtgtgtgtgtgtgtgtgtgtgtgtctactatctatacagataaatattttagagacaaggtctcactctgtctcagggtcaccaagactagaatggagaggcatgatcatagctcactgcagccttgaagtcctgggctcatgtcatcctcccacctgagccgcctgagtagctgggactacaggcgcatgccattgtgtctggctaatttttgttattttttttgtagagacaagtacttgttttgttgcccaggctggtctcaaactgctgacttcaagcaaccctcctaccctgacttcccaaactttgtttatatttttgatagaaaaaatagtatgtgtatttttgattaataaaaaatgaaaataagcccaaaaccagtaa

SEQ ID NO: 379195 - DNA, 741 bp, Homo sapiens
taggtaaattttgacatatttaggttctcaataggggctatacttaattaatacctctggaaggaaggagggaggaaggtgcaggctcagtattttgatcctttaaaatataaacatacaattttgataagtctatttaaattcgggaatatcagtttgcaaatagtgtttaacctgaattttctttatgaaattaattcactccattctttttgtttttttttggagacagagtcttgctctgttgcccaggctggagtgcagtagcgtgatctcagcttactgcaacctccacctcccgggttcaagcgattgtcctgcctcagcctaccaagtagctgggactacaggcatgcaacaccatgcccggctaattttttttttttttttttttttagtagagacggggtttcaccatgttggccaggctggtctcaagctcctgacctcacgtgatccgcccacctcagcctcccaaagtgctgggattacaggcctgagccaccatgccctaattcactccattctggaatgccagttccatggaataaacgtatgctgtagaatgaaattcatctgaatagtttacaattgatcttttctattgcaatagaagagaatataaaagaacggttaaatgcaaaatgagtaagaaacctaaaactcaggtttgagcttcttacctaaactatgtgaccttgaacaaataaatcatttaacccaactgaatttactcacctg

SEQ ID NO: 379196 - DNA, 397 bp, Homo sapiens
agaaactgagcagggaactgctttcaataacatcataaaagatagtgttttcctttatggagcagcaggagccgtggtgggatgatttagaaggtctttcatggaaataccagagagttagcagcgagctatgggaagacatagtcagaggccgtgaaacctggacccggtgtcacactgtagtcattagaagaggagtaaagtggaggacaataatggaacaggcagagctggggcaatttcagtggtgagggtcggtgtttgatttggaagtggagtctcatctgggatccaccactccctttatttgctaagagactttaagaaattaacagcctctctgagccttagtttcttcatatctaaaatgaaagtaatgatattcacctgacagcat

SEQ ID NO: 379197 - DNA, 248 bp, Homo sapiens
gttctcatgatagtgagtttcatgagctctgatggttttataagtgtttgacagtttctccttcacacactctcctgctgccttgtgaagaggctgtctacttccccttcagccatgattgtaagtttcctgaggcctccctagccatgtggaactgagagtcagttaaacttcctttgtttataaattatccaatcttgggtagtatctttatagcaatgtgagaatgggctaacacaccctctatc

SEQ ID NO: 379198 - DNA, 1209 bp, Homo sapiens
tgagccgagatcacatcactgcactccagcctggcaactgagaaagactctgtctcaaaaggaaaaaaaaaaaaaaaaaaaaaaaagaaaatgataagtctttattatgggacattaagaaaaacctaaatatcatgttcaaagtgattttggggaaacttgataaactaatgctaaaataaaggaacagtggtctcagaagacccaagacatccctggaaaagaacttttcctctagatatggaaacttgtaaagccatcttaattcctataggtttattttgtcaatgcagaatacaaaagttgaacagaacagagagcccagaaacagaccccacatgtgtatgaaaacatgtatatggaagatgacagatagcattactgatttatgccccatgcaaatctatttcagattgattaaagacttagggaaaccctatggtagaagaaatataggcagataactttatgactgcagggagggaactatttctaaaatcaagaatttctatttattaaaagttagtgaaagaataatccccaacttggaaaagacttttaccatgtatataactgacaaaggattagcatgagatatataaagaattaatatgaatcaataagagaatgatcccaccctgtccttggggcccgtggaacactgtgctagcaggctgaacaattttgcgggaatatgggaatttttctttggacgcagtcatctcattcctatgaatgtatccaaatggagcctccccctagaaagagagggggtatttgattaaagatgcatattgcagcagtgcagcaaaagtactgaagctttcatagtgtccactagtagcaggtaacaagtcctgcttggatactactctaagtacaggacacccactcaatggaataatatggagtcatcttataattatgaagacttgtcatgacatggcatcatattaagcagagcacaactcaaaattgtatcagtgttgtataaaaattatgaatcggcagaaatgtggaaaaaggaaaacttgtaatttgttcaaagagagtcttgttttttgtttttttttttggactgtcttggtacagttatgatttgtgaagtaaataagaaatacaactcagttgaaaaatggcagaagtcagataattcaaaagtaatattaataaaaatttctcagaagggaaaacactgtggctaaaagt

SEQ ID NO: 379199 - DNA, 415 bp, Homo sapiens
tgacacatattttcataagtcactggcagctataattccactgtaattgtttggctgtaattcttctacagctggaaaagaagtgcctgctctcaactcaagaaccaatggcatcatcagtggaattcaaaggaagtcccatgattctaaatgattctcatcttggtatttaaagaaacagcctgcaatctctgacacaacaggaacgggcatgacacaaacagacagaaagaaggaaatttacagctgcgttagataccaagtgtgaggcaacaggcgaactctgtatagctaatttacttgtagtttatgaagtcaaaatgcattcaggatttgtgtgctgaagacaattagacgagtgattgtgtcttccttctgtacccagcaaggatttataaaatcaacagtcacagtt

SEQ ID NO: 379200 - DNA, 2605 bp, Homo sapiens
gagcgggccgtcccacgtggacctgagccgcgccggtcgcgcgcccgccagcctgccgcctgggctgggggtcacgaaaggaaaccttacagaaacatgaagccctcaaccatctgctactcagttattcggggctgacggcggcttctagaacatccaggtgttctgcagatgcgagaactcatcctgtagtcaccagatggagtcccaaacagccaagcagatgtaaggcctgtgctgtggctctgaggccctgaatacagaagggtcactttcttagtggccaaagagcagttgttgacattgatgtctaattattgaacacgaccagtcattttactgagctgcggtgaggaaacactgaccatagaagatcaagccaaatgagggattgcaaatttcctgattcttttgaattaggattccagatgggggcctcatttctacagcccccaacattcctatagccgttatcactgccatcaccactgccaccagcatcttcttgcagattccacccctgctccccagagacttcctgctttgaaagtgagcagaaaggaagctctcagaaaaatctctagtggtggctgccgtcgctccagacaatcggaatcctgccttcaccaccatgggctggctttttctaaaggttttgttggcgggagtgagtttctcaggatttctttatcctcttgtggatttttgcatcagtgggaaaacaagaggacagaagccaaactttgtgattattttggccgatgacatggggtggggtgacctgggagcaaactgggcagaaacaaaggacactgccaaccttgataagatggcttcggagggaatgaggtttgtggatttccatgcagctgcctccacctgctcaccctcccgggcttccttgctcaccggccggcttggccttcgcaatggagtcacacgcaactttgcagtcacttctgtgggaggccttccgctcaacgagaccaccttggcagaggtgctgcagcaggcgggttacgtcactgggataataggcaaatggcatcttggacaccacggctcttatcaccccaacttccgtggttttgattactactttggaatcccatatagccatgatatgggctgtactgatactccaggctacaaccaccctccttgtccagcgtgtccacagggtgatggaccatcaaggaaccttcaaagagactgttacactgacgtggccctccctctttatgaaaacctcaacattgtggagcagccggtgaacttgagcagccttgcccagaagtatgctgagaaagcaacccagttcatccagcgtgcaagcaccagcgggaggcccttcctgctctatgtggctctggcccacatgcacgtgcccttacctgtgactcagctaccagcagcgccacggggcagaagcctgtatggtgcagggctctgggagatggacagtctggtgggccagatcaaggacaaagttgaccacacagtgaaggaaaacacattcctctggtttacaggagacaatggcccgtgggctcagaagtgtgagctagcgggcagtgtgggtcccttcactggattttggcaaactcgtcaagggggaagtccagccaagcagacgacctgggaaggagggcaccgggtcccagcactggcttactggcctggcagagttccagttaatgtcaccagcactgccttgttaagcgtgctggacatttttccaactgtggtagccctggcccaggccagcttacctcaaggacggcgctttgatggtgtggacgtctccgaggtgctctttggccggtcacagcctgggcacagggtgctgttccaccccaacagcggggcagctggagagtttggagccctgcagactgtccgcctggagcgttacaaggccttctacattaccggtggagccagggcgtgtgatgggagcacggggcctgagctgcagcataagtttcctctgattttcaacctggaagacgataccgcagaagctgtgcccctagaaagaggtggtgcggagtaccaggctgtgctgcccgaggtcagaaaggttcttgcagacgtcctccaagacattgccaacgacaacatctccagcgcagattacactcaggacccttcagtaactccctgctgtaatccctaccaaattgcctgccgctgtcaagccgcataacagaccaatttttattccacgaggaggagtacctggaaattaggcaagtttgcttccaaatttcatttttaccctctttacaaacacacgctttagtttagtcttggagtttagttttggagttagccttgcatatcccttctgtatcctgtccctcctccacgccgacccgagagcagctgagctgcgctggctctgggcagggagtgtgccttaatgggaagcacacgggctttggagtcaggcacaggtgccagctccagcttttgaacttgggcaattgtttaacctaacctgcaagttgattttgagggttaaataaaggcatacatgaaaatgcctggcaaattacctgacacagagcagacattcaatacattttagtttccttgtttc

SEQ ID NO: 379201 - DNA, 3423 bp, Homo sapiens
ggagagttggaacattgacttgatgctgaagaagcctttcttcaaagacagctgagggtcacctgcatcagaacccttggaaatacttgtaaaacaagtgctgttccaccccaacagcggggcagctggagagtttggagccctgcagactgtccgcctggagcgttacaaggccttctacattaccggtggagccagggcgtgtgatgggagcacggggcctgagctgcagcataagtttcctctgattttcaacctggaagacgataccgcagaagctgtgcccctagaaagaggtggtgcggagtaccaggctgtgctgcccgaggtcagaaaggttcttgcagacgtcctccaagacattgccaacgacaacatctccagcgcagattacactcaggacccttcagtaactccctgctgtaatccctaccaaattgcctgccgctgtcaagccgcataacagaccaatttttattccacgaggaggagtacctggaaattaggcaagtttgcttccaaatttcatttttaccctctttacaaacacacgctttagtttagtcttggagtttagttttggagttagccttgcatatcccttctgtatcctgtccctcctccacgccgacccgagagcagctgagctgcgctggctctgggcagggagtgtgccttaatgggaagcacacgggctttggagtcaggcacaggtgccagctccagcttttgaacttgggcaattgtttaacctaacctgcaagttgattttgagggttaaataaaggcatacatgaaaatgcctggcaaattacctgacacagagcagacattcaatacattttagtttccttgtttctctggttcccagtttctctggtcattttggtgtaaatccattctaattagtatttagggcagagcttctctctcttttctctttttttccttccacaaaccagtgtactcactggtctccatctttaatatgcaaacaaatcacctgggatcttgtgagaatccggattccgtctcagtagggctcgagtagatcctgaaatcctacatttctatcaaacaatgccttgaggagcacagatttagaccaaagttaggtcgttttccagatctcagagcagacgagtccatggataagtctgtggcccaatccccttcctctccttttaagggtgaaatgactgcatttaaaagaagttaaagagttcctcctgtcccctataaccacaaggaaacaaaaaaatatataaaaacctcaaaaatgcattgccatgattttattattagtgtccaaaatgggactcccaagtaataaatgatttattccagccacagccaaaaaagactttgcctggctaaaagagtctctctctaagtatgtaatatacaagaaatacaattcaaagagatgttcctataagtacattttttacacggcatatatttaaaaaggaggccccttttaatataaaattccggttatataccaatatggttaattagcatttacactatagtttgaacgtattttaaatagcatgatgtgtatacaatgtctcccgcgcccattggcaaccagggtcgtgggaagcttggtgaggagttaaccaggtcctgtggtttaagcagtggagcacccgggattcctgcccccctttctgctcacacaattgcactccattcttccgccttccttgttttctccaaaaccacctgataggggggatgtcctgatttctgaggtgtgcttctcatcatgactgcttcgttttgcccttctgatttccacggcacaagattatctaccaaaatcaaaacagaatggccttactcttctcaggaagaggctggtaggcaggtgcattatcaacaggtctgtgcccatgcagagtgagcagggagaggctgggcactgtggaatttttctgtctgaactcgctcatggccacagaatggtcacccagcttatttaggtgtagacaagtatgacacagttctagaaaatactgactataaaaatgtctctgtgtgtgtgtgtatgtatttatatgtatatgtatatatttttaaaaggctcatcttacttgtaaacatggactgctcaatcactattaaaaagtcagtttaggctgggcgcggtggctcacgcctgtagtcccagagctttgggaggctgaggtgggtggatcactgggtcaggagtttgagaccagcctggccaacatggtgaaaccccatcgctactaaaaaatacaaaaattagccgggcatggtggcgctcacctgtaatcccggctactcgggaggctgaggcaggagagaatcgcttgaaccggggaggtggaggctgcagtgagccgagatcgcaccactgcactccagcctgggtgatggagcaagactccatctcaaaaaaaaaaaagtcagtttaggctgggcgcagtggctcacacctgtagtcccagcactttaggaggctgaggggggtgatcacctgaggtcaggagtttgagaccagcctggccaacatggtgaaatcctgtctctgctaaaaatacaaaatttagctgggcatggtggcgtgcctgaaaccccagctacttgggaggctgaggcactagaatcgcttgagcctgggaggtggaggttgcagtgagtggagatcgcgccaacacattctagcctgagggacagagtgagactctatcatctcaaaaaaaaaaaaaaaaaaaaaaaagggaaggtcagtttatacccttgggcctgatttcctgactcttgctcacaagattgggactagtctcacaaaatacagagacttgtacaggttggcttgttcctgaaacaaaagcttctcatcctcccgaatgtagcagctttctaaggcaccagaaatgatcaagtctcttttctttcactgctctcagagcaaaagtaaatcccaaggaggcaagcgtgatcctacgcagggaagtgtcagtatgtgttctgaaaagatcactagtgatgacccgcgttcttaaggcagcggctcacagagctcctgtagcagactactcaggcaagcctatgtttgttcgtcactacaagagaggcgattttaaccaagctgagactccaagagccttttgtggtcctagaagattttaaggaatgtgagtaaagatgtgaattctgcacagagatttgcaataggcatgacaattcagaataaggagacagagaggaagttccctagcatccctcgctgaacatttctgccaattcaggcatgactgagatgggccatattgatagagcatcccaggagcatgcatgcctctggtccttacatggtgagatggagaagcctgcctgctactgagacagtgccttagtgggagcactgcccctcatcaccatcta

SEQ ID NO: 379202 - DNA, 3521 bp, Homo sapiens
tggttacctaatcaagcctgggcaatggcaggcgcccctcccccagcctcgctgccgccttgcagtttgatctcagactgctgtgctagcaatcagcgagactccgtgggcgtaggaccctccgagccagtgagatgaacccggtacctcagatggaaatgcagaaatcacccgtcttctgcgtcgctcaacgctgggagctgtagaccggagctgttcctattcggctatcttggctcctccccctggctgtgggtttcttatagatggcttttattacattgaggtggagccagggcgtgtgatgggagcacggggcctgagctgcagcataagtttcctctgattttcaacctggaagacgataccgcagaagctgtgcccctagaaagaggtggtgcggagtaccaggctgtgctgcccgaggtcagaaaggttcttgcagacgtcctccaagacattgccaacgacaacatctccagcgcagattacactcaggacccttcagtaactccctgctgtaatccctaccaaattgcctgccgctgtcaagccgcataacagaccaatttttattccacgaggaggagtacctggaaattaggcaagtttgcttccaaatttcatttttaccctctttacaaacacacgctttagtttagtcttggagtttagttttggagttagccttgcatatcccttctgtatcctgtccctcctccacgccgacccgagagcagctgagctgcgctggctctgggcagggagtgtgccttaatgggaagcacacgggctttggagtcaggcacaggtgccagctccagcttttgaacttgggcaattgtttaacctaacctgcaagttgattttgagggttaaataaaggcatacatgaaaatgcctggcaaattacctgacacagagcagacattcaatacattttagtttccttgtttctctggttcccagtttctctggtcattttggtgtaaatccattctaattagtatttagggcagagcttctctctcttttctctttttttccttccacaaaccagtgtactcactggtctccatctttaatatgcaaacaaatcacctgggatcttgtgagaatccggattccgtctcagtagggctcgagtagatcctgaaatcctacatttctatcaaacaatgccttgaggagcacagatttagaccaaagttaggtcgttttccagatctcagagcagacgagtccatggataagtctgtggcccaatccccttcctctccttttaagggtgaaatgactgcatttaaaagaagttaaagagttcctcctgtcccctataaccacaaggaaacaaaaaaatatataaaaacctcaaaaatgcattgccatgattttattattagtgtccaaaatgggactcccaagtaataaatgatttattccagccacagccaaaaaagactttgcctggctaaaagagtctctctctaagtatgtaatatacaagaaatacaattcaaagagatgttcctataagtacattttttacacggcatatatttaaaaaggaggccccttttaatataaaattccggttatataccaatatggttaattagcatttacactatagtttgaacgtattttaaatagcatgatgtgtatacaatgtctcccgcgcccattggcaaccagggtcgtgggaagcttggtgaggagttaaccaggtcctgtggtttaagcagtggagcacccgggattcctgcccccctttctgctcacacaattgcactccattcttccgccttccttgttttctccaaaaccacctgataggggggatgtcctgatttctgaggtgtgcttctcatcatgactgcttcgttttgcccttctgatttccacggcacaagattatctaccaaaatcaaaacagaatggccttactcttctcaggaagaggctggtaggcaggtgcattatcaacaggtctgtgcccatgcagagtgagcagggagaggctgggcactgtggaatttttctgtctgaactcgctcatggccacagaatggtcacccagcttatttaggtgtagacaagtatgacacagttctagaaaatactgactataaaaatgtctctgtgtgtgtgtgtatgtatttatatgtatatgtatatatttttaaaaggctcatcttacttgtaaacatggactgctcaatcactattaaaaagtcagtttaggctgggcgcggtggctcacgcctgtagtcccagagctttgggaggctgaggtgggtggatcactgggtcaggagtttgagaccagcctggccaacatggtgaaaccccatcgctactaaaaaatacaaaaattagccgggcatggtggcgctcacctgtaatcccggctactcgggaggctgaggcaggagagaatcgcttgaaccggggaggtggaggctgcagtgagccgagatcgcaccactgcactccagcctgggtgatggagcaagactccatctcaaaaaaaaaaaagtcagtttaggctgggcgcagtggctcacacctgtagtcccagcactttaggaggctgaggggggtgatcacctgaggtcaggagtttgagaccagcctggccaacatggtgaaatcctgtctctgctaaaaatacaaaatttagctgggcatggtggcgtgcctgaaaccccagctacttgggaggctgaggcactagaatcgcttgagcctgggaggtggaggttgcagtgagtggagatcgcgccaacacattctagcctgagggacagagtgagactctatcatctcaaaaaaaaaaaaaaaaaaaaaaaagggaaggtcagtttatacccttgggcctgatttcctgactcttgctcacaagattgggactagtctcacaaaatacagagacttgtacaggttggcttgttcctgaaacaaaagcttctcatcctcccgaatgtagcagctttctaaggcaccagaaatgatcaagtctcttttctttcactgctctcagagcaaaagtaaatcccaaggaggcaagcgtgatcctacgcagggaagtgtcagtatgtgttctgaaaagatcactagtgatgacccgcgttcttaaggcagcggctcacagagctcctgtagcagactactcaggcaagcctatgtttgttcgtcactacaagagaggcgattttaaccaagctgagactccaagagccttttgtggtcctagaagattttaaggaatgtgagtaaagatgtgaattctgcacagagatttgcaataggcatgacaattcagaataaggagacagagaggaagttccctagcatccctcgctgaacatttctgccaattcaggcatgactgagatgggccatattgatagagcatcccaggagcatgcatgcctctggtccttacatggtgagatggagaagcctgcctgctactgagacagtgccttagtgggagcactgcccctcatcaccatcta

SEQ ID NO: 379203 - DNA, 2424 bp, Homo sapiens
gagcgggccgtcccacgtggacctgagccgcgccggtcgcgcgcccgccagcctgccgcctgggctgggggtcacgaaaggaaaccttacagaaacatgaagccctcaaccatctgctactcagttattcggggctgacggcggcttctagaacatccaggtgttctgcagatgcgagaactcatcctgtagtcaccagatggagtcccaaacagccaagcagatgtaaggcctgtgctgtggctctgaggccctgaatacagaagggtcactttcttagtggccaaagagcagttgttgacattgatgtctaattattgaacacgaccagtcattttactgagctgcggtgaggaaacactgaccatagaagatcaagccaaatgagggattgcaaatttcctgattcttttgaattaggattccagatgggggcctcatttctacagcccccaacattcctatagccgttatcactgccatcaccactgccaccagcatcttcttgcagattccacccctgctccccagagacttcctgctttgaaagtgagcagaaaggaagctctcagaaaaatctctagtggtggctgccgtcgctccagacaatcggaatcctgccttcaccaccatgggctggctttttctaaaggttttgttggcgggagtgagtttctcaggatttctttatcctcttgtggatttttgcatcagtgggaaaacaagaggacagaagccaaactttgtgattattttggccgatgacatggggtggggtgacctgggagcaaactgggcagaaacaaaggacactgccaaccttgataagatggcttcggagggaatgaggtttgtggatttccatgcagctgcctccacctgctcaccctcccgggcttccttgctcaccggccggcttggccttcgcaatggagtcacacgcaactttgcagtcacttctgtgggaggccttccgctcaacgagaccaccttggcagaggtgctgcagcaggcgggttacgtcactgggataataggcaaatggcatcttggacaccacggctcttatcaccccaacttccgtggttttgattactactttggaatcccatatagccatgatatgggctgtactgatactccaggctacaaccaccctccttgtccagcgtgtccacagggtgatggaccatcaaggaaccttcaaagagactgttacactgacgtggccctccctctttatgaaaacctcaacattgtggagcagccggtgaacttgagcagccttgcccagaagtatgctgagaaagcaacccagttcatccagcgtgcaagcaccagcgggaggcccttcctgctctatgtggctctggcccacatgcacgtgcccttacctgtgactcagctaccagcagcgccacggggcagaagcctgtatggtgcagggctctgggagatggacagtctggtgggccagatcaaggacaaagttgaccacacagtgaaggaaaacacattcctctggtttacaggagacaatggcccgtgggctcagaagtgtgagctagcgggcagtgtgggtcccttcactggattttggcaaactcgtcaagggggaagtccagccaagcagacgacctgggaaggagggcaccgggtcccagcactggcttactggcctggcagagttccagttaatgtcaccagcactgccttgttaagcgtgctggacatttttccaactgtggtagccctggcccaggccagcttacctcaaggacggcgctttgatggtgtggacgtctccgaggtgctctttggccggtcacagcctgggcacagggtgctgttccaccccaacagcggggcagctggagagtttggagccctgcagactgtccgcctggagcgttacaaggccttctacattaccggtggagccagggcgtgtgatgggagcacggggcctgagctgcagcataagtttcctctgattttcaacctggaagacgataccgcagaagctgtgcccctagaaagaggtggtgcggagtaccaggctgtgctgcccgaggtcagaaaggttcttgcagacgtcctccaagacattgccaacgacaacatctccagcgcagattacactcaggacccttcagtaactccctgctgtaatccctaccaaattgcctgccgctgtcaagccgcataacagaccaatttttattccacgaggaggagtacctggaaattagctggaaaagaagtgcctgctctcaactcaagaaccaatggcatcatcagtggaattcaaaggaagtcccatgattctaaatgattctcatcttggtatttaaagtattgcatgtcaaactttaggtaagttaacagtgatttataaaatgcagttccctctgagttgattaa

SEQ ID NO: 379204 - DNA, 2596 bp, Homo sapiens
gagcgggccgtcccacgtggacctgagccgcgccggtcgcgcgcccgccagcctgccgcctgggctgggggtcacgaaaggaaaccttacagaaacatgaagccctcaaccatctgctactcagttattcggggctgacggcggcttctagaacatccaggtgttctgcagatgcgagaactcatcctgtagtcaccagatggagtcccaaacagccaagcagatgtaaggcctgtgctgtggctctgaggccctgaatacagaagggtcactttcttagtggccaaagagcagttgttgacattgatgtctaattattgaacacgaccagtcattttactgagctgcggtgaggaaacactgaccatagaagatcaagccaaatgagggattgcaaatttcctgattcttttgaattaggattccagatgggggcctcatttctacagcccccaacattcctatagccgttatcactgccatcaccactgccaccagcatcttcttgcagattccacccctgctccccagagacttcctgctttgaaagtgagcagaaaggaagctctcagaaaaatctctagtggtggctgccgtcgctccagacaatcggaatcctgccttcaccaccatgggctggctttttctaaaggttttgttggcgggagtgagtttctcaggatttctttatcctcttgtggatttttgcatcagtgggaaaacaagaggacagaagccaaactttgtgattattttggccgatgacatggggtggggtgacctgggagcaaactgggcagaaacaaaggacactgccaaccttgataagatggcttcggagggaatgaggtttgtggatttccatgcagctgcctccacctgctcaccctcccgggcttccttgctcaccggccggcttggccttcgcaatggagtcacacgcaactttgcagtcacttctgtgggaggccttccgctcaacgagaccaccttggcagaggtgctgcagcaggcgggttacgtcactgggataataggcaaatggcatcttggacaccacggctcttatcaccccaacttccgtggttttgattactactttggaatcccatatagccatgatatgggctgtactgatactccaggctacaaccaccctccttgtccagcgtgtccacagggtgatggaccatcaaggaaccttcaaagagactgttacactgacgtggccctccctctttatgaaaacctcaacattgtggagcagccggtgaacttgagcagccttgcccagaagtatgctgagaaagcaacccagttcatccagcgtgcaagcaccagcgggaggcccttcctgctctatgtggctctggcccacatgcacgtgcccttacctgtgactcagctaccagcagcgccacggggcagaagcctgtatggtgcagggctctgggagatggacagtctggtgggccagatcaaggacaaagttgaccacacagtgaaggaaaacacattcctctggtttacaggagacaatggcccgtgggctcagaagtgtgagctagcgggcagtgtgggtcccttcactggattttggcaaactcgtcaagggggaagtccagccaagcagacgacctgggaaggagggcaccgggtcccagcactggcttactggcctggcagagttccagttaatgtcaccagcactgccttgttaagcgtgctggacatttttccaactgtggtagccctggcccaggccagcttacctcaaggacggcgctttgatggtgtggacgtctccgaggtgctctttggccggtcacagcctgggcacagggtgctgttccaccccaacagcggggcagctggagagtttggagccctgcagactgtccgcctggagcgttacaaggccttctacattaccggtggagccagggcgtgtgatgggagcacggggcctgagctgcagcataagtttcctctgattttcaacctggaagacgataccgcagaagctgtgcccctagaaagaggtggtgcggagtaccaggctgtgctgcccgaggtcagaaaggttcttgcagacgtcctccaagacattgccaacgacaacatctccagcgcagattacactcaggacccttcagtaactccctgctgtaatccctaccaaattgcctgccgctgtcaagccgcataacagaccaatttttattccacgaggaggagtacctggaaattagctggaaaagaagtgcctgctctcaactcaagaaccaatggcatcatcagtggaattcaaaggaagtcccatgattctaaatgattctcatcttggtatttaaagaaacagcctgcaatctctgacacaacaggaacgggcatgacacaaacagacagaaagaaggaaatttacagctgcgttagataccaagtgtgaggcaacaggcgaactctgtatagctaatttacttgtagtttatgaagtcaaaatgcattcaggatttgtgtgctgaagacaattagacgagtgattgtgtcttccttctgtacccagcaaggatttataaaatcaacagtcacagtt

SEQ ID NO: 379205 - DNA, 1955 bp, Homo sapiens
gagcgggccgtcccacgtggacctgagccgcgccggtcgcgcgcccgccagcctgccgcctgggctgggggtcacgaaaggaaaccttacagaaacatgaagccctcaaccatctgctactcagttattcggggctgacggcggcttctagaacatccaggtgttctgcagatgcgagaactcatcctgtagtcaccagatggagtcccaaacagccaagcagatgtaaggcctgtgctgtggctctgaggccctgaatacagaagggtcactttcttagtggccaaagagcagttgttgacattgatgtctaattattgaacacgaccagtcattttactgagctgcggtgaggaaacactgaccatagaagatcaagccaaatgagggattgcaaatttcctgattcttttgaattaggattccagatgggggcctcatttctacagcccccaacattcctatagccgttatcactgccatcaccactgccaccagcatcttcttgcagattccacccctgctccccagagacttcctgctttgaaagtgagcagaaaggaagctctcagaaaaatctctagtggtggctgccgtcgctccagacaatcggaatcctgccttcaccaccatgggctggctttttctaaaggttttgttggcgggagtgagtttctcaggatttctttatcctcttgtggatttttgcatcagtgggaaaacaagaggacagaagccaaactttgtgattattttggccgatgacatggggtggggtgacctgggagcaaactgggcagaaacaaaggacactgccaaccttgataagatggcttcggagggaatgaggtttgtggatttccatgcagctgcctccacctgctcaccctcccgggcttccttgctcaccggccggcttggccttcgcaatggagtcacacgcaactttgcagtcacttctgtgggaggccttccgctcaacgagaccaccttggcagaggtgctgcagcaggcgggttacgtcactgggataataggcaaatggcatcttggacaccacggctcttatcaccccaacttccgtggttttgattactactttggaatcccatatagccatgatatgggctgtactgatactccaggctacaaccaccctccttgtccagcgtgtccacagggtgatggaccatcaaggaaccttcaaagagactgttacactgacgtggccctccctctttatgaaaacctcaacattgtggagcagccggtgaacttgagcagccttgcccagaagtatgctgagaaagcaacccagttcatccagcgtgcaagggggaagtccagccaagcagacgacctgggaaggagggcaccgggtcccagcactggcttactggcctggcagagttccagttaatgtcaccagcactgccttgttaagcgtgctggacatttttccaactgtggtagccctggcccaggccagcttacctcaaggacggcgctttgatggtgtggacgtctccgaggtgctctttggccggtcacagcctgggcacagggtgctgttccaccccaacagcggggcagctggagagtttggagccctgcagactgtccgcctcggcctcccaatgtgctgcgattataggtgtgagccaccgcacccggctagctttgttcttttaaaatatccttttgccatagctgaaatgtgaaagcaccgaaatcaacagccaagggccatttatagaattggaatgaagagaaggcatcagaagtatttcatgcatggcagttcctgtgctggtcactttcacaaacattaccttgtttaattctcagccaaccctgggagatgggtattattcataagggaaccaaggttcaaaaagtctaggtgacttggatggcacccagatagatcttgaaattcagtgaaagccaaataa

SEQ ID NO: 379206 - DNA, 5169 bp, Homo sapiens
gagcgggccgtcccacgtggacctgagccgcgccggtcgcgcgcccgccagcctgccgcctgggctgggggtcacgaaaggaaaccttacagaaacatgaagccctcaaccatctgctactcagttattcggggctgacggcggcttctagaacatccaggtgttctgcagatgcgagaactcatcctgtagtcaccagatggagtcccaaacagccaagcagatgtaaggcctgtgctgtggctctgaggccctgaatacagaagggtcactttcttagtggccaaagagcagttgttgacattgatgtctaattattgaacacgaccagtcattttactgagctgcggtgaggaaacactgaccatagaagatcaagccaaatgagggattgcaaatttcctgattcttttgaattaggattccagatgggggcctcatttctacagcccccaacattcctatagccgttatcactgccatcaccactgccaccagcatcttcttgcagattccacccctgctccccagagacttcctgctttgaaagtgagcagaaaggaagctctcagaaaaatctctagtggtggctgccgtcgctccagacaatcggaatcctgccttcaccaccatgggctggctttttctaaaggttttgttggcgggagtgagtttctcaggatttctttatcctcttgtggatttttgcatcagtgggaaaacaagaggacagaagccaaactttgtgattattttggccgatgacatggggtggggtgacctgggagcaaactgggcagaaacaaaggacactgccaaccttgataagatggcttcggagggaatgaggtttgtggatttccatgcagctgcctccacctgctcaccctcccgggcttccttgctcaccggccggcttggccttcgcaatggagtcacacgcaactttgcagtcacttctgtgggaggccttccgctcaacgagaccaccttggcagaggtgctgcagcaggcgggttacgtcactgggataataggcaaatggcatcttggacaccacggctcttatcaccccaacttccgtggttttgattactactttggaatcccatatagccatgatatgggctgtactgatactccaggctacaaccaccctccttgtccagcgtgtccacagggtgatggaccatcaaggaaccttcaaagagactgttacactgacgtggccctccctctttatgaaaacctcaacattgtggagcagccggtgaacttgagcagccttgcccagaagtatgctgagaaagcaacccagttcatccagcgtgcaagcaccagcgggaggcccttcctgctctatgtggctctggcccacatgcacgtgcccttacctgtgactcagctaccagcagcgccacggggcagaagcctgtatggtgcagggctctgggagatggacagtctggtgggccagatcaaggacaaagttgaccacacagtgaaggaaaacacattcctctggtttacaggagacaatggcccgtgggctcagaagtgtgagctagcgggcagtgtgggtcccttcactggattttggcaaactcgtcaagggggaagtccagccaagcagacgacctgggaaggagggcaccgggtcccagcactggcttactggcctggcagagttccagttaatgtcaccagcactgccttgttaagcgtgctggacatttttccaactgtggtagccctggcccaggccagcttacctcaaggacggcgctttgatggtgtggacgtctccgaggtgctctttggccggtcacagcctgggcacagggtgctgttccaccccaacagcggggcagctggagagtttggagccctgcagactgtccgcctggagcgttacaaggccttctacattaccggtggagccagggcgtgtgatgggagcacggggcctgagctgcagcataagtttcctctgattttcaacctggaagacgataccgcagaagctgtgcccctagaaagaggtggtgcggagtaccaggctgtgctgcccgaggtcagaaaggttcttgcagacgtcctccaagacattgccaacgacaacatctccagcgcagattacactcaggacccttcagtaactccctgctgtaatccctaccaaattgcctgccgctgtcaagccgcataacagaccaatttttattccacgaggaggagtacctggaaattaggcaagtttgcttccaaatttcatttttaccctctttacaaacacacgctttagtttagtcttggagtttagttttggagttagccttgcatatcccttctgtatcctgtccctcctccacgccgacccgagagcagctgagctgcgctggctctgggcagggagtgtgccttaatgggaagcacacgggctttggagtcaggcacaggtgccagctccagcttttgaacttgggcaattgtttaacctaacctgcaagttgattttgagggttaaataaaggcatacatgaaaatgcctggcaaattacctgacacagagcagacattcaatacattttagtttccttgtttctctggttcccagtttctctggtcattttggtgtaaatccattctaattagtatttagggcagagcttctctctcttttctctttttttccttccacaaaccagtgtactcactggtctccatctttaatatgcaaacaaatcacctgggatcttgtgagaatccggattccgtctcagtagggctcgagtagatcctgaaatcctacatttctatcaaacaatgccttgaggagcacagatttagaccaaagttaggtcgttttccagatctcagagcagacgagtccatggataagtctgtggcccaatccccttcctctccttttaagggtgaaatgactgcatttaaaagaagttaaagagttcctcctgtcccctataaccacaaggaaacaaaaaaatatataaaaacctcaaaaatgcattgccatgattttattattagtgtccaaaatgggactcccaagtaataaatgatttattccagccacagccaaaaaagactttgcctggctaaaagagtctctctctaagtatgtaatatacaagaaatacaattcaaagagatgttcctataagtacattttttacacggcatatatttaaaaaggaggccccttttaatataaaattccggttatataccaatatggttaattagcatttacactatagtttgaacgtattttaaatagcatgatgtgtatacaatgtctcccgcgcccattggcaaccagggtcgtgggaagcttggtgaggagttaaccaggtcctgtggtttaagcagtggagcacccgggattcctgcccccctttctgctcacacaattgcactccattcttccgccttccttgttttctccaaaaccacctgataggggggatgtcctgatttctgaggtgtgcttctcatcatgactgcttcgttttgcccttctgatttccacggcacaagattatctaccaaaatcaaaacagaatggccttactcttctcaggaagaggctggtaggcaggtgcattatcaacaggtctgtgcccatgcagagtgagcagggagaggctgggcactgtggaatttttctgtctgaactcgctcatggccacagaatggtcacccagcttatttaggtgtagacaagtatgacacagttctagaaaatactgactataaaaatgtctctgtgtgtgtgtgtatgtatttatatgtatatgtatatatttttaaaaggctcatcttacttgtaaacatggactgctcaatcactattaaaaagtcagtttaggctgggcgcggtggctcacgcctgtagtcccagagctttgggaggctgaggtgggtggatcactgggtcaggagtttgagaccagcctggccaacatggtgaaaccccatcgctactaaaaaatacaaaaattagccgggcatggtggcgctcacctgtaatcccggctactcgggaggctgaggcaggagagaatcgcttgaaccggggaggtggaggctgcagtgagccgagatcgcaccactgcactccagcctgggtgatggagcaagactccatctcaaaaaaaaaaaagtcagtttaggctgggcgcagtggctcacacctgtagtcccagcactttaggaggctgaggggggtgatcacctgaggtcaggagtttgagaccagcctggccaacatggtgaaatcctgtctctgctaaaaatacaaaatttagctgggcatggtggcgtgcctgaaaccccagctacttgggaggctgaggcactagaatcgcttgagcctgggaggtggaggttgcagtgagtggagatcgcgccaacacattctagcctgagggacagagtgagactctatcatctcaaaaaaaaaaaaaaaaaaaaaaaagggaaggtcagtttatacccttgggcctgatttcctgactcttgctcacaagattgggactagtctcacaaaatacagagacttgtacaggttggcttgttcctgaaacaaaagcttctcatcctcccgaatgtagcagctttctaaggcaccagaaatgatcaagtctcttttctttcactgctctcagagcaaaagtaaatcccaaggaggcaagcgtgatcctacgcagggaagtgtcagtatgtgttctgaaaagatcactagtgatgacccgcgttcttaaggcagcggctcacagagctcctgtagcagactactcaggcaagcctatgtttgttcgtcactacaagagaggcgattttaaccaagctgagactccaagagccttttgtggtcctagaagattttaaggaatgtgagtaaagatgtgaattctgcacagagatttgcaataggcatgacaattcagaataaggagacagagaggaagttccctagcatccctcgctgaacatttctgccaattcaggcatgactgagatgggccatattgatagagcatcccaggagcatgcatgcctctggtccttacatggtgagatggagaagcctgcctgctactgagacagtgccttagtgggagcactgcccctcatcaccatcta

SEQ ID NO: 379207 - DNA, 2342 bp, Homo sapiens
taagatcggcctaacggcagccaccactagagatttttctgagagcttcctttctgctcactttcaaagcaggaagtctctggggagcaggggtggaatctgcatagaagatcaagccaaatgagggattgcaaatttcctgattcttttgaattaggattccagatgggggcctcatttctacagcccccaacattcctatagccgttatcactgccatcaccactgccaccagcatcttcttgcagattccacccctgctccccagagacttcctgctttgaaagtgagcagaaaggaagctctcagaaaaatctctagtggtggctgccgtcgctccagacaatcggaatcctgccttcaccaccatgggctggctttttctaaaggttttgttggcgggagtgagtttctcaggatttctttatcctcttgtggatttttgcatcagtgggaaaacaagaggacagaagccaaactttgtgattattttggccgatgacatggggtggggtgacctgggagcaaactgggcagaaacaaaggacactgccaaccttgataagatggcttcggagggaatgaggtttgtggatttccatgcagctgcctccacctgctcaccctcccgggcttccttgctcaccggccggcttggccttcgcaatggagtcacacgcaactttgcagtcacttctgtgggaggccttccgctcaacgagaccaccttggcagaggtgctgcagcaggcgggttacgtcactgggataataggcaaatggcatcttggacaccacggctcttatcaccccaacttccgtggttttgattactactttggaatcccatatagccatgatatgggctgtactgatactccaggctacaaccaccctccttgtccagcgtgtccacagggtgatggaccatcaaggaaccttcaaagagactgttacactgacgtggccctccctctttatgaaaacctcaacattgtggagcagccggtgaacttgagcagccttgcccagaagtatgctgagaaagcaacccagttcatccagcgtgcaagcaccagcgggaggcccttcctgctctatgtggctctggcccacatgcacgtgcccttacctgtgactcagctaccagcagcgccacggggcagaagcctgtatggtgcagggctctgggagatggacagtctggtgggccagatcaaggacaaagttgaccacacagtgaaggaaaacacattcctctggtttacaggagacaatggcccgtgggctcagaagtgtgagctagcgggcagtgtgggtcccttcactggattttggcaaactcgtcaagggggaagtccagccaagcagacgacctgggaaggagggcaccgggtcccagcactggcttactggcctggcagagttccagttaatgtcaccagcactgccttgttaagcgtgctggacatttttccaactgtggtagccctggcccaggccagcttacctcaaggacggcgctttgatggtgtggacgtctccgaggtgctctttggccggtcacagcctgggcacagggtgctgttccaccccaacagcggggcagctggagagtttggagccctgcagactgtccgcctggagcgttacaaggccttctacattaccggtggagccagggcgtgtgatgggagcacggggcctgagctgcagcataagtttcctctgattttcaacctggaagacgataccgcagaagctgtgcccctagaaagaggtggtgcggagtaccaggctgtgctgcccgaggtcagaaaggttcttgcagacgtcctccaagacattgccaacgacaacatctccagcgcagattacactcaggacccttcagtaactccctgctgtaatccctaccaaattgcctgccgctgtcaagccgcataacagaccaatttttattccacgaggaggagtacctggaaattaggcaagtttgcttccaaatttcatttttaccctctttacaaacacacgctttagtttagtcttggagtttagttttggagttagccttgcatatcccttctgtatcctgtccctcctccacgccgacccgagagcagctgagctgcgctggctctgggcagggagtgtgccttaatgggaagcacacgggctttggagtcaggcacaggtgccagctccagcttttgaacttgggcaattgtttaacctaacctgcaagttgattttgagggttaaataaaggcatacatgaaaatgcctggcaaattacctgacacagagcagacattcaatacattttagtttccttgtttc

SEQ ID NO: 379208 - DNA, 2360 bp, Homo sapiens
gagcgggccgtcccacgtggacctgagccgcgccggtcgcgcgcccgccagcctgccgcctgggctgggggtcacgaaaggaaaccttacagaaacatgaagccctcaaccatctgctactcagttattcggggctgacggcggcttctagaacatccaggtgttctgcagatgcgagaactcatcctgtagtcaccagatggagtcccaaacagccaagcagatgtaaggcctgtgctgtggctctgaggccctgaatacagaagggtcactttcttagtggccaaagagcagttgttgacattgatgtctaattattgaacacgaccagtcattttactgagctgcggtgaggaaacactgaccatagaagatcaagccaaatgagggattgcaaatttcctgattcttttgaattaggattccagatgggggcctcatttctacagcccccaacattcctatagccgttatcactgccatcaccactgccaccagcatcttcttgcagattccacccctgctccccagagacttcctgctttgaaagtgagcagaaaggaagctctcagaaaaatctctagtggtggctgccgtcgctccagacaatcggaatcctgccttcaccaccatgggctggctttttctaaaggttttgttggcgggagtgagtttctcaggatttctttatcctcttgtggatttttgcatcagtgggaaaacaagaggacagaagccaaactttgtgattattttggccgatgacatggggtggggtgacctgggagcaaactgggcagaaacaaaggacactgccaaccttgataagatggcttcggagggaatgaggtttgtggatttccatgcagctgcctccacctgctcaccctcccgggcttccttgctcaccggccggcttggccttcgcaatggagtcacacgcaactttgcagtcacttctgtgggaggccttccgctcaacgagaccaccttggcagaggtgctgcagcaggcgggttacgtcactgggataataggcaaatggcatcttggacaccacggctcttatcaccccaacttccgtggttttgattactactttggaatcccatatagccatgatatgggctgtactgatactccaggctacaaccaccctccttgtccagcgtgtccacagggtgatggaccatcaaggaaccttcaaagagactgttacactgacgtggccctccctctttatgaaaacctcaacattgtggagcagccggtgaacttgagcagccttgcccagaagtatgctgagaaagcaacccagttcatccagcgtgcaagcaccagcgggaggcccttcctgctctatgtggctctggcccacatgcacgtgcccttacctgtgactcagctaccagcagcgccacggggcagaagcctgtatggtgcagggctctgggagatggacagtctggtgggccagatcaaggacaaagttgaccacacagtgaaggaaaacacattcctctggtttacaggagacaatggcccgtgggctcagaagtgtgagctagcgggcagtgtgggtcccttcactggattttggcaaactcgtcaagggggaagtccagccaagcagacgacctgggaaggagggcaccgggtcccagcactggcttactggcctggcagagttccagttaatgtcaccagcactgccttgttaagcgtgctggacatttttccaactgtggtagccctggcccaggccagcttacctcaaggacggcgctttgatggtgtggacgtctccgaggtgctctttggccggtcacagcctgggcacagggtgctgttccaccccaacagcggggcagctggagagtttggagccctgcagactgtccgcctggagcgttacaaggccttctacattaccggtggagccagggcgtgtgatgggagcacggggcctgagctgcagcataagtttcctctgattttcaacctggaagacgataccgcagaagctgtgcccctagaaagaggtggtgcggagtaccaggctgtgctgcccgaggtcagaaaggttcttgcagacgtcctccaagacattgccaacgacaacatctccagcgcagattacactcaggacccttcagtaactccctgctgtaatccctaccaaattgcctgccgctgtcaagccgcataacagaccaatttttattccacgaggaggagtacctggaaattagatgattaccacatgctgagggcacctgacacagagcccggtgcagagcacttgcccactagaggtttgccactgagactgccagtgaagaacaaatcaatgcaagggc

SEQ ID NO: 379209 - DNA, 1964 bp, Homo sapiens
gagcgggccgtcccacgtggacctgagccgcgccggtcgcgcgcccgccagcctgccgcctgggctgggggtcacgaaaggaaaccttacagaaacatgaagccctcaaccatctgctactcagttattcggggctgacggcggcttctagaacatccaggtgttctgcagatgcgagaactcatcctgtagtcaccagatggagtcccaaacagccaagcagatgtaaggcctgtgctgtggctctgaggccctgaatacagaagggtcactttcttagtggccaaagagcagttgttgacattgatgtctaattattgaacacgaccagtcattttactgagctgcggtgaggaaacactgaccatagaagatcaagccaaatgagggattgcaaatttcctgattcttttgaattaggattccagatgggggcctcatttctacagcccccaacattcctatagccgttatcactgccatcaccactgccaccagcatcttcttgcagattccacccctgctccccagagacttcctgctttgaaagtgagcagaaaggaagctctcagaaaaatctctagtggtggctgccgtcgctccagacaatcggaatcctgccttcaccaccatgggctggctttttctaaaggttttgttggcgggagtgagtttctcaggatttctttatcctcttgtggatttttgcatcagtgggaaaacaagaggacagaagccaaactttgtgattattttggccgatgacatggggtggggtgacctgggagcaaactgggcagaaacaaaggacactgccaaccttgataagatggcttcggagggaatgaggtttgtggatttccatgcagctgcctccacctgctcaccctcccgggcttccttgctcaccggccggcttggccttcgcaatggagtcacacgcaactttgcagtcacttctgtgggaggccttccgctcaacgagaccaccttggcagaggtgctgcagcaggcgggttacgtcactgggataataggcaaatggcatcttggacaccacggctcttatcaccccaacttccgtggttttgattactactttggaatcccatatagccatgatatgggctgtactgatactccaggctacaaccaccctccttgtccagcgtgtccacagggtgatggaccatcaaggaaccttcaaagagactgttacactgacgtggccctccctctttatgaaaacctcaacattgtggagcagccggtgaacttgagcagccttgcccagaagtatgctgagaaagcaacccagttcatccagcgtgcaagcaccagcgggaggcccttcctgctctatgtggctctggcccacatgcacgtgcccttacctgtgactcagctaccagcagcgccacggggcagaagcctgtatggtgcagggctctgggagatggacagtctggtgggccagatcaaggacaaagttgaccacacagtgaaggaaaacacattcctctggtttacaggagacaatggcccgtgggctcagaagtgtgagctagcgggcagtgtgggtcccttcactggattttggcaaactcgtcaagggggaagtccagccaagcagacgacctgggaaggagggcaccgggtcccagcactggcttactggcctggcagagttccagttaatgtcaccagcactgccttgttaagcgtgctggacatttttccaactgtggtagccctggcccaggccagcttacctcaaggacggcgctttgatggtgtggacgtctccgaggtgctctttggccggtcacagcctgggcacagggtgctgttccaccccaacagcggggcagctggagagtttggagccctgcagactgtccgcctggagcgttacaaggccttctacattaccgacccttaactgctttttctatagcaaagcc

SEQ ID NO: 379210 - DNA, 1634 bp, Homo sapiens
gagcgggccgtcccacgtggacctgagccgcgccggtcgcgcgcccgccagcctgccgcctgggctgggggtcacgaaaggaaaccttacagaaacatgaagccctcaaccatctgctactcagttattcggggctgacggcggcttctagaacatccaggtgttctgcagatgcgagaactcatcctgtagtcaccagatggagtcccaaacagccaagcagatgtaaggcctgtgctgtggctctgaggccctgaatacagaagggtcactttcttagtggccaaagagcagttgttgacattgatgtctaattattgaacacgaccagtcattttactgagctgcggtgaggaaacactgaccatagaagatcaagccaaatgagggattgcaaatttcctgattcttttgaattaggattccagatgggggcctcatttctacagcccccaacattcctatagccgttatcactgccatcaccactgccaccagcatcttcttgcagattccacccctgctccccagagacttcctgctttgaaagtgagcagaaaggaagctctcagaaaaatctctagtggtggctgccgtcgctccagacaatcggaatcctgccttcaccaccatgggctggctttttctaaaggttttgttggcgggagtgagtttctcaggatttctttatcctcttgtggatttttgcatcagtgggaaaacaagaggacagaagccaaactttgtgattattttggccgatgacatggggtggggtgacctgggagcaaactgggcagaaacaaaggacactgccaaccttgataagatggcttcggagggaatgaggtttgtggatttccatgcagctgcctccacctgctcaccctcccgggcttccttgctcaccggccggcttggccttcgcaatggagtcacacgcaactttgcagtcacttctgtgggaggccttccgctcaacgagaccaccttggcagaggtgctgcagcaggcgggttacgtcactgggataataggcaaatggcatcttggacaccacggctcttatcaccccaacttccgtggttttgattactactttggaatcccatatagccatgatatgggctgtactgatactccaggctacaaccaccctccttgtccagcgtgtccacagggtgatggaccatcaaggaaccttcaaagagactgttacactgacgtggccctccctctttatgaaaacctcaacattgtggagcagccggtgaacttgagcagccttgcccagaagtatgctgagaaagcaacccagttcatccagcgtgcaaggagattccactcctcaagggcaatggactccaagaaacttggtgttttctacagccttagcctaagtggtcaagaaagcacgtgctgcacggctgtccacttgggcagaattaaaaagggactctacctgtggctaagtgatcacagcagccccttgaatatgcaggaatcccccacccctcgctcagccacattggacgtttttagaagctcagcagggagggttgaggcagcaatgcaggagatccaggcatcctgttttcttggtaataaaacctatttaaggattgaatctcaaa

SEQ ID NO: 379211 - DNA, 205 bp, Homo sapiens
taacgtcaatgctgtcacacgcttcttatctctagggacactccaggcagtggcttgtcccaaggtgctggaacattctgaccagccagtgggattagagcctctataacctgggtgctcccgggcaggactcacttggtagtggcctcagatgacccctgctctccccccaccccccgcaaagactgtgcctccaggtcttggc

SEQ ID NO: 379212 - DNA, 505 bp, Homo sapiens
aggtcacaagaaagatccctaacagcactttggtttagtcagggctaggtgtcatcacctgtatgccctttggccaaggaaaccagaatttttcaggattttccccacctctggaaggctggaggaaggggaagacccactcagcagattcccatagtgcagggatcctcacaggcatgactttgccctttgtcatggatactgcagctcccagacagtcttctgggctttgatcagcctgcaatcatctgactagagcttgatttttggggcagggaaggtggtccttatatgagctgccacttaatgggccactggggatttttcaacatgaaaggtaccgagtctccaaatgctggttgtagggcctaaaaacagggctcaactccaggttctgccactttctagctgagtgatgagggctaacgtctggggagcaagatccctattttttcccattgtaaaattgggctaataaaagatgctacctactgactattaaata

SEQ ID NO: 379213 - DNA, 530 bp, Homo sapiens
ttaaggaattcattgggtttttcgaaatgttttcatttattttataggtataaacattaaagctgttattacatttctctttcaaatatacaggtatatataacatgtaatactaaaatttgtttaacttataaaaaaggttaaaaaccttacaataaaacaaggaaacaaaaagacataacacaagatctgtcctccacagaagaaaatgctcgcatttcctctcctttctccattaatgctgcattagtgcggtgtaggcagagacgtgcttccgccaggaaaaacctcattagtctctggaagaatcactgcccgcctgtctcattgtctccccagccattgcaagcacagtccttaaggtgttatgctccctggggaatctgaatccacttacatgctcccctgtgggctgcggcacttaacttcccttgtcctcaagtttggttaatgggctgggaagcgttgactgacactgctccaaggccagcagacatgaggcactgcaagttctgctctcaaaggggctt

SEQ ID NO: 379214 - DNA, 515 bp, Homo sapiens
tatgtgtatgcatatctaaaagcacagcacttaaccctttacattgtctatgatgcaaagacctttgttcacgtgtttgtctgctgaccctctccccacaattgtcttgtgaccctgacacatccccctcttcgaggaacacccacaggttgtgggaaaggcaacccacccctacaggcccagagcacaattttaaccaccatatcattctgcctctgggtaggtcagtcaagctctgtagctgatcagatgcctgtagagagaaggagacatcagtctccccttcttccaaacacccccaaattttacaagtgattttctcagatccctcagcatcaggaatggggatgaacagggcagcctgtccctttcccaacagcccagcagatatcccaagattatatctcattggctctgactaggacatgagcccaaactgaaccagttgctgtagccatggcatgcagcatcctctgtcctctggccaggccagagccacatcccacttctggatc

SEQ ID NO: 379215 - DNA, 230 bp, Homo sapiens
agaaccttataagtatgaaacagttcttattccagataatataagcattcactcaggtaatataatcacatctcagtggaacttcagctatagggagtagatcttcatagtaaattaacattctgaggaattaacaagtaactgcaatgccttccttcccagcctctctccatgaaaaagctgaggcaccttacaaagatcgacctaaaacaaggtgaaataagaagatg

SEQ ID NO: 379216 - DNA, 716 bp, Homo sapiens
gtagttggagatttatactttgtacacaaatatattgtggtcaaaatctttctgtaacattatttctctgtcttagcacaggctttacttaacatctctccttgattgtcatttcattcttttgcatgttatttactataggtatcgaggtagattttgagaccaaccaataaatcttcttgaaacttagcttcttagaaaggaaaatctaaataccagccttttaaaaaaagtagctgaattaaaggatgagtgaaccaaaggcaaaggtagcctttcctcagcctgtgttttagctttctaaatgttaacaatagcttcattcttgacttattggtaacattcaaaatactacttattatttcatactttagcacatgtatctattcagctttaatgctattaacgagttgttaacctaagttttcatttgttggcgggcacggtggctcacacctgtaatcctagcactttgggaggccgaggtgggcagatcacctaaggtcaggagttcgagaccagcctggtcaacatggtgaaaccctgtcttgaccaaaaatagaaaaattagctaggcatggtggcgcacacttgtaatcccagctacttggcaggctgaggcaggataatcgcttgaacccaggagacagaggttgcagtgagccgagatcacaccactccactccatcctgggcgacagagcaagactgcatctc

SEQ ID NO: 379217 - DNA, 211 bp, Homo sapiens
tacgctagggtctcgggaagccccagggcagaaagctgaaaagctaggagaagacttggtttcgaggacctcttccaaacccccttactaactggtgtagaaaagggagagtgaagccgggcctttgcttgggtgggttcgttaggggtcagaggcgtccgctcggccagtgtcgaaggaaggtggccatttgagccggtcgctccgcatc

SEQ ID NO: 379218 - DNA, 399 bp, Homo sapiens
ttattacacagggacggggctgtagcacacggctgggtctcgaatgtgaagaggagttaggtccaggcgagtggctcagaaatgagaatgtgaataggaactttgggcttaacgatgtcaccccagagcagaggggttggtgttgcaaggaacggagagacggcaaagtccgaagggaggtgacgcaggaaaacagacggtggcagtcacaggagagtgctgcacagacctccctgccagggagaagagctgggaggagtttggtaggtggaccaccttccacatccacatgcaccgcagtttcacaccaagacccggagctctcaggttgctccccactgactagtgagtgcccagaggcacagagccgggccatccccgcccagtacccacagtggc

SEQ ID NO: 379219 - DNA, 1557 bp, Homo sapiens
tctcatatgaaatatgtattttagggaagaaatacaaacaataaaaataaatgcagagaattagcaaagttgttagcaacttctactttccagtcagattgcccttgtccaattgttggctctgacacttaaaaagctgtgtgaccttgaacaagatgcttaacagatcatcagtgcaattgtttggttgttcaaatgggtataataatagtatggtaggctaaataatgtctggacatgaagagattacactggtgggtttcatgtaatcacaagggtctttacataagggagagagaataagagtagtaggagtaggagatgtaacaaaagaagcaagtgtttggagtgaaagaaaaaggagttcatgagccaaggaatgcaggcagcctttaggagctgaaataggcattatttatctcacccatgggtgtttgtcaacacctctactaacactacattaatacattttcatttcccaatgaagaatgtttaaaatgtataatgtgtaatttccatctgtatctttccattaatgtaatacccatttccactttctcttctattaactctctgaattatttgcctatgtttctatcaccttagaggttttgctggcatattacttggtaggaaaatagcaagttttaatacaagatgtgtgatatgagcccaatattgtaaataaacatttaaccctatatgtatgtgtgcataagttatacatatatatattatgtgtgaatgcacataatgtacacacacatgcatagatgtacatgtacatctgtacccatatattatctttaaatgtattccaaattgtaagtagcttgttctaggagatgagctgtgaaaagcataatcaattatgttacttcttatttcttacatttcaagtagaagacaggaagagtggtgaacataatttaacataagatacttagttgtctatgctttggagatgacatgaggctaattatattaggacaatagcataaaattatcatcccactaatgttaaaactaaaacaatataggagaagctgaaaaagattaaaccctggtaattcttcttagaaattttgttcagccaggtgcagtggctcacgcctgtaagcccagcagtttgggaggctgaggtgggtggatcacttgaggtcaggagttcaagactagcctggcccacatagtgaaaccctgtctctactaaaaatacaaaaattagcctggtgtggtggtaggcacctgtaatcccagctacttggggggctgaggcaggagaaccacttgaatccaggaggtggagattgcagtgagccgagatcgcaccattgcactccagcctgggttcatgtttgaagagagaagcatgacaaaacacatgagcagcaatatgaaagcatatatttatacttcattacttcattctaagttggaaacatgaagtaataaaagtaacctgattctttatttagagataaagtaatgacactttaaagtaacattagaccaggcacagtgtctcactcctgtaatcccagcactttgggaggc

SEQ ID NO: 379220 - DNA, 1262 bp, Homo sapiens
tctcatatgaaatatgtattttagggaagaaatacaaacaataaaaataaatgcagagaattagcaaagttgttagcaacttctactttccagtcagattgcccttgtccaattgttggctctgacacttaaaaagctgtgtgaccttgaacaagatgcttaacagatcatcagtgcaattgtttggttgttcaaatgggtataataatagtatggtaggctaaataatgtctggacatgaagagattacactggtgggtttcatgtaatcacaagggtctttacataagggagagagaataagagtagtaggagtaggagatgtaacaaaagaagcaagtgtttggagtgaaagaaaaaggagttcatgagccaaggaatgcaggcagcctttaggagctgaaataggcattatttatctcacccatgggtgtttgtcaacacctctactaacactacattaatacattttcatttcccaatgaagaatgtttaaaatgtataatgtgtaatttccatctgtatctttccattaatgtaatacccatttccactttctcttctattaactctctgaattatttgcctatgtttctatcaccttagaggttttgctggcatattacttggtaggaaaatagcaagttttaatacaagatgtgtgatatgagcccaatattgtaaataaacatttaaccctatatgtatgtgtgcataagttatacatatatatattatgtgtgaatgcacataatgtacacacacatgcatagatgtacatgtacatctgtacccatatattatctttaaatgtattccaaattgtaagtagcttgttctaggagatgagctgtgaaaagcataatcaattatgttacttcttatttcttacatttcaagtagaagacaggaagagtggtgaacataatttaacataagatacttagttgtctatgctttggagatgacatgaggctaattatattaggacaatagcataaaattatcatcccactaatgttaaaactaaaacaatataggagaagctgaaaaagattaaaccctggtaattcttcttagaaattttgttcagccaggtgcagtggctcacgcctgtaagcccagcagtttgggaggctgaggtgggtggatcacttgaggtcaggagttcaagactagcctgggcaacaaagcaagttgagaaactccgtctatactaaaaaattcaaaattcccggacgtgtggcgcatgcctgtatcca

SEQ ID NO: 379221 - DNA, 593 bp, Homo sapiens
atttattgagccagtatcttctaaacagtgtttcaggtggctggtattcattagtgagccaaataaagttctcttctcatatgaaatatgtattttagggaagaaatacaaacaataaaaataaatgcagagaattagcaaagttgttagcaacttctactttccagtcagattgcccttgtccaattgttggctctgacacttaaaaagctgtgtgaccttgaacaagatgcttaacagatcatcagtgcaattgtttggttgttcaaatgggtataataatagtatggtaggctaaataatgtctggacatgaagagattacactggtgggtttcatgtaatcacaagggtctttacataagggagagagaataagagtagtaggagtaggagatgtaacaaaagaagcaagtgtttggagtgaaagaaaaaggagttcatgagccaaggaatgcaggcagcctttaggagctgaaataggcaggaaaacagattatccactacagtctccaggaggaaacagactagacaacttttttatttatctcacccatgggtgtttgtcaacacctctactaacactacattaat

SEQ ID NO: 379222 - DNA, 701 bp, Homo sapiens
gcggccgcggagaggcacttaaaagccccgtgttaccctagaccttaaaaaaaaaaaaaaaaaaactgcgtgtttccacccccgtcggcctgcagtggaagggcccgagcagaaccaacggggcaggggacgctgagcgcgccgtgtttctcctcccgtctgcctggagtagaacggctcgggcggaaccaacgggcagccgcgggggcgttgtgggccgcggcgcgtttccccggctccgtggctctggggcactgaggagcggcgcccgcggggcagcgaggagcccgatgcagggttctgcgcgtcatttccggtcccgcgggcgccccgtgaagcccacctggatccgccagcgctgtgccactccccagtgccgagctccgagctgtctccgcggcctcgcgcccggcccctccaccgcgcacctcttaggccccgcccgccagcgtccctttgttgtgaaggcgccggggcctagcgctatgcctgcggcggagactgcatcaggctctcggtgggttctgcgtgcggggtgctctgctcggtgatcggtgcttggtgctgcgtgctcggtgctcggtgctgggtgctgggtgccggtactgatgctgagtgtgcgggcgtccggggtttccctgcccggattcgctcctgggggtcctttcctatggctggcgctgtgcgcggaaaacgctggt

SEQ ID NO: 379223 - DNA, 1892 bp, Homo sapiens
gcggccgcggagaggcacttaaaagccccgtgttaccctagaccttaaaaaaaaaaaaaaaaaaactgcgtgtttccacccccgtcggcctgcagtggaagggcccgagcagaaccaacggggcaggggacgctgagcgcgccgtgtttctcctcccgtctgcctggagtagaacggctcgggcggaaccaacgggcagccgcgggggcgttgtgggccgcggcgcgtttccccggctccgtggctctggggcactgaggagcggcgcccgcggggcagcgaggagcccgatgcagggttctgcgcgtcatttccggtcccgcgggcgccccgtgaagcccacctggatccgccagcgctgtgccactccccagtgccgagctccgagctgtctccgcggcctcgcgcccggcccctccaccgcgcacctcttaggccccgcccgccagcgtccctttgttgtgaaggcgccggggcctagcgctatgcctgcggcggagactgcatcaggctctcgcgtctgcttctacgctttgcctgggagaggccctggtggcctcgttcctggcgcccggagtccctgctgcggccccacccccgggcggtcacggtgacccatgctgcccagcctggaggtaaaatcgttcgtggctgtggcttcagcatgtcgtcctcggtgaaaaccccagcactggaagagctggttcctggctccgaagagaagccgaaaggcaggtcgcctctcagctggggctctctgtttggtcaccgaagtgagaagattgtttttgccaagagcgacggcggcacagatgagaacgtactgaccgtcaccatcacggagaccacggtcatcgagtcagacttgggtgtgtggagctcgcgggcgctgctctacctcacgctgtggttcttcttcagcttctgcacgctcttcctcaacaagtacatcctgtccctgctgggaggcgagcccagcatgctaggtgcggtgcagatgctgtccaccacggttatcgggtgtgtgaaaaccctcgttccttgctgtttatatcagcacaaggcccggctttcctacccacccaacttccttatgacgatgctgtttgtgggtctgatgaggtttgcaactgtggttttgggtttggtcagcctgaaaaatgtggcggtttcgtttgctgagacggtgaagagctccgcccccatcttcacggtgatcatgtctcggatgattctgggggagtacacaggacgtcccagtgatcgggaggagcgggaagagcttcagctacaaccaggacgtggtgctgctgcttctgacagacggagtcctgttccaccttcagagcgtcacggcgtacgccctcatggggaaaatctccccggtgactttcaggtcccgcaggccctgcaccgagtcgccttgtccatggcgctgccctgccccatgcttcctgcgtcctgagtaggaggtatctccgagacaggaaaagtggccgctctctctcactttttctggaactcatggtggtctcctgggcttggtcactgtctctcaccagcatgtttctttgtgcggtcaggaattatttccaaatgctcctgaagcctagtgttttagtgaacattagtgattgttagcagtggttcaaaaaaaaaaaactttttttttttttgagacagagtcttgctctgtgacccaggctggagtgtggtggtgccatctcagctcactgcaacctccgcctccctgctcaagtgatcctctcgcctcagcctcctgagtagctgggactacaggtgtccaccaccacgctgggctaatttttgttttttgttattttattttattttactttttttgagagatgggattttgctgtgttgtccag

SEQ ID NO: 379224 - DNA, 429 bp, Homo sapiens
gcctcccaaagtgctagggttaccgtcttgagccactgcgccgggcacaacttcttattcttaatgaggatttattctgaatccctcaaaagtgactaggttcaagtgttcagcaccatagcttgctgtgtcctgatgtaggctgaattatttttctttttgcagtgttttaactcaaatgggtgatgaaaaggactcttggaaagtgaaaactttagatgaaattcttcaggaaaagaaacgaaggaaggaacaagaggagaaagcagagataaaacgcttaaaaaatgtaagccatattttttaagtaagtggttttcttaaaggagatttaatttctttgccctcatttttccattagaacaacgcttcttcggtgaagttcttttgtacttccaaatgtcgcaggtgagcccaaaatgtattcta

SEQ ID NO: 379225 - DNA, 593 bp, Homo sapiens
caagcgtgagccactgcacctggccaaaaattctttatattttataacactggctcattcagagtacatgtgaaagtttgttttgggatgttgcccaggtttgattatcattaaaaatacttttatctatgaagaaaaaaaaacttataaagaaaatgattaactttctctttgcttcttagtctgatgaccgggattccaagcgggattcccttgaggagggggagctgagagatcactgcatggagatcacaataaggaactccccgtatagaagagaagactctatggaagacagaggagaagaagatgattctttggccatcaaaccaccccagcaaatgtctcggaaagaaaaagttcatcacagaaaagatgaaaagagaaaagagaaacgtaggcatcgtagccattcagcagaagggggtacagaagcatttactttctttgacatcatgttcaagtgtggtttctttcctgttcctactcttctgccttccccagagcaccactgaaaaaccagagaaagcaaactgtagctgaaagcataatggtgtcacagaccgttcagaagggctatagagagaatagct

SEQ ID NO: 379226 - DNA, 3861 bp, Homo sapiens
gagatggagtctcgctctgtcacccaggctggagtgcaatggtgagatctcggctcactgcaacctccacctcctgggttcaggcgattctcctgcctcccaatcctagtagctgggagtatcaggtgagtcgcagccccacgcacgcccggataatttttttatttttagtcgagacgggtttcaccacgttggccaggatggtctcgaactcctgacctcaggtgatccacccgcctcggcctcccaaagcactgggattacaggcgtgagccaccgcgcccggcctccatatccattcttgggaacacttgttgcttagctgaacggagcccgcatcctgctgtggcggcactcgccccggtgctggtctgagcagacgcctcctttctcttgcagaagaagtaagtgaggaagaaatgagtgaagatgaagaacgagaaaatgaaaaccacctcttggttgttccagagtcacggttcgaccgagattccggggagagtgaagaagcagaggaagaagtgggtgagggaacgccgcagagcagcgccctgacagagggcgactatgtgcccgactcccctgccctgtcgcccatcgagctcaagcaggagctgcccaagtacctgccggccctgcagggctgccggagcgtcgaggagttccagtgcctgaacaggatcgaggagggcacctatggagtggtctacagagcaaaagacaagaaaacagatgaaattgtggctctaaagcggctgaagatggagaaggagaaggagggcttcccgatcacgtcgctgagggagatcaacaccatcctcaaggcccagcatcccaacatcgtcaccgttagagagattgtggtgggcagcaacatggacaagatctacatcgtgatgaactatgtggagcacgacctcaagagcctgatggagaccatgaaacagcccttcctgccaggggaggtgaagaccctgatgatccagctgctgcgtggggtgaaacacctgcacgacaactggatcctgcaccgtgacctcaagacgtccaacctgctgctgagccacgccggcatcctcaaggtgggtgacttcgggctggcgcgggagtacggatcccctctgaaggcctacaccccggtcgtggtgaccctgtggtaccgcgccccagagctgctgcttggtgccaaggaatactccacggccgtggacatgtggtcagtgggttgcatcttcggggagctgctgactcagaagcctctgttccccgggaagtcagaaatcgatcagatcaacaaggtgttcaaggatctggggacccctagtgagaaaatctggcccggctacagcgagctcccagcagtcaagaagatgaccttcagcgagcacccctacaacaacctccgcaagcgcttcggggctctgctctcagaccagggcttcgacctcatgaacaagttcctgacctacttccccgggaggaggatcagcgctgaggacggcctcaagcatgagtatttccgcgagacccccctccccatcgacccctccatgttccccacgtggcccgccaagagcgagcagcagcgtgtgaagcggggcaccagcccgaggccccctgagggaggcctgggctacagccagctgggtgacgacgacctgaaggagacgggcttccaccttaccaccacgaaccagggggcctctgccgcgggccccggcttcagcctcaagttctgaaggtcagagtggaccccgtcatggggagaactcagccgggaccacaggcgtggctactgcggctggagctgcgatgagactcggaactcctcgtcttactttgtgctccatgttttgtttttgtattttggtttgtaaatttgtagaattaaatcattttccttgtaaacccgaattcgggaccatcacagtttgattagcctcagcctcaagagctggcacatgcttgtgaacttgtgctttcatattttcctaacctgtgtgctctttgtgggaggaataacccagactaggaatgccagcatctgccaagcagttgggataattcttcactattccacccttgccacagtactatgggtaggagtgacagctcgaaatatctacaaacaagtcactaaaaaagctaaaagatgccaggatcctgatgaaccaccacctccaccaagaccaatgctcagattttacctgattggtggtggtatccccatcattgtttgcggcataactgcaggcagcgaacattaagaattacggcagtcggccaaacgcaccctattgctggatggcatgggaaccctccttgggagccttctatgggccagccagcttcagcacttttgtaaactgcatgtactttctgagcatatttattcagttgaaaagacaccctgagcgcaaatatgagcttaaggagcccactggccagcaacagagattggcatgccaatgaaaatggcgaaataaatcatcaggaaatcatttctttgtctctgatttctacatcagccttggaaaatgagcacacttttcattctcagctcttggggccagccttactttgctcttatatgttgcactgtggatgtttggggctttggctgtttctttgtattaccctttggacttggtttttagcttcgtttttggagccacaagtttaagcttcagtgcattcttcatggtccaccattgtgttaatagggaggatcttagacttgcgtggatcatgacttgctgcccaggacggagctcgtattcagtgcaagtcaacgtccagccccccaactctaatgggacgaatggagaggcacccaaatgccccaatagcagtgcggagtcttcatgcacaaacaaaagtgattcaagcttcaaaattcctcccagggctgcaaattaacaaacttgcaggcggctgcagctcagtgccatgccaattctttacctttgaactccacccctcagcttgataatagtctgacagaacattcaatggacaatgatattaaaatgcacgctggcgcctttagaagttcagtttcgaacaaatgtgcactcaagccgccaccataaaaacagaagtaaaggacaccgggcaagccgactcacagtcctgagagaatatgcctacgatgtcccaacgagcgtggaaggaagcgtgcagaacggcttacctaaaagccggctgggcaataacgaaggacactcgaggagccgaagagcttatttagcctacagagagagacagtacaacccaccccagcaagacagcagcgatgcttgtagcacacttcccaaaagtagcagaaattttgaaaagccagtttcaaccactagtaaaaagatgcgttaagggaagccagctgtggttgaacttcaaaatcagcaaaaatcttatggcctcaacttggccattcagaatggaccaattaaaagcaatgggcaggagggacccttgctcggtaccgatagcactggcaatgttaccactggattatggaaacacgaaactactgtgtaacattgctgggcttcctaggcagaaattcatataaactgtgatactcacattccttgaagctatgagcatttaaaaactgtttacagccaccatagggattcaaaagaatttggaataaactttgaagttttggattttacttatttttatccccaaattgttgctattttttaggatctgaaacaaaatctttctaaaacattgttttagttgtcaaagcaccaacaggacattttgggatgtgaaatgtaatttcttggaatctgtaatttgtacttaatatttcaggcttgtatttaatataataaataggtgtttgtt

SEQ ID NO: 379227 - DNA, 982 bp, Homo sapiens
atacaggaagtgacgatacttttggcgcgcgcggttgctgtttcttctctggctccgggaccggccgcggccccgggctgttttaactcaaatgggtgatgaaaaggactcttggaaagtgaaaactttagatgaaattcttcaggaaaagaaacgaaggaaggaacaagaggagaaagcagagataaaacgcttaaaaaattctgatgaccgggattccaagcgggattcccttgaggagggggagctgagagatcactgcatggagatcacaataaggaactccccgtatagaagagaagactctatggaagacagaggagaagaagatgattctttggccatcaaaccaccccagcaaatgtctcggaaagaaaaagttcatcacagaaaagatgaaaagagaaaagagaaacgtaggcatcgtagccattcagcagaaggggggaagcatgctagagtgaaagaaaaagaaagagagcacgaacgtcggaaacgacatcgagaagaacaggataaagctcgccgggaatgggaaagacagaagagaagggaaatggcaagggagcattccaggagagaaaggaccgcttggagcagttagaaaggaagccagagccggagccaactggagcgtgaacttccacaggattaacgagaatgagaagtctcccagtcagaaccggaaagccaaggacgccacctcagacaacggcaaagacggcctggcctactctgccctgctcaagaatgagctgctgggtgccggcatcgagaaggtgcaggacccgcagactgaggaccgcaggctgcagccctccacgcctgagaagaaggggtctgtcacggttttccccttagcaccaaggcgctcccagcccgatgacgggacgatgtgtctctctatcctgtctcccggcaagaacaagagccagaaacggtccggtcccccggaaaacccaccggaagattccagatccct

SEQ ID NO: 379228 - DNA, 3785 bp, Homo sapiens
  misc_feature (9)..(9): n is a, c, g, or t
  misc_feature (1165)..(1165): n is a, c, g, or t
ggcactcanaacttctccccacctgacccagggctgtgggcatcctcagactatcccagaggcatcgcaagccttcaagctgcagcattgcacggcactcaagggctatgaccaacggaggccgttcagtcgcttctgtttagaggaaggccccctacctcttccacaccctgccctcctatcccttccacaccctgggctgcgtgactccccgcaaccccagggcaccctgccctcctacctgtgggggtttccagccctgaggttgaggacaaacctctcgtgtttaacttgggaggagatgtgtacgttccttttcttttttggactctgagtatgaggcaggctgttctgaggtccccgtggggtgagcctgtctgtcctccctcagagcccaccgttcctatcatcatctagcacctgtccggttccccacgtgagccttgggcaggacgctgcagtgttgatggtttgggttacgtggcgtttacctgggcgccgtccttactgaaaaaggaaacgtccacactgaatgtttctggggcgcgtggtgtgtgtcaggcgcccaccctgtcccactctccccaagggacagtagtacggcacactggggccaccagccagctcaactcatcctcctgtgtcacgcacccccgagggcgcaggaggcctgaggagtggctactggagccgtgtgttaggcagaggcttctgaccatgtctgagctctttacccccaatctcgcagctggcggattcccatgcccggtgcagcctgttgccagccagcctttgagacccagagctccagggcttgtcagaggcagcatggggctccagtggtcctgagtctcatttccctgcctgctctttaggcctttggcacccatggtcacttcactggctttccatttggcttctcacctgggaaatacaaaaatagcccctcctgaagataaaatcattcagaaacagagcaataattctgactcattaacttctacctactcaaaaaagtctgccatgatgatggaccgaagtgaggctttttaacccacaagtaacctttttatttttttgagacagtcttgctctgtctgtcacccaggctggagtacagtggcatgatcttggctcactgcagcctcgacttcctgggctcaantgatctcccacctcagcctcccatgtggctggaaccacaggcacgtgccaccatgcctggctatttttttgttgagctgggctctcgctttgttgcccaggctggtcttgaactcctcggctcaagcaatccttcccactcagcctcctgtagtgtcgagaatataggcgtgggctactacacctgcttcagccgcttctataaaaccgctgacctgtgtgtggaggacaggccaggtgtgtgctcactgcgctgcgaagatgttttgtcacgtgactttccccggatttccatttctttttttctgctttcctcaaaaactaatagaagactgggtgcggtggctcacgcctctaatcgcagcactttgggaggcagcagctggcggatcacaaggccaggagttcgagaccagcctggccaacatgatgaaaccctgtctctaccaaaaatacaaaaattagctgggtgcgatggtgggtgcctgtaatcccagatactcaggaggctgaggcaggagaattgtttgaaccccggagatggaggttgcagtgagccaagatcgtgccattgcactccagcctgggcaacagggcaagattccgtctcaaaaacaaacactattagaaaatgccctggaggtggcggggagttgttgatttgtgaggacagattgaaagcaactcccagggtggccttgtccacctccccatcgagaatgtggctgccggcctctttgaagattgtggtctggcataaggagaggtgcaggcgcctggttctgagcaccttggaatttccagccgcacagcatctggtgccctcccctccaccctcacaaggagctgccatcctgtttggattttctgtttgtggaccagaaacaaacgtttttccaaaggattagcaaatagggtaatttcctgtgtaacgctgctctggggcctcttcctcatcctggcagaaggagcctggagcccatgaggcagccagcactgtgcccttgctcagtcgtgctgtcccctccctctccctcagtctcctctccatgcccaagtcagtttccagccgctggtcttcatggcattcccagcacagccgggcaccaagaggcaaaacccaaggcctggcttggccgtgttaacgattgtacagacattttttaaaataactttgtgtaatacttttctggaatagtaagttcttgttgaactgtcacaggtgagcttctaggaacacaccgggtgtggttacttccactgggtgtgtccatggtcgtggtctgtgcttttgtaaacgaacagaacacttgaaccacctcccgaattgggtcatcggcttctttacgttgatacttaagagatttgcagctctctttcaaggaaacttcccctactgaaaggcataaaaaggttaaaaaagaaaatccgagagtcccaattccctgtataacagcattaaaataatctgcctgcctggaaagatgagaacactgttgcacaacccaaaatgtgtctttaatttgtgaaaaattaccatggtgagtcagacagtcattttaaacagctgaacagagactatcatcagcaaatagagctcagctttgtagctgcctttaaaatccttgtcccaaatccggtgagctctgcttgctgccgccgcgctcctgggtgatcactcagacgggtcagtgggaataacaggccaacaagacagctttttacatgtgtccaaaggatggcctttcgaaggcctggaagtatttcactgttggaagaagtaaacaagaatgacattccagatggaaatagaattctctctcttgcctttgaccaacatggtactaaggggtttcttctttcccaatgtatgtacgtgccctgctgggggccttactttatagaatgagagcatccgagcttccctaatgaatctggctagttctgtgtctggctgaggatacaggagtgggacatccactctcggatccctcagagcacagaaaccttcagctttgctgtctctgaagtatttcctccagtttccctgcgggcccctatgtttgagtttgatggctgctggatcctcactcaacgaaaactcggttggaaactgttccgcctggcagtccttttttgttgttttccatctcatttcccttccatctgaaagtggcattcagctgacttgctcatttagactgttcacggagtctgaatctgccaacgtggtgttggaggctccaccttgaaaagggccacagtcagggcaactttccccatacaggaaaacttgaaaattacatcaacagtctacgtcacagccaaattatatttcctttataccaaacaaaactatggagaactaaaagtacatcacacaaaacgtttatagtgttttgcatgtgacctatttcagtatttatataactagattagtgctttctagcaaacggttctgttaattagcgagtcactgttgattctgctgtggtggtaagttgataccgtgtaactaatcccgtggatgcctcctggttatttttgtccaaacgaagcagccgtggtagtagctgtctatgattcttgctcagcaaagtaaaataaatgttaaatatgga

SEQ ID NO: 379229 - DNA, 3764 bp, Homo sapiens
  misc_feature (9)..(9): n is a, c, g, or t
  misc_feature (1165)..(1165): n is a, c, g, or t
ggcactcanaacttctccccacctgacccagggctgtgggcatcctcagactatcccagaggcatcgcaagccttcaagctgcagcattgcacggcactcaagggctatgaccaacggaggccgttcagtcgcttctgtttagaggaaggccccctacctcttccacaccctgccctcctatcccttccacaccctgggctgcgtgactccccgcaaccccagggcaccctgccctcctacctgtgggggtttccagccctgaggttgaggacaaacctctcgtgtttaacttgggaggagatgtgtacgttccttttcttttttggactctgagtatgaggcaggctgttctgaggtccccgtggggtgagcctgtctgtcctccctcagagcccaccgttcctatcatcatctagcacctgtccggttccccacgtgagccttgggcaggacgctgcagtgttgatggtttgggttacgtggcgtttacctgggcgccgtccttactgaaaaaggaaacgtccacactgaatgtttctggggcgcgtggtgtgtgtcaggcgcccaccctgtcccactctccccaagggacagtagtacggcacactggggccaccagccagctcaactcatcctcctgtgtcacgcacccccgagggcgcaggaggcctgaggagtggctactggagccgtgtgttaggcagaggcttctgaccatgtctgagctctttacccccaatctcgcagctggcggattcccatgcccggtgcagcctgttgccagccagcctttgagacccagagctccagggcttgtcagaggcagcatggggctccagtggtcctgagtctcatttccctgcctgctctttaggcctttggcacccatggtcacttcactggctttccatttggcttctcacctgggaaatacaaaaatagcccctcctgaagataaaatcattcagaaacagagcaataattctgactcattaacttctacctactcaaaaaagtctgccatgatgatggaccgaagtgaggctttttaacccacaagtaacctttttatttttttgagacagtcttgctctgtctgtcacccaggctggagtacagtggcatgatcttggctcactgcagcctcgacttcctgggctcaantgatctcccacctcagcctcccatgtggctggaaccacaggcacgtgccaccatgcctggctatttttttgttgagctgggctctcgctttgttgcccaggctggtcttgaactcctcggctcaagcaatccttcccactcagcctcctgtagtgtcgagaatataggcgtgggctactacacctgcttcagccgcttctataaaaccgctgacctgtgtgtggaggacaggccaggtgtgtgctcactgcgctgcgaagatgttttgtcacgtgactttccccggatttccatttctttttttctgctttcctcaaaaactaatagaagactgggtgcggtggctcacgcctctaatcgcagcactttgggaggcagcagctggcggatcacaaggccaggagttcgagaccagcctggccaacatgatgaaaccctgtctctaccaaaaatacaaaaattagctgggtgcgatggtgggtgcctgtaatcccagatactcaggaggctgaggcaggagaattgtttgaaccccggagatggaggttgcagtgagccaagatcgtgccattgcactccagcctgggcaacagggcaagattccgtctcaaaaacaaacactattagaaaatgccctggaggtggcggggagttgttgatttgtgaggacagattgaaagcaactcccagggtggcaatgtggctgccggcctctttgaagattgtggtctggcataaggagaggtgcaggcgcctggttctgagcaccttggaatttccagccgcacagcatctggtgccctcccctccaccctcacaaggagctgccatcctgtttggattttctgtttgtggaccagaaacaaacgtttttccaaaggattagcaaatagggtaatttcctgtgtaacgctgctctggggcctcttcctcatcctggcagaaggagcctggagcccatgaggcagccagcactgtgcccttgctcagtcgtgctgtcccctccctctccctcagtctcctctccatgcccaagtcagtttccagccgctggtcttcatggcattcccagcacagccgggcaccaagaggcaaaacccaaggcctggcttggccgtgttaacgattgtacagacattttttaaaataactttgtgtaatacttttctggaatagtaagttcttgttgaactgtcacaggtgagcttctaggaacacaccgggtgtggttacttccactgggtgtgtccatggtcgtggtctgtgcttttgtaaacgaacagaacacttgaaccacctcccgaattgggtcatcggcttctttacgttgatacttaagagatttgcagctctctttcaaggaaacttcccctactgaaaggcataaaaaggttaaaaaagaaaatccgagagtcccaattccctgtataacagcattaaaataatctgcctgcctggaaagatgagaacactgttgcacaacccaaaatgtgtctttaatttgtgaaaaattaccatggtgagtcagacagtcattttaaacagctgaacagagactatcatcagcaaatagagctcagctttgtagctgcctttaaaatccttgtcccaaatccggtgagctctgcttgctgccgccgcgctcctgggtgatcactcagacgggtcagtgggaataacaggccaacaagacagctttttacatgtgtccaaaggatggcctttcgaaggcctggaagtatttcactgttggaagaagtaaacaagaatgacattccagatggaaatagaattctctctcttgcctttgaccaacatggtactaaggggtttcttctttcccaatgtatgtacgtgccctgctgggggccttactttatagaatgagagcatccgagcttccctaatgaatctggctagttctgtgtctggctgaggatacaggagtgggacatccactctcggatccctcagagcacagaaaccttcagctttgctgtctctgaagtatttcctccagtttccctgcgggcccctatgtttgagtttgatggctgctggatcctcactcaacgaaaactcggttggaaactgttccgcctggcagtccttttttgttgttttccatctcatttcccttccatctgaaagtggcattcagctgacttgctcatttagactgttcacggagtctgaatctgccaacgtggtgttggaggctccaccttgaaaagggccacagtcagggcaactttccccatacaggaaaacttgaaaattacatcaacagtctacgtcacagccaaattatatttcctttataccaaacaaaactatggagaactaaaagtacatcacacaaaacgtttatagtgttttgcatgtgacctatttcagtatttatataactagattagtgctttctagcaaacggttctgttaattagcgagtcactgttgattctgctgtggtggtaagttgataccgtgtaactaatcccgtggatgcctcctggttatttttgtccaaacgaagcagccgtggtagtagctgtctatgattcttgctcagcaaagtaaaataaatgttaaatatgga

SEQ ID NO: 379230 - DNA, 3035 bp, Homo sapiens
ggcacgaggaggaagtgacgatacttttggcgcgcgccggttgctgtttcttctctggctccgggaccggcggcggcggcggcggcacgggcggcggcgtagggtgttttaactcaaatgggtgatgaaaaggactcttggaaagtgaaaactttagatgaaattcttcaggaaaagaaacgaaggaaggaacaagaggagaaagcagagataaaacgcttaaaaaattctgatgaccgggattccaagcgggattcccttgaggagggggagctgagagatcactgcatggagatcacaataaggaactccccgtatagaagagaagactctatggaagacagaggagaagaagatgattctttggccatcaaaccaccccagcaaatgtctcggaaagaaaaagttcatcacagaaaagatgaaaagagaaaagagaaacgtaggcatcgtagccattcagcagaaggggggaagcatgctagagtgaaagaaaaagaaagagagcacgaacgtcggaaacgacatcgagaagaacaggataaagctcgccgggaatgggaaagacagaagagaagggaaatggcaagggagcattccaggagagaaagggaccgcttggagcagttagaaaggaagcgggagcgggagcgcaagatgcgggagcagcagaaggagcagcgggagcagaaggagcgcgagcggcgggcggaggagcggcgcaaggagcgggaggcccgcagggaagtgtctgcacatcaccgaacgatgagagaggactacagcgacaaagtgaaagccagccactggagtcgcagcccgcctcggccgccgcgggagcggttcgagttgggagacggccggaagccaggtgaggccaggccggcgcgtgcgcagaagccagcacagttaaaagaagagaaaatggaagaaagggacctgctgtccgacttacaggacatcagcgacagcgagaggaagaccagctcggccgagtcctcgtcagcagaatcaggctcaggttctgaggaagaagaggaggaggaggaagaggaggaggaggaagggagcaccagtgaagaatcagaggaggaggaggaggaagaggaagaggaggaggaggagaccggcagcaactctgaggaggcatcagagcagtctgccgaagaagtaagtgaggaagaaatgagtgaagatgaagaacgagaaaatgaaaaccacctcttggttgttccagagtcacggttcgaccgagattccggggagagtgaagaagcagaggaagaagtgggtgagggaacgccgcagagcagcgccctgacagagggcgactatgtgcccgactcccctgccctgtcgcccatcgagctcaagcaggagctgcccaagtacctgccggccctgcagggctgccggagcgtcgaggagttccagtgcctgaacaggatcgaggagggcacctatggagtggtctacagagcaaaagacaagaaaacagatgaaattgtggctctaaagcggctgaagatggagaaggagaaggagggcttcccgatcacgtcgctgagggagatcaacaccatcctcaaggcccagcatcccaacatcgtcaccgttagagagattgtggtgggcagcaacatggacaagatctacatcgtgatgaactatgtggagcacgacctcaagagcctgatggagaccatgaaacagcccttcctgccaggggaggtgaagaccctgatgatccagctgctgcgtggggtgaaacacctgcacgacaactggatcctgcaccgtgacctcaagacgtccaacctgctgctgagccacgccggcatcctcaaggtgggtgacttcgggctggcgcgggagtacggatcccctctgaaggcctacaccccggtcgtggtgaccctgtggtaccgcgccccagagctgctgcttggtgccaaggaatactccacggccgtggacatgtggtcagtgggttgcatcttcggggagctgctgactcagaagcctctgttccccgggaagtcagaaatcgatcagatcaacaaggtgttcaaggatctggggacccctagtgagaaaatctggcccggctacagcgagctcccagcagtcaagaagatgaccttcagcgagcacccctacaacaacctccgcaagcgcttcggggctctgctctcagaccagggcttcgacctcatgaacaagttcctgacctacttccccgggaggaggatcagcgctgaggacggcctcaagcatgagtatttccgcgagacccccctccccatcgacccctccatgttccccacgtggcccgccaagagcgagcagcagcgtgtgaagcggggcaccagcccgaggccccctgagggaggcctgggctacagccagctgggtgacgacgacctgaaggagacgggcttccaccttaccaccacgaaccagggggcctctgccgcgggccccggcttcagcctcaagttctgaaggtcagagtggaccccgtcatggggagaactcagccgggaccacaggcgtggctactgcggctggagctgcgatgagactcggaactcctcgtcttactttgtgctccatgttttgtttttgtattttggtttgtaaatttgtagaattaaatcattttccttgttgtggaggaaagagctgtgttttctccgtgacttgccagggcatcttcgggtgcccacgtggggcagcacaaacctccacacaccctctcccactctcgacacgcacggggctggctgggccgtgatttggaaaggaactggtgggagccgggtggattgtttaatcttcggagctggagacctgtttctgtgttgggatgagcgatgccctcttgccccaacccactcgtccagaccagccctgtccacacaggcccccggcccccaacccccagccccagctgtgccagcagactcgacaggtttttatacaaggttgttgagttttaaaatgtattaaaatattcttcgaggaaaaaaaac

SEQ ID NO: 379231 - DNA, 3115 bp, Homo sapiens
ggcacgaggaggaagtgacgatacttttggcgcgcgccggttgctgtttcttctctggctccgggaccggcggcggcggcggcggcacgggcggcggcgtagggtgttttaactcaaatgggtgatgaaaaggactcttggaaagtgaaaactttagatgaaattcttcaggaaaagaaacgaaggaaggaacaagaggagaaagcagagataaaacgcttaaaaaatgtaagccatattttttaagtaagtggttttcttaaaggagatttaatttctttgccctcatttttccattagaacaacgcttcttcggtgaagttcttttgtacttccaaatgtcgcagtctgatgaccgggattccaagcgggattcccttgaggagggggagctgagagatcactgcatggagatcacaataaggaactccccgtatagaagagaagactctatggaagacagaggagaagaagatgattctttggccatcaaaccaccccagcaaatgtctcggaaagaaaaagttcatcacagaaaagatgaaaagagaaaagagaaacgtaggcatcgtagccattcagcagaaggggggaagcatgctagagtgaaagaaaaagaaagagagcacgaacgtcggaaacgacatcgagaagaacaggataaagctcgccgggaatgggaaagacagaagagaagggaaatggcaagggagcattccaggagagaaagggaccgcttggagcagttagaaaggaagcgggagcgggagcgcaagatgcgggagcagcagaaggagcagcgggagcagaaggagcgcgagcggcgggcggaggagcggcgcaaggagcgggaggcccgcagggaagtgtctgcacatcaccgaacgatgagagaggactacagcgacaaagtgaaagccagccactggagtcgcagcccgcctcggccgccgcgggagcggttcgagttgggagacggccggaagccagtaaaagaagagaaaatggaagaaagggacctgctgtccgacttacaggacatcagcgacagcgagaggaagaccagctcggccgagtcctcgtcagcagaatcaggctcaggttctgaggaagaagaggaggaggaggaagaggaggaggaggaagggagcaccagtgaagaatcagaggaggaggaggaggaagaggaagaggaggaggaggagaccggcagcaactctgaggaggcatcagagcagtctgccgaagaagtaagtgaggaagaaatgagtgaagatgaagaacgagaaaatgaaaaccacctcttggttgttccagagtcacggttcgaccgagattccggggagagtgaagaagcagaggaagaagtgggtgagggaacgccgcagagcagcgccctgacagagggcgactatgtgcccgactcccctgccctgtcgcccatcgagctcaagcaggagctgcccaagtacctgccggccctgcagggctgccggagcgtcgaggagttccagtgcctgaacaggatcgaggagggcacctatggagtggtctacagagcaaaagacaagaaaacagatgaaattgtggctctaaagcggctgaagatggagaaggagaaggagggcttcccgatcacgtcgctgagggagatcaacaccatcctcaaggcccagcatcccaacatcgtcaccgttagagagattgtggtgggcagcaacatggacaagatctacatcgtgatgaactatgtggagcacgacctcaagagcctgatggagaccatgaaacagcccttcctgccaggggaggtgaagaccctgatgatccagctgctgcgtggggtgaaacacctgcacgacaactggatcctgcaccgtgacctcaagacgtccaacctgctgctgagccacgccggcatcctcaaggtgggtgacttcgggctggcgcgggagtacggatcccctctgaaggcctacaccccggtcgtggtgaccctgtggtaccgcgccccagagctgctgcttggtgccaaggaatactccacggccgtggacatgtggtcagtgggttgcatcttcggggagctgctgactcagaagcctctgttccccgggaagtcagaaatcgatcagatcaacaaggtgttcaaggatctggggacccctagtgagaaaatctggcccggctacagcgagctcccagcagtcaagaagatgaccttcagcgagcacccctacaacaacctccgcaagcgcttcggggctctgctctcagaccagggcttcgacctcatgaacaagttcctgacctacttccccgggaggaggatcagcgctgaggacggcctcaagcatgagtatttccgcgagacccccctccccatcgacccctccatgttccccacgtggcccgccaagagcgagcagcagcgtgtgaagcggggcaccagcccgaggccccctgagggaggcctgggctacagccagctgggtgacgacgacctgaaggagacgggcttccaccttaccaccacgaaccagggggcctctgccgcgggccccggcttcagcctcaagttctgaaggtcagagtggaccccgtcatggggagaactcagccgggaccacaggcgtggctactgcggctggagctgcgatgagactcggaactcctcgtcttactttgtgctccatgttttgtttttgtattttggtttgtaaatttgtagaattaaatcattttccttgttgtggaggaaagagctgtgttttctccgtgacttgccagggcatcttcgggtgcccacgtggggcagcacaaacctccacacaccctctcccactctcgacacgcacggggctggctgggccgtgatttggaaaggaactggtgggagccgggtggattgtttaatcttcggagctggagacctgtttctgtgttgggatgagcgatgccctcttgccccaacccactcgtccagaccagccctgtccacacaggcccccggcccccaacccccagccccagctgtgccagcagactcgacaggtttttatacaaggttgttgagttttaaaatgtattaaaatattcttcgaggaaaaaaaac

SEQ ID NO: 379232 - DNA, 3083 bp, Homo sapiens
ggcacgaggaggaagtgacgatacttttggcgcgcgccggttgctgtttcttctctggctccgggaccggcggcggcggcggcggcacgggcggcggcgtagggtgttttaactcaaatgggtgatgaaaaggactcttggaaagtgaaaactttagatgaaattcttcaggaaaagaaacgaaggaaggaacaagaggagaaagcagagataaaacgcttaaaaaatgtaagccatattttttaagtaagtggttttcttaaaggagatttaatttctttgccctcatttttccattagaacaacgcttcttcggtgaagttcttttgtacttccaaatgtcgcagtctgatgaccgggattccaagcgggattcccttgaggagggggagctgagagatcactgcatggagatcacaataaggaactccccgtatagaagagaagactctatggaagacagaggagaagaagatgattctttggccatcaaaccaccccagcaaatgtctcggaaagaaaaagttcatcacagaaaagatgaaaagagaaaagagaaggaagcatgctagagtgaaagaaaaagaaagagagcacgaacgtcggaaacgacatcgagaagaacaggataaagctcgccgggaatgggaaagacagaagagaagggaaatggcaagggagcattccaggagagaaagggaccgcttggagcagttagaaaggaagcgggagcgggagcgcaagatgcgggagcagcagaaggagcagcgggagcagaaggagcgcgagcggcgggcggaggagcggcgcaaggagcgggaggcccgcagggaagtgtctgcacatcaccgaacgatgagagaggactacagcgacaaagtgaaagccagccactggagtcgcagcccgcctcggccgccgcgggagcggttcgagttgggagacggccggaagccagtaaaagaagagaaaatggaagaaagggacctgctgtccgacttacaggacatcagcgacagcgagaggaagaccagctcggccgagtcctcgtcagcagaatcaggctcaggttctgaggaagaagaggaggaggaggaagaggaggaggaggaagggagcaccagtgaagaatcagaggaggaggaggaggaagaggaagaggaggaggaggagaccggcagcaactctgaggaggcatcagagcagtctgccgaagaagtaagtgaggaagaaatgagtgaagatgaagaacgagaaaatgaaaaccacctcttggttgttccagagtcacggttcgaccgagattccggggagagtgaagaagcagaggaagaagtgggtgagggaacgccgcagagcagcgccctgacagagggcgactatgtgcccgactcccctgccctgtcgcccatcgagctcaagcaggagctgcccaagtacctgccggccctgcagggctgccggagcgtcgaggagttccagtgcctgaacaggatcgaggagggcacctatggagtggtctacagagcaaaagacaagaaaacagatgaaattgtggctctaaagcggctgaagatggagaaggagaaggagggcttcccgatcacgtcgctgagggagatcaacaccatcctcaaggcccagcatcccaacatcgtcaccgttagagagattgtggtgggcagcaacatggacaagatctacatcgtgatgaactatgtggagcacgacctcaagagcctgatggagaccatgaaacagcccttcctgccaggggaggtgaagaccctgatgatccagctgctgcgtggggtgaaacacctgcacgacaactggatcctgcaccgtgacctcaagacgtccaacctgctgctgagccacgccggcatcctcaaggtgggtgacttcgggctggcgcgggagtacggatcccctctgaaggcctacaccccggtcgtggtgaccctgtggtaccgcgccccagagctgctgcttggtgccaaggaatactccacggccgtggacatgtggtcagtgggttgcatcttcggggagctgctgactcagaagcctctgttccccgggaagtcagaaatcgatcagatcaacaaggtgttcaaggatctggggacccctagtgagaaaatctggcccggctacagcgagctcccagcagtcaagaagatgaccttcagcgagcacccctacaacaacctccgcaagcgcttcggggctctgctctcagaccagggcttcgacctcatgaacaagttcctgacctacttccccgggaggaggatcagcgctgaggacggcctcaagcatgagtatttccgcgagacccccctccccatcgacccctccatgttccccacgtggcccgccaagagcgagcagcagcgtgtgaagcggggcaccagcccgaggccccctgagggaggcctgggctacagccagctgggtgacgacgacctgaaggagacgggcttccaccttaccaccacgaaccagggggcctctgccgcgggccccggcttcagcctcaagttctgaaggtcagagtggaccccgtcatggggagaactcagccgggaccacaggcgtggctactgcggctggagctgcgatgagactcggaactcctcgtcttactttgtgctccatgttttgtttttgtattttggtttgtaaatttgtagaattaaatcattttccttgttgtggaggaaagagctgtgttttctccgtgacttgccagggcatcttcgggtgcccacgtggggcagcacaaacctccacacaccctctcccactctcgacacgcacggggctggctgggccgtgatttggaaaggaactggtgggagccgggtggattgtttaatcttcggagctggagacctgtttctgtgttgggatgagcgatgccctcttgccccaacccactcgtccagaccagccctgtccacacaggcccccggcccccaacccccagccccagctgtgccagcagactcgacaggtttttatacaaggttgttgagttttaaaatgtattaaaatattcttcgaggaaaaaaaac

SEQ ID NO: 379233 - DNA, 2581 bp, Homo sapiens
  misc_feature (9)..(9): n is a, c, g, or t
ggcactcanaacttctccccacctgacccagggctgtgggcatcctcagactatcccagaggcatcgcaagccttcaagctgcagcattgcacggcactcaagggctatgaccaacggaggccgttcagtcgcttctgtttagaggaaggccccctacctcttccacaccctgccctcctatcccttccacaccctgggctgcgtgactccccgcaaccccagggcaccctgccctcctacctgtgggggtttccagccctgaggttgaggacaaacctctcgtgtttaacttgggaggagatgtgtacgttccttttcttttttggactctgagtatgaggcaggctgttctgaggtccccgtggggtgagcctgtctgtcctccctcagagcccaccgttcctatcatcatctagcacctgtccggttccccacgtgagccttgggcaggacgctgcagtgttgatggtttgggttacgtggcgtttacctgggcgccgtccttactgaaaaaggaaacgtccacactgaatgtttctggggcgcgtggtgtgtgtcaggcgcccaccctgtcccactctccccaagggacagtagtacggcacactggggccaccagccagctcaactcatcctcctgtgtcacgcacccccgagggcgcaggaggcctgaggagtggctactggagccgtgtgttaggcagaggcttctgaccatgtctgagctctttacccccaatctcgcagctggcggattcccatgcccggtgcagcctgttgccagccagcctttgagacccagagctccagggcttgtcagaggcagcatggggctccagtggtcctgagtctcatttccctgcctgctctttaggcctttggcacccatggtcacttcactggctttccatttggcttctcacctgggaaatacaaaaatagcccctcctgaagataaaatcattcagaaacagagcaataattctgactcattaacttctacctactcaaaaaagttcagtttccagccgctggtcttcatggcattcccagcacagccgggcaccaagaggcaaaacccaaggcctggcttggccgtgttaacgattgtacagacattttttaaaataactttgtgtaatacttttctggaatagtaagttcttgttgaactgtcacaggtgagcttctaggaacacaccgggtgtggttacttccactgggtgtgtccatggtcgtggtctgtgcttttgtaaacgaacagaacacttgaaccacctcccgaattgggtcatcggcttctttacgttgatacttaagagatttgcagctctctttcaaggaaacttcccctactgaaaggcataaaaaggttaaaaaagaaaatccgagagtcccaattccctgtataacagcattaaaataatctgcctgcctggaaagatgagaacactgttgcacaacccaaaatgtgtctttaatttgtgaaaaattaccatggtgagtcagacagtcattttaaacagctgaacagagactatcatcagcaaatagagctcagctttgtagctgcctttaaaatccttgtcccaaatccggtgagctctgcttgctgccgccgcgctcctgggtgatcactcagacgggtcagtgggaataacaggccaacaagacagctttttacatgtgtccaaaggatggcctttcgaaggcctggaagtatttcactgttggaagaagtaaacaagaatgacattccagatggaaatagaattctctctcttgcctttgaccaacatggtactaaggggtttcttctttcccaatgtatgtacgtgccctgctgggggccttactttatagaatgagagcatccgagcttccctaatgaatctggctagttctgtgtctggctgaggatacaggagtgggacatccactctcggatccctcagagcacagaaaccttcagctttgctgtctctgaagtatttcctccagtttccctgcgggcccctatgtttgagtttgatggctgctggatcctcactcaacgaaaactcggttggaaactgttccgcctggcagtccttttttgttgttttccatctcatttcccttccatctgaaagtggcattcagctgacttgctcatttagactgttcacggagtctgaatctgccaacgtggtgttggaggctccaccttgaaaagggccacagtcagggcaactttccccatacaggaaaacttgaaaattacatcaacagtctacgtcacagccaaattatatttcctttataccaaacaaaactatggagaactaaaagtacatcacacaaaacgtttatagtgttttgcatgtgacctatttcagtatttatataactagattagtgctttctagcaaacggttctgttaattagcgagtcactgttgattctgctgtggtggtaagttgataccgtgtaactaatcccgtggatgcctcctggttatttttgtccaaacgaagcagccgtggtagtagctgtctatgattcttgctcagcaaagtaaaataaatgttaaatatgga

SEQ ID NO: 379234 - DNA, 3030 bp, Homo sapiens
ggcacgaggaggaagtgacgatacttttggcgcgcgccggttgctgtttcttctctggctccgggaccggcggcggcggcggcggcacgggcggcggcgtagggtgttttaactcaaatgggtgatgaaaaggactcttggaaagtgaaaactttagatgaaattcttcaggaaaagaaacgaaggaaggaacaagaggagaaagcagagataaaacgcttaaaaaattctgatgaccgggattccaagcgggattcccttgaggagggggagctgagagatcactgcatggagatcacaataaggaactccccgtatagaagagaagactctatggaagacagaggagaagaagatgattctttggccatcaaaccaccccagcaaatgtctcggaaagaaaaagttcatcacagaaaagatgaaaagagaaaagagaaggaagcatgctagagtgaaagaaaaagaaagagagcacgaacgtcggaaacgacatcgagaagaacaggataaagctcgccgggaatgggaaagacagaagagaagggaaatggcaagggagcattccaggagagaaagggggaatgatggcgtgtgcctcttcagggaccgcttggagcagttagaaaggaagcgggagcgggagcgcaagatgcgggagcagcagaaggagcagcgggagcagaaggagcgcgagcggcgggcggaggagcggcgcaaggagcgggaggcccgcagggaagtgtctgcacatcaccgaacgatgagagaggactacagcgacaaagtgaaagccagccactggagtcgcagcccgcctcggccgccgcgggagcggttcgagttgggagacggccggaagccaggtgaggccaggccggcgcgtgcgcagaagccagcacagttaaaagaagagaaaatggaagaaagggacctgctgtccgacttacaggacatcagcgacagcgagaggaagaccagctcggccgagtcctcgtcagcagaatcaggctcaggttctgaggaagaagaggaggaggaggaagaggaggaggaggaagggagcaccagtgaagaatcagaggaggaggaggaggaagaggaagaggaggaggaggagaccggcagcaactctgaggaggcatcagagcagtctgccgaagaagtaagtgaggaagaaatgagtgaagatgaagaacgagaaaatgaaaaccacctcttggttgttccagagtcacggttcgaccgagattccggggagagtgaagaagcagaggaagaagtgggtgagggaacgccgcagagcagcgccctgacagagggcgactatgtgcccgactcccctgccctgtcgcccatcgagctcaagcaggagctgcccaagtacctgccggccctgcagggctgccggagcgtcgaggagttccagtgcctgaacaggatcgaggagggcacctatggagtggtctacagagcaaaagacaagaaaacagatgaaattgtggctctaaagcggctgaagatggagaaggagaaggagggcttcccgatcacgtcgctgagggagatcaacaccatcctcaaggcccagcatcccaacatcgtcaccgttagagagattgtggtgggcagcaacatggacaagatctacatcgtgatgaactatgtggagcacgacctcaagagcctgatggagaccatgaaacagcccttcctgccaggggaggtgaagaccctgatgatccagctgctgcgtggggtgaaacacctgcacgacaactggatcctgcaccgtgacctcaagacgtccaacctgctgctgagccacgccggcatcctcaaggtgggtgacttcgggctggcgcgggagtacggatcccctctgaaggcctacaccccggtcgtggtgaccctgtggtaccgcgccccagagctgctgcttggtgccaaggaatactccacggccgtggacatgtggtcagtgggttgcatcttcggggagctgctgactcagaagcctctgttccccgggaagtcagaaatcgatcagatcaacaaggtgttcaaggatctggggacccctagtgagaaaatctggcccggctacagcgagctcccagcagtcaagaagatgaccttcagcgagcacccctacaacaacctccgcaagcgcttcggggctctgctctcagaccagggcttcgacctcatgaacaagttcctgacctacttccccgggaggaggatcagcgctgaggacggcctcaagcatgagtatttccgcgagacccccctccccatcgacccctccatgttccccacgtggcccgccaagagcgagcagcagcgtgtgaagcggggcaccagcccgaggccccctgagggaggcctgggctacagccagctgggtgacgacgacctgaaggagacgggcttccaccttaccaccacgaaccagggggcctctgccgcgggccccggcttcagcctcaagttctgaaggtcagagtggaccccgtcatggggagaactcagccgggaccacaggcgtggctactgcggctggagctgcgatgagactcggaactcctcgtcttactttgtgctccatgttttgtttttgtattttggtttgtaaatttgtagaattaaatcattttccttgttgtggaggaaagagctgtgttttctccgtgacttgccagggcatcttcgggtgcccacgtggggcagcacaaacctccacacaccctctcccactctcgacacgcacggggctggctgggccgtgatttggaaaggaactggtgggagccgggtggattgtttaatcttcggagctggagacctgtttctgtgttgggatgagcgatgccctcttgccccaacccactcgtccagaccagccctgtccacacaggcccccggcccccaacccccagccccagctgtgccagcagactcgacaggtttttatacaaggttgttgagttttaaaatgtattaaaatattcttcgaggaaaaaaaac

SEQ ID NO: 379235 - DNA, 3244 bp, Homo sapiens
ggcacgaggaggaagtgacgatacttttggcgcgcgccggttgctgtttcttctctggctccgggaccggcggcggcggcggcggcacgggcggcggcgtagggtgttttaactcaaatgggtgatgaaaaggactcttggaaagtgaaaactttagatgaaattcttcaggaaaagaaacgaaggaaggaacaagaggagaaagcagagataaaacgcttaaaaaattctgatgaccgggattccaagcgggattcccttgaggagggggagctgagagatcactgcatggagatcacaataaggaactccccgtatagaagagaagactctatggaagacagaggagaagaagatgattctttggccatcaaaccaccccagcaaatgtctcggaaagaaaaagttcatcacagaaaagatgaaaagagaaaagagaaacgtaggcatcgtagccattcagcagaaggggggaagcatgctagagtgaaagaaaaagaaagagagcacgaacgtcggaaacgacatcgagaagaacaggataaagctcgccgggaatgggaaagacagaagagaagggaaatggcaagggagcattccaggagagaaagggaccgcttggagcagttagaaaggaagcgggagcgggagcgcaagatgcgggagcagcagaaggagcagcgggagcagaaggagcgcgagcggcgggcggaggagcggcgcaaggagcgggaggcccgcagggaagtgtctgcacatcaccgaacgatgagagaggactacagcgacaaagtgaaagccagccactggagtcgcagcccgcctcggccgccgcgggagcggttcgagttgggagacggccggaagccagtaaaagaagagaaaatggaagaaagggacctgctgtccgacttacaggacatcagcgacagcgagaggaagaccagctcggccgagtcctcgtcagcagaatcaggctcaggttctgaggaagaagaggaggaggaggaagaggaggaggaggaagggagcaccagtgaagaatcagaggaggaggaggaggaagaggaagaggaggaggaggagaccggcagcaactctgaggaggcatcagagcagtctgccgaagaagtaagtgaggaagaaatgagtgaagatgaagaacgagaaaatgaaaaccacctcttggttgttccagagtcacggttcgaccgagattccggggagagtgaagaagcagaggaagaagtgggtgagggaacgccgcagagcagcgccctgacagagggcgactatgtgcccgactcccctgccctgtcgcccatcgagctcaagcaggagctgcccaagtacctgccggccctgcagggctgccggagcgtcgaggagttccagtgcctgaacaggatcgaggagggcacctatggagtggtctacagagcaaaagacaagaaaacagatgaaattgtggctctaaagcggctgaagatggagaaggagaaggagggcttcccgatcacgtcgctgagggagatcaacaccatcctcaaggcccagcatcccaacatcgtcaccgttagagtgagcatggccccaccacgcctggccccgggtggaaggcttttccgacagggccccgtgctgtcctggggccgggtgcttcctacactctcctgcacttagtggagcccttcacagaccacacagaagcaagtatttgcctcccgggtggcaccggaggtccttactgtccctcagcatctgcgcccgggtgcaggggtgggtgggggcctggaggtgcccagcacccacagagccgtgccctgcaggagattgtggtgggcagcaacatggacaagatctacatcgtgatgaactatgtggagcacgacctcaagagcctgatggagaccatgaaacagcccttcctgccaggggaggtgaagaccctgatgatccagctgctgcgtggggtgaaacacctgcacgacaactggatcctgcaccgtgacctcaagacgtccaacctgctgctgagccacgccggcatcctcaaggtgggtgacttcgggctggcgcgggagtacggatcccctctgaaggcctacaccccggtcgtggtgaccctgtggtaccgcgccccagagctgctgcttggtgccaaggaatactccacggccgtggacatgtggtcagtgggttgcatcttcggggagctgctgactcagaagcctctgttccccgggaagtcagaaatcgatcagatcaacaaggtgttcaaggatctggggacccctagtgagaaaatctggcccggctacagcgagctcccagcagtcaagaagatgaccttcagcgagcacccctacaacaacctccgcaagcgcttcggggctctgctctcagaccagggcttcgacctcatgaacaagttcctgacctacttccccgggaggaggatcagcgctgaggacggcctcaagcatgagtatttccgcgagacccccctccccatcgacccctccatgttccccacgtggcccgccaagagcgagcagcagcgtgtgaagcggggcaccagcccgaggccccctgagggaggcctgggctacagccagctgggtgacgacgacctgaaggagacgggcttccaccttaccaccacgaaccagggggcctctgccgcgggccccggcttcagcctcaagttctgaaggtcagagtggaccccgtcatggggagaactcagccgggaccacaggcgtggctactgcggctggagctgcgatgagactcggaactcctcgtcttactttgtgctccatgttttgtttttgtattttggtttgtaaatttgtagaattaaatcattttccttgttgtggaggaaagagctgtgttttctccgtgacttgccagggcatcttcgggtgcccacgtggggcagcacaaacctccacacaccctctcccactctcgacacgcacggggctggctgggccgtgatttggaaaggaactggtgggagccgggtggattgtttaatcttcggagctggagacctgtttctgtgttgggatgagcgatgccctcttgccccaacccactcgtccagaccagccctgtccacacaggcccccggcccccaacccccagccccagctgtgccagcagactcgacaggtttttatacaaggttgttgagttttaaaatgtattaaaatattcttcgaggaaaaaaaac

SEQ ID NO: 379236 - DNA, 3201 bp, Homo sapiens
ggcacgaggaggaagtgacgatacttttggcgcgcgccggttgctgtttcttctctggctccgggaccggcggcggcggcggcggcacgggcggcggcgtagggtgttttaactcaaatgggtgatgaaaaggactcttggaaagtgaaaactttagatgaaattcttcaggaaaagaaacgaaggaaggaacaagaggagaaagcagagataaaacgcttaaaaaattctgatgaccgggattccaagcgggattcccttgaggagggggagctgagagatcactgcatggagatcacaataaggaactccccgtatagaagagaagactctatggaagacagaggagaagaagatgattctttggccatcaaaccaccccagcaaatgtctcggaaagaaaaagttcatcacagaaaagatgaaaagagaaaagagaaacgtaggcatcgtagccattcagcagaaggggggaagcatgctagagtgaaagaaaaagaaagagagcacgaacgtcggaaacgacatcgagaagaacaggataaagctcgccgggaatgggaaagacagaagagaagggaaatggcaagggagcattccaggagagaaagggaccgcttggagcagttagaaaggaagcgggagcgggagcgcaagatgcgggagcagcagaaggagcagcgggagcagaaggagcgcgagcggcgggcggaggagcggcgcaaggagcgggaggcccgcagggaagtgtctgcacatcaccgaacgatgagagaggactacagcgacaaagtgaaagccagccactggagtcgcagcccgcctcggccgccgcgggagcggttcgagttgggagacggccggaagccagtaaaagaagagaaaatggaagaaagggacctgctgtccgacttacaggacatcagcgacagcgagaggaagaccagctcggccgagtcctcgtcagcagaatcaggctcaggttctgaggaagaagaggaggaggaggaagaggaggaggaggaagggagcaccagtgaagaatcagaggaggaggaggaggaagaggaagaggaggaggaggagaccggcagcaactctgaggaggcatcagagcagtctgccgaagaagtaagtgaggaagaaatgagtgaagatgaagaacgagaaaatgaaaaccacctcttggttgttccagagtcacggttcgaccgagattccggggagagtgaagaagcagaggaagaagtgggtgagggaacgccgcagagcagcgccctgacagagggcgactatgtgcccgactcccctgccctgtcgcccatcgagctcaagcaggagctgcccaagtacctgccggccctgcagggctgccggagcgtcgaggagttccagtgcctgaacaggatcgaggagggcacctatggagtggtctacagagcaaaagacaagaaaacagatgaaattgtggctctaaagcggctgaagatggagaaggagaaggagggcttcccgatcacgtcgctgagggagatcaacaccatcctcaaggcccagcatcccaacatcgtcaccgttagagagattgtggtgggcagcaacatggacaagatctacatcgtgatgaactatgtggagcacgacctcaagagcctgatggagaccatgaaacagcccttcctgccaggtacagccgcgccccggggtcctgtctgcgtacaagtgggggcagtgtcctggtcacccccgcggtgacagtgctgcagggagggccagctgcatccacagggaaagccctgagaagcctctgttgctgccgaggcgagcgggccaccctgagtgccctgggcttggggcggccgggtccacatgggagcctccctccctcccaggggaggtgaagaccctgatgatccagctgctgcgtggggtgaaacacctgcacgacaactggatcctgcaccgtgacctcaagacgtccaacctgctgctgagccacgccggcatcctcaaggtgggtgacttcgggctggcgcgggagtacggatcccctctgaaggcctacaccccggtcgtggtgaccctgtggtaccgcgccccagagctgctgcttggtgccaaggaatactccacggccgtggacatgtggtcagtgggttgcatcttcggggagctgctgactcagaagcctctgttccccgggaagtcagaaatcgatcagatcaacaaggtgttcaaggatctggggacccctagtgagaaaatctggcccggctacagcgagctcccagcagtcaagaagatgaccttcagcgagcacccctacaacaacctccgcaagcgcttcggggctctgctctcagaccagggcttcgacctcatgaacaagttcctgacctacttccccgggaggaggatcagcgctgaggacggcctcaagcatgagtatttccgcgagacccccctccccatcgacccctccatgttccccacgtggcccgccaagagcgagcagcagcgtgtgaagcggggcaccagcccgaggccccctgagggaggcctgggctacagccagctgggtgacgacgacctgaaggagacgggcttccaccttaccaccacgaaccagggggcctctgccgcgggccccggcttcagcctcaagttctgaaggtcagagtggaccccgtcatggggagaactcagccgggaccacaggcgtggctactgcggctggagctgcgatgagactcggaactcctcgtcttactttgtgctccatgttttgtttttgtattttggtttgtaaatttgtagaattaaatcattttccttgttgtggaggaaagagctgtgttttctccgtgacttgccagggcatcttcgggtgcccacgtggggcagcacaaacctccacacaccctctcccactctcgacacgcacggggctggctgggccgtgatttggaaaggaactggtgggagccgggtggattgtttaatcttcggagctggagacctgtttctgtgttgggatgagcgatgccctcttgccccaacccactcgtccagaccagccctgtccacacaggcccccggcccccaacccccagccccagctgtgccagcagactcgacaggtttttatacaaggttgttgagttttaaaatgtattaaaatattcttcgaggaaaaaaaac

SEQ ID NO: 379237 - DNA, 4357 bp, Homo sapiens
  misc_feature (9)..(9): n is a, c, g, or t
  misc_feature (1165)..(1165): n is a, c, g, or t
ggcactcanaacttctccccacctgacccagggctgtgggcatcctcagactatcccagaggcatcgcaagccttcaagctgcagcattgcacggcactcaagggctatgaccaacggaggccgttcagtcgcttctgtttagaggaaggccccctacctcttccacaccctgccctcctatcccttccacaccctgggctgcgtgactccccgcaaccccagggcaccctgccctcctacctgtgggggtttccagccctgaggttgaggacaaacctctcgtgtttaacttgggaggagatgtgtacgttccttttcttttttggactctgagtatgaggcaggctgttctgaggtccccgtggggtgagcctgtctgtcctccctcagagcccaccgttcctatcatcatctagcacctgtccggttccccacgtgagccttgggcaggacgctgcagtgttgatggtttgggttacgtggcgtttacctgggcgccgtccttactgaaaaaggaaacgtccacactgaatgtttctggggcgcgtggtgtgtgtcaggcgcccaccctgtcccactctccccaagggacagtagtacggcacactggggccaccagccagctcaactcatcctcctgtgtcacgcacccccgagggcgcaggaggcctgaggagtggctactggagccgtgtgttaggcagaggcttctgaccatgtctgagctctttacccccaatctcgcagctggcggattcccatgcccggtgcagcctgttgccagccagcctttgagacccagagctccagggcttgtcagaggcagcatggggctccagtggtcctgagtctcatttccctgcctgctctttaggcctttggcacccatggtcacttcactggctttccatttggcttctcacctgggaaatacaaaaatagcccctcctgaagataaaatcattcagaaacagagcaataattctgactcattaacttctacctactcaaaaaagtctgccatgatgatggaccgaagtgaggctttttaacccacaagtaacctttttatttttttgagacagtcttgctctgtctgtcacccaggctggagtacagtggcatgatcttggctcactgcagcctcgacttcctgggctcaantgatctcccacctcagcctcccatgtggctggaaccacaggcacgtgccaccatgcctggctatttttttgttgagctgggctctcgctttgttgcccaggctggtcttgaactcctcggctcaagcaatccttcccactcagcctcctgtagtgtcgagaatataggcgtgggctactacacctgcttcagccgcttctataaaaccgctgacctgtgtgtggaggacaggccaggtgtgtgctcactgcgctgcgaagatgttttgtcacgtgactttccccggatttccatttctttttttctgctttcctcaaaaactaatagaagactgggtgcggtggctcacgcctctaatcgcagcactttgggaggcagcagctggcggatcacaaggccaggagttcgagaccagcctggccaacatgatgaaaccctgtctctaccaaaaatacaaaaattagctgggtgcgatggtgggtgcctgtaatcccagatactcaggaggctgaggcaggagaattgtttgaaccccggagatggaggttgcagtgagccaagatcgtgccattgcactccagcctgggcaacagggcaagattccgtctcaaaaacaaacactattagaaaatgccctggaggtggcggggagttgttgatttgtgaggacagattgaaagcaactcccagggtggccttgtccacctccccatcgagaatgtggctgccggcctctttgaagattgtggtctggcataaggagaggtgcaggcgcctggttctgagcaccttggaatttccagccgcacagcatctggtgccctcccctccaccctcacaaggagctgccatcctgtttggattttctgtttgtggaccagaaacaaacgtttttccaaaggattagcaaatagggtaatttcctgtgtaacgctgctctggggcctcttcctcatcctggcagaaggagcctggagcccatgaggcagccagcactgtgcccttgctcagtcgtgctgtcccctccctctccctcagtctcctctccatgcccaagtcagtttccagccgctggtcttcatggcattcccagcacagccgggcaccaagaggcaaaacccaaggcctggcttggccgtgttaacgattgtacagacattttttaaaataactttgtgtaatacttttctggaatagtaagttcttgttgaactgtcacaggtgagcttctaggaacacaccgggtgtggttacttccactgggtgtgtccatggtcgtggtctgtgcttttgtaaacgaacagaacacttgaaccacctcccgaattgggtcatcggcttctttacgttgatacttaagagatttgcagctctctttcaaggaaacttcccctactgaaaggcataaaaaggttaaaaaagaaaatccgagagtcccaattccctgtataacagcattaaaataatctgcctgcctggaaagatgagaacactgttgcacaacccaaaatgtgtctttaatttgtgaaaaattaccatggtgagtcagacagtcattttaaacagctgaacagagactatcatcagcaaatagagctcagctttgtagctgcctttaaaatccttgtcccaaatccggtgagctctgcttgctgccgccgcgctcctgggtgatcactcagacgggtcagtgggaataacaggccaacaagacagctttttacatgtgtccaaaggatggcctttcgaaggcctggaagtatttcactgttggaagaagtaaacaagaatgacattccagatggaaatagaattctctctcttgcctttgaccaacatggtactaaggggtttcttctttcccaatgtatgtacgtgccctgctgggggccttactttatagaatgagagcatccgagcttccctaatgaatctggctagttctgtgtctggctgaggatacaggagtgggacatccactctcggatccctcagagcacagaaaccttcagctttgctgtctctgaagtatttcctccagtttccctgcgggcccctatgtttgagtttgatggctgctggatcctcactcaacgaaaactcggttggaaactgttccgcctggcagtccttttttgttgttttccatctcatttcccttccatctgaaagtggcattcagctgacttgctcatttagactgttcacggagtctgaatctgccaacgtggtgttggaggctccaccttgaaaagggccacagtcagggcaactttccccatacaggaaaacttgaaaattacatcaacagtctacgtcacagccaaattatatttcctttataccaaacaaaactatggagaactaaaagtacatcacacaaaacgtttatagtgttttgcatgtgacctatttcagtatttatataactagattagtgctttctagcaaacggttctgttaattagcgagtcactgttgattctgctgtggtggtaagttgataccgtgtaactaatcccgtggatgcctcctggttatttttgtccaaacgaagcagccgtggtagtagctgtctatgattcttgctcagcaaagtaaaataaatgttaaatatggaaaacacaaaaaaaaaaaaaacaataaaaaaaaaaaaaaaaaaaaaaaaaaaatcaccaggaaaagcgactagaagatagcaaaaaaacgggtaaggatagaaatgaacataatagaatgtactctgatgataaagggagacgaggtaccggactcaaactttgcctaacccttgttgcgtgaccaattcccatggctaacagaagacgtgttaggcatttcaattgaccaactatgaaacaatcccacactagacctccgcacggggactacacagacatcgcagcgacgccggaaagcccacacacaggcgcgcatcccaacggagcgtaacagggaaggcacaacactaccctgcgcacaacaacagtaaggcccagcagagaaggaaaacgtcgacatggacaacgacacaccgggcacaaactattggccgcgacgaagaactgacgaggtcaactcacaattaacaccccaggacgaagccaaccaggcaaatgatagcagcgaaccgaagcacagaagaagcaaacgaacacagagaaccaacatagccaacacaacagaagcgac

SEQ ID NO: 379238 - DNA, 2846 bp, Homo sapiens
  misc_feature (1626)..(1626): n is a, c, g, or t
gaattccattccattccaatccattcctttcctttcgcttgcattccattctattcccttctactgcatggagatcacaataaggaactccccgtatagaagagaagactctatggaagacagaggagaagaagatgattctttggccatcaaaccaccccagcaaatgtctcggaaagaaaaagttcatcacagaaaagatgaaaagagaaaagagaaggaagcatgctagagtgaaagaaaaagaaagagagcacgaacgtcggaaacgacatcgagaagaacaggataaagctcgccgggaatgggaaagacagaagagaagggaaatggcaagggagcattccaggagagaaagggggaatgatggcgtgtgcctcttcagggaccgcttggagcagttagaaaggaagcgggagcgggagcgcaagatgcgggagcagcagaaggagcagcgggagcagaaggagcgcgagcggcgggcggaggagcggcgcaaggagcgggaggcccgcagggaagtgtctgcacatcaccgaacgatgagagaggactacagcgacaaagtgaaagccagccactggagtcgcagcccgcctcggccgccgcgggagcggttcgagttgggagacggccggaagccagtaaaagaagagaaaatggaagaaagggacctgctgtccgacttacaggacatcagcgacagcgagaggaagaccagctcggccgagtcctcgtcagcagaatcaggctcaggttctgaggaagaagaggaggaggaggaagaggaggaggaggaagggagcaccagtgaagaatcagaggaggaggaggaggaagaggaagaggaggaggaggagaccggcagcaactctgaggaggcatcagagcagtctgccgaagaagtaagtgaggaagaaatgagtgaagatgaagaacgagaaaatgaaaaccacctcttggttgttccagagtcacggttcgaccgagattccggggagagtgaagaagcagaggaagaagtgggtgagggaacgccgcagagcagcgccctgacagagggcgactatgtgcccgactcccctgccctgtcgcccatcgagctcaagcaggagctgcccaagtacctgccggccctgcagggctgccggagcgtcgaggagttccagtgcctgaacaggatcgaggagggcacctatggagtggtctacagagcaaaagacaagaaaacagatgaaattgtggctctaaagcggctgaagatggagaaggagaaggagggcttcccgatcacgtcgctgagggagatcaacaccatcctcaaggcccagcatcccaacatcgtcaccgttagagagattgtggtgggcagcaacatggacaagatctacatcgtgatgaactatgtggagcacgacctcaagagcctgatggagaccatgaaacagcccttcctgccaggggaggtgaagaccctgatgatccagctgctgcgtggggtgaaacacctgcacgacaactggatcctgcaccgtgacctcaagacgtccaacctgctgctgagccacgccggcatcctcaaggtgagcccccctccgagtggcccatcccagggtgacccgcccnggcccacccacagccgcccatctgtcgttgcaggtgggtgacttcgggctggcgcgggagtacggatcccctctgaaggcctacaccccggtcgtggtgaccctgtggtaccgcgccccagagctgctgcttggtgccaaggaatactccacggccgtggacatgtggtcagtgggttgcatcttcggggagctgctgactcagaagcctctgttccccgggaagtcagaaatcgatcagatcaacaaggtgttcaaggatctggggacccctagtgagaaaatctggcccggctacagcgagctcccagcagtcaagaagatgaccttcagcgagcacccctacaacaacctccgcaagcgcttcggggctctgctctcagaccagggcttcgacctcatgaacaagttcctgacctacttccccgggaggaggatcagcgctgaggacggcctcaagcatgagtatttccgcgagacccccctccccatcgacccctccatgttccccacgtggcccgccaagagcgagcagcagcgtgtgaagcggggcaccagcccgaggccccctgagggaggcctgggctacagccagctgggtgacgacgacctgaaggagacgggcttccaccttaccaccacgaaccagggggcctctgccgcgggccccggcttcagcctcaagttctgaaggtcagagtggaccccgtcatggggagaactcagccgggaccacaggcgtggctactgcggctggagctgcgatgagactcggaactcctcgtcttactttgtgctccatgttttgtttttgtattttggtttgtaaatttgtagaattaaatcattttccttgttgtggaggaaagagctgtgttttctccgtgacttgccagggcatcttcgggtgcccacgtggggcagcacaaacctccacacaccctctcccactctcgacacgcacggggctggctgggccgtgatttggaaaggaactggtgggagccgggtggattgtttaatcttcggagctggagacctgtttctgtgttgggatgagcgatgccctcttgccccaacccactcgtccagaccagccctgtccacacaggcccccggcccccaacccccagccccagctgtgccagcagactcgacaggtttttatacaaggttgttgagttttaaaatgtattaaaatattcttcgaggaaaaaaaac

SEQ ID NO: 379239 - DNA, 3335 bp, Homo sapiens
ggcacgaggaggaagtgacgatacttttggcgcgcgccggttgctgtttcttctctggctccgggaccggcggcggcggcggcggcacgggcggcggcgtagggtgttttaactcaaatgggtgatgaaaaggactcttggaaagtgaaaactttagatgaaattcttcaggaaaagaaacgaaggaaggaacaagaggagaaagcagagataaaacgcttaaaaaattctgatgaccgggattccaagcgggattcccttgaggagggggagctgagagatcactgcatggagatcacaataaggaactccccgtatagaagagaagactctatggaagacagaggagaagaagatgattctttggccatcaaaccaccccagcaaatgtctcggaaagaaaaagttcatcacagaaaagatgaaaagagaaaagagaaacgtaggcatcgtagccattcagcagaaggggggaagcatgctagagtgaaagaaaaagaaagagagcacgaacgtcggaaacgacatcgagaagaacaggataaagctcgccgggaatgggaaagacagaagagaagggaaatggcaagggagcattccaggagagaaagggaccgcttggagcagttagaaaggaagcgggagcgggagcgcaagatgcgggagcagcagaaggagcagcgggagcagaaggagcgcgagcggcgggcggaggagcggcgcaaggagcgggaggcccgcagggaagtgtctgcacatcaccgaacgatgagagaggactacagcgacaaagtgaaagccagccactggagtcgcagcccgcctcggccgccgcgggagcggttcgagttgggagacggccggaagccagtaaaagaagagaaaatggaagaaagggacctgctgtccgacttacaggacatcagcgacagcgagaggaagaccagctcggccgagtcctcgtcagcagaatcaggctcaggttctgaggaagaagaggaggaggaggaagaggaggaggaggaagggagcaccagtgaagaatcagaggaggaggaggaggaagaggaagaggaggaggaggagaccggcagcaactctgaggaggcatcagagcagtctgccgaagaagtaagtgaggaagaaatgagtgaagatgaagaacgagaaaatgaaaaccacctcttggttgttccagagtcacggttcgaccgagattccggggagagtgaagaagcagaggaagaagtgggtggctgccggagcgtcgaggagttccagtgcctgaacaggatcgaggagggcacctatggagtggtctacagagcaaaagacaagaaaacagatgaaattgtggctctaaagcggctgaagatggagaaggagaaggagggcttcccgatcacgtcgctgagggagatcaacaccatcctcaaggcccagcatcccaacatcgtcaccgttagagtgagcatggccccaccacgcctggccccgggtggaaggcttttccgacagggccccgtgctgtcctggggccgggtgcttcctacactctcctgcacttagtggagcccttcacagaccacacagaagcaagtatttgcctcccgggtggcaccggaggtccttactgtccctcagcatctgcgcccgggtgcaggggtgggtgggggcctggaggtgcccagcacccacagagccgtgccctgcaggagattgtggtgggcagcaacatggacaagatctacatcgtgatgaactatgtggagcacgacctcaagagcctgatggagaccatgaaacagcccttcctgccaggtacagccgcgccccggggtcctgtctgcgtacaagtgggggcagtgtcctggtcacccccgcggtgacagtgctgcagggagggccagctgcatccacagggaaagccctgagaagcctctgttgctgccgaggcgagcgggccaccctgagtgccctgggcttggggcggccgggtccacatgggagcctccctccctcccaggggaggtgaagaccctgatgatccagctgctgcgtggggtgaaacacctgcacgacaactggatcctgcaccgtgacctcaagacgtccaacctgctgctgagccacgccggcatcctcaaggtgggtgacttcgggctggcgcgggagtacggatcccctctgaaggcctacaccccggtcgtggtgaccctgtggtaccgcgccccagagctgctgcttggtgccaaggaatactccacggccgtggacatgtggtcagtgggttgcatcttcggggagctgctgactcagaagcctctgttccccgggaagtcagaaatcgatcagatcaacaaggtgttcaaggatctggggacccctagtgagaaaatctggcccggctacagcgagctcccagcagtcaagaagatgaccttcagcgagcacccctacaacaacctccgcaagcgcttcggggctctgctctcagaccagggcttcgacctcatgaacaagttcctgacctacttccccgggaggaggatcagcgctgaggacggcctcaagcatgagtatttccgcgagacccccctccccatcgacccctccatgttccccacgtggcccgccaagagcgagcagcagcgtgtgaagcggggcaccagcccgaggccccctgagggaggcctgggctacagccagctgggtgacgacgacctgaaggagacgggcttccaccttaccaccacgaaccagggggcctctgccgcgggccccggcttcagcctcaagttctgaaggtcagagtggaccccgtcatggggagaactcagccgggaccacaggcgtggctactgcggctggagctgcgatgagactcggaactcctcgtcttactttgtgctccatgttttgtttttgtattttggtttgtaaatttgtagaattaaatcattttccttgttgtggaggaaagagctgtgttttctccgtgacttgccagggcatcttcgggtgcccacgtggggcagcacaaacctccacacaccctctcccactctcgacacgcacggggctggctgggccgtgatttggaaaggaactggtgggagccgggtggattgtttaatcttcggagctggagacctgtttctgtgttgggatgagcgatgccctcttgccccaacccactcgtccagaccagccctgtccacacaggcccccggcccccaacccccagccccagctgtgccagcagactcgacaggtttttatacaaggttgttgagttttaaaatgtattaaaatattcttcgaggaaaaaaaac

SEQ ID NO: 379240 - DNA, 3635 bp, Homo sapiens
  misc_feature (9)..(9): n is a, c, g, or t
  misc_feature (1165)..(1165): n is a, c, g, or t
ggcactcanaacttctccccacctgacccagggctgtgggcatcctcagactatcccagaggcatcgcaagccttcaagctgcagcattgcacggcactcaagggctatgaccaacggaggccgttcagtcgcttctgtttagaggaaggccccctacctcttccacaccctgccctcctatcccttccacaccctgggctgcgtgactccccgcaaccccagggcaccctgccctcctacctgtgggggtttccagccctgaggttgaggacaaacctctcgtgtttaacttgggaggagatgtgtacgttccttttcttttttggactctgagtatgaggcaggctgttctgaggtccccgtggggtgagcctgtctgtcctccctcagagcccaccgttcctatcatcatctagcacctgtccggttccccacgtgagccttgggcaggacgctgcagtgttgatggtttgggttacgtggcgtttacctgggcgccgtccttactgaaaaaggaaacgtccacactgaatgtttctggggcgcgtggtgtgtgtcaggcgcccaccctgtcccactctccccaagggacagtagtacggcacactggggccaccagccagctcaactcatcctcctgtgtcacgcacccccgagggcgcaggaggcctgaggagtggctactggagccgtgtgttaggcagaggcttctgaccatgtctgagctctttacccccaatctcgcagctggcggattcccatgcccggtgcagcctgttgccagccagcctttgagacccagagctccagggcttgtcagaggcagcatggggctccagtggtcctgagtctcatttccctgcctgctctttaggcctttggcacccatggtcacttcactggctttccatttggcttctcacctgggaaatacaaaaatagcccctcctgaagataaaatcattcagaaacagagcaataattctgactcattaacttctacctactcaaaaaagtctgccatgatgatggaccgaagtgaggctttttaacccacaagtaacctttttatttttttgagacagtcttgctctgtctgtcacccaggctggagtacagtggcatgatcttggctcactgcagcctcgacttcctgggctcaantgatctcccacctcagcctcccatgtggctggaaccacaggcacgtgccaccatgcctggctatttttttgttgagctgggctctcgctttgttgcccaggctggtcttgaactcctcggctcaagcaatccttcccactcagcctcctgtagtgtcgagaatataggcgtgggctactacacctgcttcagccgcttctataaaaccgctgacctgtgtgtggaggacaggccaggtgtgtgctcactgcgctgcgaagatgttttgtcacgtgactttccccggatttccatttctttttttctgctttcctcaaaaactaatagaagactgggtgcggtggctcacgcctctaatcgcagcactttgggaggcagcagctggcggatcacaaggccaggagttcgagaccagcctggccaacatgatgaaaccctgtctctaccaaaaatacaaaaattagctgggtgcgatggtgggtgcctgtaatcccagatactcaggaggctgaggcaggagaattgtttgaaccccggagatggaggttgcagtgagccaagatcgtgccattgcactccagcctgggcaacagggcaagattccgtctcaaaaacaaacactattagaaaatgccctggaggtggcggggagttgttgatttgtgaggacagattgaaagcaactcccagggtggccttgtccacctccccatcgagaatgtggctgccggcctctttgaagattgtggtctggcataaggagaggtgcaggcgcctggttctgagcaccttggaatttccagccgcacagcatctggtgccctcccctccaccctcacaaggagctgccatcctgtttggattttctgtttgtggaccagaaacaaacgtttttccaaaggattagcaaatagggtaatttcctgtgtaacgctgctctggggcctcttcctcatcctggcagaaggagcctggagcccatgaggcagccagcactgtgcccttgctcagtcgtgctgtcccctccctctccctcagtctcctctccatgcccaagtcagtttccagccgctggtcttcatggcattcccagcacagccgggcaccaagaggcaaaacccaaggcctggcttggccgtgttaacgattgtacagacattttttaaaataactttgtgtaatacttttctggaatagtaagttcttgttgaactgtcacaggtgagcttctaggaacacaccgggtgtggttacttccactgggtgtgtccatggtcgtggtctgtgcttttgtaaacgaacagaacacttgaaccacctcccgaattgggtcatcggcttctttacgttgatacttaagagatttgcagctctctttcaaggaaacttcccctactgaaaggcataaaaaggttaaaaaagaaaatccgagagtcccaattccctgtataacagcattaaaataatctgcctgcctggaaagatgagaacactgttgcacaacccaaaatgtgtctttaatttgtgaaaaattaccatggtgagtcagacagtcattttaaacagctgaacagagactatcatcagcaaatagagctcagctttgtagctgcctttaaaatccttgtcccaaatccggtgagctctgcttgctgccgccgcgctcctgggtgatcactcagacgggtcagtgggaataacaggccaacaagacagctttttacatgtgtccaaaggatggcctttcgaaggcctggaagtatttcactgttggaagaagtaaacaagaatgacattccagatggaaatagaattctctctcttgcctttgaccaacatggtactaaggggtttcttctttcccaatgtatgtacgtgccctgctgggggccttactttatagaatgagagcatccgagcttccctaatgaatctggctagttctgtgtctggctgaggatacaggagtgggacatccactctcggatccctcagagcacagaaaccttcagctttgctgtctctgaagtatttcctccagtttccctgcgggcccctatgtttgagtttgatggctgctggatcctcactcaacgaaaactcggttggaaactgttccgcctggcagtccttttttgttgttttccatctcatttcccttccatctgaaagtggcattcagctgacttgctcatttagactgttcacggagtctgaatctgccaacgtggtgttggaggctccaccttgaaaagggccacagtcagggcaactttccccatacaggaaaacttgaaaattacatcaacagtctacgtcacagccaaattatatttcctttataccaaacaaaactatggagaactaaaagtacatcacacaaaacgtttatagtgttttgcatgtgacctatttcagtatttatataactagattagtgccgtctaggagcgtaatcggtaccgagctc

SEQ ID NO: 379241 - DNA, 2943 bp, Homo sapiens
ggcacgaggaggaagtgacgatacttttggcgcgcgccggttgctgtttcttctctggctccgggaccggcggcggcggcggcggcacgggcggcggcgtagggtgttttaactcaaatgggtgatgaaaaggactcttggaaagtgaaaactttagatgaaattcttcaggaaaagaaacgaaggaaggaacaagaggagaaagcagagataaaacgcttaaaaaattctgatgaccgggattccaagcgggattcccttgaggagggggagctgagagatcactgcatggagatcacaataaggaactccccgtatagaagagaagactctatggaagacagaggagaagaagatgattctttggccatcaaaccaccccagcaaatgtctcggaaagaaaaagttcatcacagaaaagatgaaaagagaaaagagaaacgtaggcatcgtagccattcagcagaaggggggaagcatgctagagtgaaagaaaaagaaagagagcacgaacgtcggaaacgacatcgagaagaacaggataaagctcgccgggaatgggaaagacagaagagaagggaaatggcaagggagcattccaggagagaaagggaccgcttggagcagttagaaaggaagcgggagcgggagcgcaagatgcgggagcagcagaaggagcagcgggagcagaaggagcgcgagcggcgggcggaggagcggcgcaaggagcgggaggcccgcagggaagtgtctgcacatcaccgaacgatgagagaggactacagcgacaaagtgaaagccagccactggagtcgcagcccgcctcggccgccgcgggagcggttcgagttgggagacggccggaagccagtaaaagaagagaaaatggaagaaagggacctgctgtccgacttacaggacatcagcgacagcgagaggaagaccagctcggccgagtcctcgtcagcagaatcaggctcaggttctgaggaagaagaggaggaggaggaagaggaggaggaggaagggagcaccagtgaagaatcagaggaggaggaggaggaagaggaagaggaggaggaggagaccggcagcaactctgaggaggcatcagagcagtctgccgaagaagtaagtgaggaagaaatgagtgaagatgaagaacgagaaaatgaaaaccacctcttggttgttccagagtcacggttcgaccgagattccggggagagtgaagaagcagaggaagaagtgggtgagggaacgccgcagagcagcgccctgacagagggcgactatgtgcccgactcccctgccctgtcgcccatcgagctcaagcaggagctgcccaagtacctgccggccctgcagggctgccggagcgtcgaggagttccagtgcctgaacaggatcgaggagggcacctatggagtggtctacagagcaaaagacaagaaaacagatgaaattgtggctctaaagcggctgaagatggagaaggagaaggagggcttcccgatcacgtcgctgagggagatcaacaccatcctcaaggcccagcatcccaacatcgtcaccgttagagagattgtggtgggcagcaacatggacaagatctacatcgtgatgaactatgtggagcacgacctcaagagcctgatggagaccatgaaacagcccttcctgccaggggaggtgaagaccctgatgatccagctgctgcgtggggtgaaacacctgcacgacaactggatcctgcaccgtgacctcaagacgtccaacctgctgctgagccacgccggcatcctcaagcctcccacagcttcgcgggcactggccttcctgaacacctctcctggcgtcttaggaatactccacggccgtggacatgtggtcagtgggttgcatcttcggggagctgctgactcagaagcctctgttccccgggaagtcagaaatcgatcagatcaacaaggtgttcaaggatctggggacccctagtgagaaaatctggcccggctacagcgagctcccagcagtcaagaagatgaccttcagcgagcacccctacaacaacctccgcaagcgcttcggggctctgctctcagaccagggcttcgacctcatgaacaagttcctgacctacttccccgggaggaggatcagcgctgaggacggcctcaagcatgagtatttccgcgagacccccctccccatcgacccctccatgttccccacgtggcccgccaagagcgagcagcagcgtgtgaagcggggcaccagcccgaggccccctgagggaggcctgggctacagccagctgggtgacgacgacctgaaggagacgggcttccaccttaccaccacgaaccagggggcctctgccgcgggccccggcttcagcctcaagttctgaaggtcagagtggaccccgtcatggggagaactcagccgggaccacaggcgtggctactgcggctggagctgcgatgagactcggaactcctcgtcttactttgtgctccatgttttgtttttgtattttggtttgtaaatttgtagaattaaatcattttccttgttgtggaggaaagagctgtgttttctccgtgacttgccagggcatcttcgggtgcccacgtggggcagcacaaacctccacacaccctctcccactctcgacacgcacggggctggctgggccgtgatttggaaaggaactggtgggagccgggtggattgtttaatcttcggagctggagacctgtttctgtgttgggatgagcgatgccctcttgccccaacccactcgtccagaccagccctgtccacacaggcccccggcccccaacccccagccccagctgtgccagcagactcgacaggtttttatacaaggttgttgagttttaaaatgtattaaaatattcttcgaggaaaaaaaac

SEQ ID NO: 379242 - DNA, 3148 bp, Homo sapiens
ggcacgaggaggaagtgacgatacttttggcgcgcgccggttgctgtttcttctctggctccgggaccggcggcggcggcggcggcacgggcggcggcgtagggtgttttaactcaaatgggtgatgaaaaggactcttggaaagtgaaaactttagatgaaattcttcaggaaaagaaacgaaggaaggaacaagaggagaaagcagagataaaacgcttaaaaaattctgatgaccgggattccaagcgggattcccttgaggagggggagctgagagatcactgcatggagatcacaataaggaactccccgtatagaagagaagactctatggaagacagaggagaagaagatgattctttggccatcaaaccaccccagcaaatgtctcggaaagaaaaagttcatcacagaaaagatgaaaagagaaaagagaaacgtaggcatcgtagccattcagcagaaggggggaagcatgctagagtgaaagaaaaagaaagagagcacgaacgtcggaaacgacatcgagaagaacaggataaagctcgccgggaatgggaaagacagaagagaagggaaatggcaagggagcattccaggagagaaagggaccgcttggagcagttagaaaggaagcgggagcgggagcgcaagatgcgggagcagcagaaggagcagcgggagcagaaggagcgcgagcggcgggcggaggagcggcgcaaggagcgggaggcccgcagggaagtgtctgcacatcaccgaacgatgagagaggactacagcgacaaagtgaaagccagccactggagtcgcagcccgcctcggccgccgcgggagcggttcgagttgggagacggccggaagccagtaaaagaagagaaaatggaagaaagggacctgctgtccgacttacaggacatcagcgacagcgagaggaagaccagctcggccgagtcctcgtcagcagaatcaggctcaggttctgaggaagaagaggaggaggaggaagaggaggaggaggaagggagcaccagtgaagaatcagaggaggaggaggaggaagaggaagaggaggaggaggagaccggcagcaactctgaggaggcatcagagcagtctgccgaagaagtaagtgaggaagaaatgagtgaagatgaagaacgagaaaatgaaaaccacctcttggttgttccagagtcacggttcgaccgagattccggggagagtgaagaagcagaggaagaagtgggtgagggaacgccgcagagcagcgccctgacagagggcgactatgtgcccgactcccctgccctgtcgcccatcgagctcaagcaggagctgcccaagtacctgccggccctgcagggctgccggagcgtcgaggagttccagtgcctgaacaggatcgaggagggcacctatggagtggtctacagagcaaaagacaagaaaacagatgaaattgtggctctaaagcggctgaagatggagaaggagaaggagggcttcccgatcacgtcgctgagggagatcaacaccatcctcaaggcccagcatcccaacatcgtcaccgttagagagattgtggtgggcagcaacatggacaagatctacatcgtgatgaactatgtggagcacgacctcaagagcctgatggagaccatgaaacagcccttcctgccaggtacagccgcgccccggggtcctgtctgcgtacaagtgggggcagtgtcctggtcacccccgcggtgacagtgctgcagggagggccagctgcatccacagggaaagccctgagaagcctctgttgctgccgaggcgagcgggccaccctgagtgccctgggcttggggcggccgggtccacatgggagcctccctccctcccaggggaggtgaagaccctgatgatccagctgctgcgtggggtgaaacacctgcacgacaactggatcctgcaccgtgacctcaagacgtccaacctgctgctgagccacgccggcatcctcaagcctcccacagcttcgcgggcactggccttcctgaacacctctcctggcgtcttaggaatactccacggccgtggacatgtggtcagtgggttgcatcttcggggagctgctgactcagaagcctctgttccccgggaagtcagaaatcgatcagatcaacaaggtgttcaaggatctggggacccctagtgagaaaatctggcccggctacagcgagctcccagcagtcaagaagatgaccttcagcgagcacccctacaacaacctccgcaagcgcttcggggctctgctctcagaccagggcttcgacctcatgaacaagttcctgacctacttccccgggaggaggatcagcgctgaggacggcctcaagcatgagtatttccgcgagacccccctccccatcgacccctccatgttccccacgtggcccgccaagagcgagcagcagcgtgtgaagcggggcaccagcccgaggccccctgagggaggcctgggctacagccagctgggtgacgacgacctgaaggagacgggcttccaccttaccaccacgaaccagggggcctctgccgcgggccccggcttcagcctcaagttctgaaggtcagagtggaccccgtcatggggagaactcagccgggaccacaggcgtggctactgcggctggagctgcgatgagactcggaactcctcgtcttactttgtgctccatgttttgtttttgtattttggtttgtaaatttgtagaattaaatcattttccttgttgtggaggaaagagctgtgttttctccgtgacttgccagggcatcttcgggtgcccacgtggggcagcacaaacctccacacaccctctcccactctcgacacgcacggggctggctgggccgtgatttggaaaggaactggtgggagccgggtggattgtttaatcttcggagctggagacctgtttctgtgttgggatgagcgatgccctcttgccccaacccactcgtccagaccagccctgtccacacaggcccccggcccccaacccccagccccagctgtgccagcagactcgacaggtttttatacaaggttgttgagttttaaaatgtattaaaatattcttcgaggaaaaaaaac

SEQ ID NO: 379243 - DNA, 2413 bp, Homo sapiens
ggcacgaggaggaagtgacgatacttttggcgcgcgccggttgctgtttcttctctggctccgggaccggcggcggcggcggcggcacgggcggcggcgtagggtgttttaactcaaatgggtgatgaaaaggactcttggaaagtgaaaactttagatgaaattcttcaggaaaagaaacgaaggaaggaacaagaggagaaagcagagataaaacgcttaaaaaattctgatgaccgggattccaagcgggattcccttgaggagggggagctgagagatcactgcatggagatcacaataaggaactccccgtatagaagagaagactctatggaagacagaggagaagaagatgattctttggccatcaaaccaccccagcaaatgtctcggaaagaaaaagttcatcacagaaaagatgaaaagagaaaagagaaacgtaggcatcgtagccattcagcagaaggggggaagcatgctagagtgaaagaaaaagaaagagagcacgaacgtcggaaacgacatcgagaagaacaggataaagctcgccgggaatgggaaagacagaagagaagggaaatggcaagggagcattccaggagagaaagggaccgcttggagcagttagaaaggaagcgggagcgggagcgcaagatgcgggagcagcagaaggagcagcgggagcagaaggagcgcgagcggcgggcggaggagcggcgcaaggagcgggaggcccgcagggaagtgtctgcacatcaccgaacgatgagagaggactacagcgacaaagtgaaagccagccactggagtcgcagcccgcctcggccgccgcgggagcggttcgagttgggagacggccggaagccagtaaaagaagagaaaatggaagaaagggacctgctgtccgacttacaggacatcagcgacagcgagaggaagaccagctcggccgagtcctcgtcagcagaatcaggctcaggttctgaggaagaagaggaggaggaggaagaggaggaggaggaagggagcaccagtgaagaatcagaggaggaggaggaggaagaggaagaggaggaggaggagaccggcagcaactctgaggaggcatcagagcagtctgccgaagaagtaagtgaggaagaaatgagtgaagatgaagaacgagaaaatgaaaaccacctcttggttgttccagagtcacggttcgaccgagattccggggagagtgaagaagcagaggaagaagtgggtgagggaacgccgcagagcagcgccctgacagagggcgactatgtgcccgactcccctgccctgtcgcccatcgagctcaagcaggagctgcccaagtacctgccggccctgcagggctgccggagcgtcgaggagttccagtgcctgaacaggatcgaggagggcacctatggagtggtctacagagcaaaagacaagaaaacagatgaaattgtggctctaaagcggctgaagatggagaaggagaaggagggcttcccgatcacgtcgctgagggagatcaacaccatcctcaaggcccagcatcccaacatcgtcaccgttagagagattgtggtgggcagcaacatggacaagatctacatcgtgatgaactatgtggagcacgacctcaagagcctgatggagaccatgaaacagcccttcctgccaggggaggtgaagaccctgatgatccagctgctgcgtggggtgaaacacctgcacgacaactggatcctgcaccgtgacctcaagacgtccaacctgctgctgagccacgccggcatcctcaaggtgggtgacttcgggctggcgcgggagtacggatcccctctgaaggcctacaccccggtcgtggtgaccctgtggtaccgcgccccagagctgctgcttggtgccaaggaatactccacggccgtggacatgtggtcagtgggttgcatcttcggggagctgctgactcagaagcctctgttccccgggaagtcagaaatcgatcagatcaacaaggtgttcaaggatctggggacccctagtgagaaaatctggcccggctacagcgagctcccagcagtcaagaagatgaccttcagcgagcacccctacaacaacctccgcaagcgcttcggggctctgctctcagaccagggcttcgacctcatgaacaagttcctgacctacttccccgggaggaggatcagcgctgaggacggcctcaagcatgagtatttccgcgagacccccctccccatcgacccctccatgttccccacgtggcccgccaagagcgagcagcagcgtgtgaagcggggcaccagcccgaggccccctgagggaggcctgggctacagccagctggtgagagactgagagagggtccacttcacagaacaggggc

SEQ ID NO: 379244 - DNA, 1605 bp, Homo sapiens
ggcacgaggaggaagtgacgatacttttggcgcgcgccggttgctgtttcttctctggctccgggaccggcggcggcggcggcggcacgggcggcggcgtagggtgttttaactcaaatgggtgatgaaaaggactcttggaaagtgaaaactttagatgaaattcttcaggaaaagaaacgaaggaaggaacaagaggagaaagcagagataaaacgcttaaaaaattctgatgaccgggattccaagcgggattcccttgaggagggggagctgagagatcactgcatggagatcacaataaggaactccccgtatagaagagaagactctatggaagacagaggagaagaagatgattctttggccatcaaaccaccccagcaaatgtctcggaaagaaaaagttcatcacagaaaagatgaaaagagaaaagagaaacgtaggcatcgtagccattcagcagaaggggggaagcatgctagagtgaaagaaaaagaaagagagcacgaacgtcggaaacgacatcgagaagaacaggataaagctcgccgggaatgggaaagacagaagagaagggaaatggcaagggagcattccaggagagaaagggaccgcttggagcagttagaaaggaagcgggagcgggagcgcaagatgcgggagcagcagaaggagcagcagcgagctcccagcagtcaagaagatgaccttcagcgagcacccctacaacaacctccgcaagcgcttcggggctctgctctcagaccagggcttcgacctcatgaacaagttcctgacctacttccccgggaggaggatcagcgctgaggacggcctcaagcatgagtatttccgcgagacccccctccccatcgacccctccatgttccccacgtggcccgccaagagcgagcagcagcgtgtgaagcggggcaccagcccgaggccccctgagggaggcctgggctacagccagctgggtgacgacgacctgaaggagacgggcttccaccttaccaccacgaaccagggggcctctgccgcgggccccggcttcagcctcaagttctgaaggtcagagtggaccccgtcatggggagaactcagccgggaccacaggcgtggctactgcggctggagctgcgatgagactcggaactcctcgtcttactttgtgctccatgttttgtttttgtattttggtttgtaaatttgtagaattaaatcattttccttgttgtggaggaaagagctgtgttttctccgtgacttgccagggcatcttcgggtgcccacgtggggcagcacaaacctccacacaccctctcccactctcgacacgcacggggctggctgggccgtgatttggaaaggaactggtgggagccgggtggattgtttaatcttcggagctggagacctgtttctgtgttgggatgagcgatgccctcttgccccaacccactcgtccagaccagccctgtccacacaggcccccggcccccaacccccagccccagctgtgccagcagactcgacaggtttttatacaaggttgttgagttttaaaatgtattaaaatattcttcgaggaaaaaaaac

SEQ ID NO: 379245 - DNA, 2067 bp, Homo sapiens
  misc_feature (1927)..(1927): n is a, c, g, or t
ggcacgaggaggaagtgacgatacttttggcgcgcgccggttgctgtttcttctctggctccgggaccggcggcggcggcggcggcacgggcggcggcgtagggtgttttaactcaaatgggtgatgaaaaggactcttggaaagtgaaaactttagatgaaattcttcaggaaaagaaacgaaggaaggaacaagaggagaaagcagagataaaacgcttaaaaaattctgatgaccgggattccaagcgggattcccttgaggagggggagctgagagatcactgcatggagatcacaataaggaactccccgtatagaagagaagactctatggaagacagaggagaagaagatgattctttggccatcaaaccaccccagcaaatgtctcggaaagaaaaagttcatcacagaaaagatgaaaagagaaaagagaaacgtaggcatcgtagccattcagcagaaggggggaagcatgctagagtgaaagaaaaagaaagagagcacgaacgtcggaaacgacatcgagaagaacaggataaagctcgccgggaatgggaaagacagaagagaagggaaatggcaagggagcattccaggagagaaagggaccgcttggagcagttagaaaggaagcgggagcgggagcgcaagatgcgggagcagcagaaggagcagcgggagcagaaggagcgcgagcggcgggcggaggagcggcgcaaggagcgggaggcccgcagggaagtgtctgcacatcaccgaacgatgagagaggactacagcgacaaagtgaaagccagccactggagtcgcagcccgcctcggccgccgcgggagcggttcgagttgggagacggccggaagccagtaaaagaagagaaaatggaagaaagggacctgctgtccgacttacaggacatcagcgacagcgagaggaagaccagctcggccgagtcctcgtcagcagaatcaggctcaggttctgaggaagaagaggaggaggaggaagaggaggaggaggaagggagcaccagtgaagaatcagaggaggaggaggaggaagaggaagaggaggaggaggagaccggcagcaactctgaggaggcatcagagcagtctgccgaagaagtaagtgaggaagaaatgagtgaagatgaagaacgagaaaatgaaaaccacctcttggttgttccagagtcacggttcgaccgagattccggggagagtgaagaagcagaggaagaagtgggtgagggaacgccgcagagcagcgccctgacagagggcgactatgtgcccgactcccctgccctgtcgcccatcgagctcaagcaggagctgcccaagtacctgccggccctgcagggctgccggagcgtcgaggagttccagtgcctgaacaggatcgaggagggcacctatggagtggtctacagagcaaaagacaagaaaacagatgaaattgtggctctaaagcggctgaagatggagaaggagaaggagggcttcccgatcacgtcgctgagggagatcaacaccatcctcaaggcccagcatcccaacatcgtcaccgttagagagattgtggtgggcagcaacatggacaagatctacatcgtgatgaactatgtggagcacgacctcaagagcctgatggagaccatgaaacagcccttcctgccaggggaggtgaagaccctgatgatccagctgctgcgtggggtgaaacacctgcacgacaactggatcctgcaccgtgacctcaagacgtccaacctgctgctgagccacgccggcatcctcaaggtgggtgacttcgggctggcgcgggagtacggatcccctctgaaggcctacaccccggtcgtggtgaccctgtggtaccgcgccccagagctgctgcttggtgccaagaatacttcanggcgtggactgttggtcacggggtgctcttcggggagtgtgatcagaagctctgttccgggagtcaattcgtccactcaccagggtcccgtctgggcctaggaaattgccggtaggagtcccgaaaaaactagagcaaat

SEQ ID NO: 379246 - DNA, 2654 bp, Homo sapiens
  misc_feature (9)..(9): n is a, c, g, or t
  misc_feature (1165)..(1165): n is a, c, g, or t
ggcactcanaacttctccccacctgacccagggctgtgggcatcctcagactatcccagaggcatcgcaagccttcaagctgcagcattgcacggcactcaagggctatgaccaacggaggccgttcagtcgcttctgtttagaggaaggccccctacctcttccacaccctgccctcctatcccttccacaccctgggctgcgtgactccccgcaaccccagggcaccctgccctcctacctgtgggggtttccagccctgaggttgaggacaaacctctcgtgtttaacttgggaggagatgtgtacgttccttttcttttttggactctgagtatgaggcaggctgttctgaggtccccgtggggtgagcctgtctgtcctccctcagagcccaccgttcctatcatcatctagcacctgtccggttccccacgtgagccttgggcaggacgctgcagtgttgatggtttgggttacgtggcgtttacctgggcgccgtccttactgaaaaaggaaacgtccacactgaatgtttctggggcgcgtggtgtgtgtcaggcgcccaccctgtcccactctccccaagggacagtagtacggcacactggggccaccagccagctcaactcatcctcctgtgtcacgcacccccgagggcgcaggaggcctgaggagtggctactggagccgtgtgttaggcagaggcttctgaccatgtctgagctctttacccccaatctcgcagctggcggattcccatgcccggtgcagcctgttgccagccagcctttgagacccagagctccagggcttgtcagaggcagcatggggctccagtggtcctgagtctcatttccctgcctgctctttaggcctttggcacccatggtcacttcactggctttccatttggcttctcacctgggaaatacaaaaatagcccctcctgaagataaaatcattcagaaacagagcaataattctgactcattaacttctacctactcaaaaaagtctgccatgatgatggaccgaagtgaggctttttaacccacaagtaacctttttatttttttgagacagtcttgctctgtctgtcacccaggctggagtacagtggcatgatcttggctcactgcagcctcgacttcctgggctcaantgatctcccacctcagcctcccatgtggctggaaccacaggcacgtgccaccatgcctggctatttttttgttgagctgggctctcgctttgttgcccaggctggtcttgaactcctcggctcaagcaatccttcccactcagcctcctgtagtgtcgagaatataggcgtgggctactacacctgcttcagccgcttctataaaaccgctgacctgtgtgtggaggacaggccaggtgtgtgctcactgcgctgcgaagatgttttgtcacgtgactttccccggatttccatttctttttttctgctttcctcaaaaactaatagaagactgggtgcggtggctcacgcctctaatcgcagcactttgggaggcagcagctggcggatcacaaggccaggagttcgagaccagcctggccaacatgatgaaaccctgtctctaccaaaaatacaaaaattagctgggtgcgatggtgggtgcctgtaatcccagatactcaggaggctgaggcaggagaattgtttgaaccccggagatggaggttgcagtgagccaagatcgtgccattgcactccagcctgggcaacagggcaagattccgtctcaaaaacaaacactattagaaaatgccctggaggtggcggggagttgttgatttgtgaggacagattgaaagcaactcccagggtggccttgtccacctccccatcgagaatgtggctgccggcctctttgaagattgtggtctggcataaggagaggtgcaggcgcctggttctgagcaccttggaatttccagccgcacagcatctggtgccctcccctccaccctcacaaggagctgccatcctgtttggattttctgtttgtggaccagaaacaaacgtttttccaaaggattagcaaatagggtaatttcctgtgtaacgctgctctggggcctcttcctcatcctggcagaaggagcctggagcccatgaggcagccagcactgtgcccttgctcagtcgtgctgtcccctccctctccctcagtctcctctccatgcccaagtcagtttccagccgctggtcttcatggcattcccagcacagccgggcaccaagaggcaaaacccaaggcctggcttggccgtgttaacgattgtacagacattttttaaaataactttgtgtaatacttttctggaatagtaagttcttgttgaactgtcacaggtgagcttctaggaacacaccgggtgtggttacttccactgggtgtgtccatggtcgtggtctgtgcttttgtaaacgaacagaacacttgaaccacctcccgaattgggtcatcggcttctttacgttgatacttaagagatttgcagctctctttcaaggaaacttcccctactgaaaggcataaaaaggttaaaaaagaaaatccgagagtcccaattccctgtataacagcattaaaataatctgcctgcctggaaagatgaga

SEQ ID NO: 379247 - DNA, 2535 bp, Homo sapiens
ggcacgaggaggaagtgacgatacttttggcgcgcgccggttgctgtttcttctctggctccgggaccggcggcggcggcggcggcacgggcggcggcgtagggtgttttaactcaaatgggtgatgaaaaggactcttggaaagtgaaaactttagatgaaattcttcaggaaaagaaacgaaggaaggaacaagaggagaaagcagagataaaacgcttaaaaaattctgatgaccgggattccaagcgggattcccttgaggagggggagctgagagatcactgcatggagatcacaataaggaactccccgtatagaagagaagactctatggaagacagaggagaagaagatgattctttggccatcaaaccaccccagcaaatgtctcggaaagaaaaagttcatcacagaaaagatgaaaagagaaaagagaaacgtaggcatcgtagccattcagcagaaggggggaagcatgctagagtgaaagaaaaagaaagagagcacgaacgtcggaaacgacatcgagaagaacaggataaagctcgccgggaatgggaaagacagaagagaagggaaatggcaagggagcattccaggagagaaagggaccgcttggagcagttagaaaggaagcgggagcgggagcgcaagatgcgggagcagcagaaggagcagcgggagcagaaggagcgcgagcggcgggcggaggagcggcgcaaggagcgggaggcccgcagggaagtgtctgcacatcaccgaacgatgagagaggactacagcgacaaagtgaaagccagccactggagtcgcagcccgcctcggccgccgcgggagcggttcgagttgggagacggccggaagccagtaaaagaagagaaaatggaagaaagggacctgctgtccgacttacaggacatcagcgacagcgagaggaagaccagctcggccgagtcctcgtcagcagaatcaggctcaggttctgaggaagaagaggaggaggaggaagaggaggaggaggaagggagcaccagtgaagaatcagaggaggaggaggaggaagaggaagaggaggaggaggagaccggcagcaactctgaggaggcatcagagcagtctgccgaagaagtaagtgaggaagaaatgagtgaagatgaagaacgagaaaatgaaaaccacctcttggttgttccagagtcacggttcgaccgagattccggggagagtgaagaagcagaggaagaagtgggtgagggaacgccgcagagcagcgccctgacagagggcgactatgtgcccgactcccctgccctgtcgcccatcgagctcaagcaggagctgcccaagtacctgccggccctgcaggtcaggccctcccctcgccccgggccgctgtccgcattggcagtcggagttaccacaggggctgagcgaagcctggcccccgtgttggcgtctgtcgcctcacagggctgctgggcccactggggcagtgacgggcgggcacagccactggcccctcatgcttctaggtcccgcctctttctcatgctggacggaactgggtggacagggagctgcccgcaggactgctctgcggcttgaaaggcagcctgggcgtgcggccgcgctgctgtcactgctgcccgagttgcgtcctcctccgcactggagagcagtgccttccacttgacccctgcgtgggcgggttatgtaggcaccaaggccttgttaccggcatctgtgcagggcttggatgggggagcggctacgggagtcagtgtagatgtgtgaccagaagccttttgctcaggcagctatcaataaggcaggatattgttgggagtgatttggaagggacaagcctgagaaggtaccagtggcctcgggggcctgggagaccggcagggactcggccccctccttggtgcctgtgggcggagaggttctctctggcgcatgcagcaggcctctgtcgactgccctatgccttgtgagcgcctctgccccttagtgctgctgagcgtaggcgtcgggccacaggccacccagagtacgtgacatccggcctgggcaccggccccaaggtacaccgaggggtaggtgccctggcatggggcatcatgctgcgcctggcaggtagggcccgtcctcagtgtcatcctggtacaagcaggggacacatccactttgacagagagactctccggatggccttttttttggagactgggtctgtctctgtcatccaggctggagtggagtggcttaatcatagctcactggagcctccacctcccaggctcaaacaatcctcccatctcagcctcctgagtagctggaactacaggcgcaagccaccatgcctggctaatttttttattttgtagagaagagttttggccaggcacagtggctcacgcctgtaatcccagcactttgggaggccgaggcggtgggcggatcagaggtcaggagttcgagaccagcctggccaatatggtgaaatcctgtctctactaaaaatacaaa

SEQ ID NO: 379248 - DNA, 507 bp, Homo sapiens
tgtctgcacatcaccgaacgatgagagaggactacagcgacaaagtgaaagccagccactggagtcgcagcccgcctcggccgccgcgggagcggttcgagttgggagacggccggaagccaggtgaggccaggccggcgcgtgcgcagaagccagcacagtgtgagtcttttctgggggatgtttggcataagtgtgtaggattcatttaaagcccagctaagtaaccgcttcagaagaaagtgagagatgtgctggctgaagtcctctcgtgtcgtgagagggaccgtgagtgtctgtgtgcggccaggacacaggacgtgtgtttatccgctgggacattcgccactggccccgttagagaagtggcttccagcgtctgtggatgagctggtttccgaccaagcaaagttaatcgttacgtgaaaggcactagttttggggtggtggtagcttgtttgtttaaaaacatttccccaaattcacctttatggtttatctcataag

SEQ ID NO: 379249 - DNA, 320 bp, Homo sapiens
agagcacgaacgtcggaaacgacatcgagaagaacaggataaagctcgccgggaatgggaaagacagaagagaagggaaatggcaagggagcattccaggagagaaaggtgagtgggctgggtcagttgaggactttatgaaagggccgtggtagtgtgtcctgtcacagcaatgaagaagaatttggcaatagaagtcacatttgttgcagaagtggtagacatggaaacagcacagtgaacgctggacgaggctgaccaagagaactgtcctgagggagtgagttttcactgcatctggaagtaagaacgggtgtgat

SEQ ID NO: 379250 - DNA, 1404 bp, Homo sapiens
caggaggaggttcatgatccttacttactcctagcttcgtaattaggttcaacttttccagttccagagtcacggttcgaccgagattccggggagagtgaagaagcagaggaagaagtgggtgagggaacgccgcagagcagcgccctgacagagggcgactatgtgcccgactcccctgccctgtcgcccatcgagctcaagcaggagctgcccaagtacctgccggccctgcaggtcaggccctcccctcgccccgggccgctgtccgcattggcagtcggagttaccacaggggctgagcgaagcctggcccccgtgttggcgtctgtcgcctcacagggctgctgggcccactggggcagtgacgggcgggcacagccactggcccctcatgcttctaggtcccgcctctttctcatgctggacggaactgggtggacagggagctgcccgcaggactgctctgcggcttgaaaggcagcctgggcgtgcggccgcgctgctgtcactgctgcccgagttgcgtcctcctccgcactggagagcagtgccttccacttgacccctgcgtgggcgggttatgtaggcaccaaggccttgttaccggcatctgtgcagggcttggatgggggagcggctacgggagtcagtgtagatgtgtgaccagaagccttttgctcaggcagctatcaataaggcaggatattgttgggagtgatttggaagggacaagcctgagaaggtaccagtggcctcgggggcctgggagaccggcagggactcggccccctccttggtgcctgtgggcggagaggttctctctggcgcatgcagcaggcctctgtcgactgccctatgccttgtgagcgcctctgccccttagtgctgctgagcgtaggcgtcgggccacaggccacccagagtacgtgacatccggcctgggcaccggccccaaggtacaccgaggggtaggtgccctggcatggggcatcatgctgcgcctggcaggtagggcccgtcctcagtgtcatcctggtacaagcaggggacacatccactttgacagagagactctccggatggccttttttttggagactgggtctgtctctgtcatccaggctggagtggagtggcttaatcatagctcactggagcctccacctcccaggctcaaacaatcctcccatctcagcctcctgagtagctggaactacaggcgcaagccaccatgcctggctaatttttttattttgtagagaagagttttggccaggcacagtggctcacgcctgtaatcccagcactttgggaggccgaggcggtgggcggatcagaggtcaggagttcgagaccagcctggccaatatggtgaaatcctgtctctactaaaaatacaaa

SEQ ID NO: 379251 - DNA, 2996 bp, Homo sapiens
ggcacgaggaggaagtgacgatacttttggcgcgcgccggttgctgtttcttctctggctccgggaccggcggcggcggcggcggcacgggcggcggcgtagggtgttttaactcaaatgggtgatgaaaaggactcttggaaagtgaaaactttagatgaaattcttcaggaaaagaaacgaaggaaggaacaagaggagaaagcagagataaaacgcttaaaaaattctgatgaccgggattccaagcgggattcccttgaggagggggagctgagagatcactgcatggagatcacaataaggaactccccgtatagaagagaagactctatggaagacagaggagaagaagatgattctttggccatcaaaccaccccagcaaatgtctcggaaagaaaaagttcatcacagaaaagatgaaaagagaaaagagaaacgtaggcatcgtagccattcagcagaaggggggaagcatgctagagtgaaagaaaaagaaagagagcacgaacgtcggaaacgacatcgagaagaacaggataaagctcgccgggaatgggaaagacagaagagaagggaaatggcaagggagcattccaggagagaaagggaccgcttggagcagttagaaaggaagcgggagcgggagcgcaagatgcgggagcagcagaaggagcagcgggagcagaaggagcgcgagcggcgggcggaggagcggcgcaaggagcgggaggcccgcagggaagtgtctgcacatcaccgaacgatgagagaggactacagcgacaaagtgaaagccagccactggagtcgcagcccgcctcggccgccgcgggagcggttcgagttgggagacggccggaagccagtaaaagaagagaaaatggaagaaagggacctgctgtccgacttacaggacatcagcgacagcgagaggaagaccagctcggccgagtcctcgtcagcagaatcaggctcaggttctgaggaagaagaggaggaggaggaagaggaggaggaggaagggagcaccagtgaagaatcagaggaggaggaggaggaagaggaagaggaggaggaggagaccggcagcaactctgaggaggcatcagagcagtctgccgaagaagtaagtgaggaagaaatgagtgaagatgaagaacgagaaaatgaaaaccacctcttggttgttccagagtcacggttcgaccgagattccggggagagtgaagaagcagaggaagaagtgggtgagggaacgccgcagagcagcgccctgacagagggcgactatgtgcccgactcccctgccctgtcgcccatcgagctcaagcaggagctgcccaagtacctgccggccctgcagggctgccggagcgtcgaggagttccagtgcctgaacaggatcgaggagggcacctatggagtggtctacagagcaaaagacaagaaaacagatgaaattgtggctctaaagcggctgaagatggagaaggagaaggagggcttcccgatcacgtcgctgagggagatcaacaccatcctcaaggcccagcatcccaacatcgtcaccgttagagagattgtggtgggcagcaacatggacaagatctacatcgtgatgaactatgtggagcacgacctcaagagcctgatggagaccatgaaacagcccttcctgccaggggaggtgaagaccctgatgatccagctgctgcgtggggtgaaacacctgcacgacaactggatcctgcaccgtgacctcaagacgtccaacctgctgctgagccacgccggcatcctcaaggtgggtgacttcgggctggcgcgggagtacggatcccctctgaaggcctacaccccggtcgtggtgaccctgtggtaccgcgccccagagctgctgcttggtgccaaggaatactccacggccgtggacatgtggtcagtgggttgcatcttcggggagctgctgactcagaagcctctgttccccgggaagtcagaaatcgatcagatcaacaaggtgttcaaggatctggggacccctagtgagaaaatctggcccggctacagcgagctcccagcagtcaagaagatgaccttcagcgagcacccctacaacaacctccgcaagcgcttcggggctctgctctcagaccagggcttcgacctcatgaacaagttcctgacctacttccccgggaggaggatcagcgctgaggacggcctcaagcatgagtatttccgcgagacccccctccccatcgacccctccatgttccccacgtggcccgccaagagcgagcagcagcgtgtgaagcggggcaccagcccgaggccccctgagggaggcctgggctacagccagctgggtgacgacgacctgaaggagacgggcttccaccttaccaccacgaaccagggggcctctgccgcgggccccggcttcagcctcaagttctgaaggtcagagtggaccccgtcatggggagaactcagccgggaccacaggcgtggctactgcggctggagctgcgatgagactcggaactcctcgtcttactttgtgctccatgttttgtttttgtattttggtttgtaaatttgtagaattaaatcattttccttgttgtggaggaaagagctgtgttttctccgtgacttgccagggcatcttcgggtgcccacgtggggcagcacaaacctccacacaccctctcccactctcgacacgcacggggctggctgggccgtgatttggaaaggaactggtgggagccgggtggattgtttaatcttcggagctggagacctgtttctgtgttgggatgagcgatgccctcttgccccaacccactcgtccagaccagccctgtccacacaggcccccggcccccaacccccagccccagctgtgccagcagactcgacaggtttttatacaaggttgttgagttttaaaatgtattaaaatattcttcgaggaaaaaaaac

SEQ ID NO: 379252 - DNA, 2563 bp, Homo sapiens
  misc_feature (43)..(43): n is a, c, g, or t
cggacgcgtgggtcgacggacgcgtgggtcgaccacgcgtcgngctggtcttgaactcctcggctcaagcaatccttcccactcagcctcctgtagtgtcgagaatataggcgtgggctactacacctgcttcagccgcttctataaaaccgctgacctgtgtgtggaggacaggccaggtgtgtgctcactgcgctgcgaagatgttttgtcacgtgactttccccggatttccatttctttttttctgctttcctcaaaaactaatagaagactgggtgcggtggctcacgcctctaatcgcagcactttgggaggcagcagctggcggatcacaaggccaggagttcgagaccagcctggccaacatgatgaaaccctgtctctaccaaaaatacaaaaattagctgggtgcgatggtgggtgcctgtaatcccagatactcaggaggctgaggcaggagaattgtttgaaccccggagatggaggttgcagtgagccaagatcgtgccattgcactccagcctgggcaacagggcaagattccgtctcaaaaacaaacactattagaaaatgccctggaggtggcggggagttgttgatttgtgaggacagattgaaagcaactcccagggtggccttgtccacctccccatcgagaatgtggctgccggcctctttgaagattgtggtctggcataaggagaggtgcaggcgcctggttctgagcaccttggaatttccagccgcacagcatctggtgccctcccctccaccctcacaaggagctgccatcctgtttggattttctgtttgtggaccagaaacaaacgtttttccaaaggattagcaaatagggtaatttcctgtgtaacgctgctctggggcctcttcctcatcctggcagaaggagcctggagcccatgaggcagccagcactgtgcccttgctcagtcgtgctgtcccctccctctccctcagtctcctctccatgcccaagtcagtttccagccgctggtcttcatggcattcccagcacagccgggcaccaagaggcaaaacccaaggcctggcttggccgtgttaacgattgtacagacattttttaaaataactttgtgtaatacttttctggaatagtaagttcttgttgaactgtcacaggtgagcttctaggaacacaccgggtgtggttacttccactgggtgtgtccatggtcgtggtctgtgcttttgtaaacgaacagaacacttgaaccacctcccgaattgggtcatcggcttctttacgttgatacttaagagatttgcagctctctttcaaggaaacttcccctactgaaaggcataaaaaggttaaaaaagaaaatccgagagtcccaattccctgtataacagcattaaaataatctgcctgcctggaaagatgagaacactgttgcacaacccaaaatgtgtctttaatttgtgaaaaattaccatggtgagtcagacagtcattttaaacagctgaacagagactatcatcagcaaatagagctcagctttgtagctgcctttaaaatccttgtcccaaatccggtgagctctgcttgctgccgccgcgctcctgggtgatcactcagacgggtcagtgggaataacaggccaacaagacagctttttacatgtgtccaaaggatggcctttcgaaggcctggaagtatttcactgttggaagaagtaaacaagaatgacattccagatggaaatagaattctctctcttgcctttgaccaacatggtactaaggggtttcttctttcccaatgtatgtacgtgccctgctgggggccttactttatagaatgagagcatccgagcttccctaatgaatctggctagttctgtgtctggctgaggatacaggagtgggacatccactctcggatccctcagagcacagaaaccttcagctttgctgtctctgaagtatttcctccagtttccctgcgggcccctatgtttgagtttgatggctgctggatcctcactcaacgaaaactcggttggaaactgttccgcctggcagtccttttttgttgttttccatctcatttcccttccatctgaaagtggcattcagctgacttgctcatttagactgttcacggagtctgaatctgccaacgtggtgttggaggctccaccttgaaaagggccacagtcagggcaactttccccatacaggaaaacttgaaaattacatcaacagtctacgtcacagccaaattatatttcctttataccaaacaaaactatggagaactaaaagtacatcacacaaaacgtttatagtgttttgcatgtgacctatttcagtatttatataactagattagtgctttctagcaaacggttctgttaattagcgagtcactgttgattctgctgtggtggtaagttgataccgtgtaactaatcccgtggatgcctcctggttatttttgtccaaacgaagcagccgtggtagtagctgtctatgattcttgctcagcaaagtaaaataaatgttaaatatgga

SEQ ID NO: 379253 - DNA, 3178 bp, Homo sapiens
  misc_feature (9)..(9): n is a, c, g, or t
  misc_feature (1165)..(1165): n is a, c, g, or t
ggcactcanaacttctccccacctgacccagggctgtgggcatcctcagactatcccagaggcatcgcaagccttcaagctgcagcattgcacggcactcaagggctatgaccaacggaggccgttcagtcgcttctgtttagaggaaggccccctacctcttccacaccctgccctcctatcccttccacaccctgggctgcgtgactccccgcaaccccagggcaccctgccctcctacctgtgggggtttccagccctgaggttgaggacaaacctctcgtgtttaacttgggaggagatgtgtacgttccttttcttttttggactctgagtatgaggcaggctgttctgaggtccccgtggggtgagcctgtctgtcctccctcagagcccaccgttcctatcatcatctagcacctgtccggttccccacgtgagccttgggcaggacgctgcagtgttgatggtttgggttacgtggcgtttacctgggcgccgtccttactgaaaaaggaaacgtccacactgaatgtttctggggcgcgtggtgtgtgtcaggcgcccaccctgtcccactctccccaagggacagtagtacggcacactggggccaccagccagctcaactcatcctcctgtgtcacgcacccccgagggcgcaggaggcctgaggagtggctactggagccgtgtgttaggcagaggcttctgaccatgtctgagctctttacccccaatctcgcagctggcggattcccatgcccggtgcagcctgttgccagccagcctttgagacccagagctccagggcttgtcagaggcagcatggggctccagtggtcctgagtctcatttccctgcctgctctttaggcctttggcacccatggtcacttcactggctttccatttggcttctcacctgggaaatacaaaaatagcccctcctgaagataaaatcattcagaaacagagcaataattctgactcattaacttctacctactcaaaaaagtctgccatgatgatggaccgaagtgaggctttttaacccacaagtaacctttttatttttttgagacagtcttgctctgtctgtcacccaggctggagtacagtggcatgatcttggctcactgcagcctcgacttcctgggctcaantgatctcccacctcagcctcccatgtggctggaaccacaggcacgtgccaccatgcctggctatttttttgttgagctgggctctcgctttgttgcccaggctggtcttgaactcctcggctcaagcaatccttcccactcagcctcctgtagtgtcgagaatataggcgtgggctactacacctgcttcagccgcttctataaaaccgctgaccctcccctccaccctcacaaggagctgccatcctgtttggattttctgtttgtggaccagaaacaaacgtttttccaaaggattagcaaatagggtaatttcctgtgtaacgctgctctggggcctcttcctcatcctggcagaaggagcctggagcccatgaggcagccagcactgtgcccttgctcagtcgtgctgtcccctccctctccctcagtctcctctccatgcccaagtcagtttccagccgctggtcttcatggcattcccagcacagccgggcaccaagaggcaaaacccaaggcctggcttggccgtgttaacgattgtacagacattttttaaaataactttgtgtaatacttttctggaatagtaagttcttgttgaactgtcacaggtgagcttctaggaacacaccgggtgtggttacttccactgggtgtgtccatggtcgtggtctgtgcttttgtaaacgaacagaacacttgaaccacctcccgaattgggtcatcggcttctttacgttgatacttaagagatttgcagctctctttcaaggaaacttcccctactgaaaggcataaaaaggttaaaaaagaaaatccgagagtcccaattccctgtataacagcattaaaataatctgcctgcctggaaagatgagaacactgttgcacaacccaaaatgtgtctttaatttgtgaaaaattaccatggtgagtcagacagtcattttaaacagctgaacagagactatcatcagcaaatagagctcagctttgtagctgcctttaaaatccttgtcccaaatccggtgagctctgcttgctgccgccgcgctcctgggtgatcactcagacgggtcagtgggaataacaggccaacaagacagctttttacatgtgtccaaaggatggcctttcgaaggcctggaagtatttcactgttggaagaagtaaacaagaatgacattccagatggaaatagaattctctctcttgcctttgaccaacatggtactaaggggtttcttctttcccaatgtatgtacgtgccctgctgggggccttactttatagaatgagagcatccgagcttccctaatgaatctggctagttctgtgtctggctgaggatacaggagtgggacatccactctcggatccctcagagcacagaaaccttcagctttgctgtctctgaagtatttcctccagtttccctgcgggcccctatgtttgagtttgatggctgctggatcctcactcaacgaaaactcggttggaaactgttccgcctggcagtccttttttgttgttttccatctcatttcccttccatctgaaagtggcattcagctgacttgctcatttagactgttcacggagtctgaatctgccaacgtggtgttggaggctccaccttgaaaagggccacagtcagggcaactttccccatacaggaaaacttgaaaattacatcaacagtctacgtcacagccaaattatatttcctttataccaaacaaaactatggagaactaaaagtacatcacacaaaacgtttatagtgttttgcatgtgacctatttcagtatttatataactagattagtgctttctagcaaacggttctgttaattagcgagtcactgttgattctgctgtggtggtaagttgataccgtgtaactaatcccgtggatgcctcctggttatttttgtccaaacgaagcagccgtggtagtagctgtctatgattcttgctcagcaaagtaaaataaatgttaaatatgga

SEQ ID NO: 379254 - DNA, 3828 bp, Homo sapiens
  misc_feature (9)..(9): n is a, c, g, or t
  misc_feature (1165)..(1165): n is a, c, g, or t
ggcactcanaacttctccccacctgacccagggctgtgggcatcctcagactatcccagaggcatcgcaagccttcaagctgcagcattgcacggcactcaagggctatgaccaacggaggccgttcagtcgcttctgtttagaggaaggccccctacctcttccacaccctgccctcctatcccttccacaccctgggctgcgtgactccccgcaaccccagggcaccctgccctcctacctgtgggggtttccagccctgaggttgaggacaaacctctcgtgtttaacttgggaggagatgtgtacgttccttttcttttttggactctgagtatgaggcaggctgttctgaggtccccgtggggtgagcctgtctgtcctccctcagagcccaccgttcctatcatcatctagcacctgtccggttccccacgtgagccttgggcaggacgctgcagtgttgatggtttgggttacgtggcgtttacctgggcgccgtccttactgaaaaaggaaacgtccacactgaatgtttctggggcgcgtggtgtgtgtcaggcgcccaccctgtcccactctccccaagggacagtagtacggcacactggggccaccagccagctcaactcatcctcctgtgtcacgcacccccgagggcgcaggaggcctgaggagtggctactggagccgtgtgttaggcagaggcttctgaccatgtctgagctctttacccccaatctcgcagctggcggattcccatgcccggtgcagcctgttgccagccagcctttgagacccagagctccagggcttgtcagaggcagcatggggctccagtggtcctgagtctcatttccctgcctgctctttaggcctttggcacccatggtcacttcactggctttccatttggcttctcacctgggaaatacaaaaatagcccctcctgaagataaaatcattcagaaacagagcaataattctgactcattaacttctacctactcaaaaaagtctgccatgatgatggaccgaagtgaggctttttaacccacaagtaacctttttatttttttgagacagtcttgctctgtctgtcacccaggctggagtacagtggcatgatcttggctcactgcagcctcgacttcctgggctcaantgatctcccacctcagcctcccatgtggctggaaccacaggcacgtgccaccatgcctggctatttttttgttgagctgggctctcgctttgttgcccaggctggtcttgaactcctcggctcaagcaatccttcccactcagcctcctgtagtgtcgagaatataggcgtgggctactacacctgcttcagccgcttctataaaaccgctgacctgtgtgtggaggacaggccaggtgtgtgctcactgcgctgcgaagatgttttgtcacgtgactttccccggatttccatttctttttttctgctttcctcaaaaactaatagaagactgggtgcggtggctcacgcctctaatcgcagcactttgggaggcagcagctggcggatcacaaggccaggagttcgagaccagcctggccaacatgatgaaaccctgtctctaccaaaaatacaaaaattagctgggtgcgatggtgggtgcctgtaatcccagatactcaggaggctgaggcaggagaattgtttgaaccccggagatggaggttgcagtgagccaagatcgtgccattgcactccagcctgggcaacagggcaagattccgtctcaaaaacaaacactattagaaaatgccctggaggtggcggggagttgttgatttgtgaggacagattgaaagcaactcccagggtggccttgtccacctccccatcgagaatgtggctgccggcctctttgaagattgtggtctggcataaggagaggtgcaggcgcctggttctgagcaccttggaatttccagccgcacagcatctggtgccctcccctccaccctcacaaggagctgccatcctgtttggattttctgtttgtggaccagaaacaaacgtttttccaaaggattagcaaatagggtaatttcctgtgtaacgctgctctggggcctcttcctcatcctggcagaaggagcctggagcccatgaggcagccagcactgtgcccttgctcagtcgtgctgtcccctccctctccctcagtctcctctccatgcccaagtcagtttccagccgctggtcttcatggcattcccagcacagccgggcaccaagaggcaaaacccaaggcctggcttggccgtgttaacgattgtacagacattttttaaaataactttgtgtaatacttttctggaatagtaagttcttgttgaactgtcacaggtgagcttctaggaacacaccgggtgtggttacttccactgggtgtgtccatggtcgtggtctgtgcttttgtaaacgaacagaacacttgaaccacctcccgaattgggtcatcggcttctttacgttgatacttaagagatttgcagctctctttcaaggaaacttcccctactgaaaggcataaaaaggttaaaaaagaaaatccgagagtcccaattccctgtataacagcattaaaataatctgcctgcctggaaagatgagaacactgttgcacaacccaaaatgtgtctttaatttgtgaaaaattaccatggtgagtcagacagtcattttaaacagctgaacagagactatcatcagcaaatagagctcagctttgtagctgcctttaaaatccttgtcccaaatccggtgagctctgcttgctgccgccgcgctcctgggtgatcactcagacgggtcagtgggaataacaggccaacaagacagctttttacatgtgtccaaaggatggcctttcgaaggcctggaagtatttcactgttggaagaagtaaacaagaatgacattccagatggaaatagaattctctctcttgcctttgaccaacatggtactaaggggtttcttctttcccaatgtatgtacgtgccctgctgggggccttactttatagaatgagagcatccgagcttccctaatgaatctggctagttctgtgtctggctgaggatacaggagtgggacatccactctcggatccctcagagcacagaaaccttcagctttgctgtctctgaagtatttcctccagtttccctgcgggcccctatgtttgagtttgatggctgctggatcctcactcaacgaaaactcggttggaaactgttccgcctggcagtccttttttgttgttttccatctcatttcccttccatctgaaagtggcattcagctgacttgctcatttagactgttcacggagtctgaatctgccaacgtggtgttggaggctccaccttgaaaagggccacagtcagggcaactttccccatacaggaaaacttgaaaattacatcaacagtctacgtcacagccaaattatatttcctttataccaaacaaaactatggagaactaaaagtacatcacacaaaacgtttatagtgttttgcatgtgacctatttcagtatttatataactagattagtgctttctagcaaacggttctgttaattagcgagtcactgttgattctgctgtggtggtaagttgataccgtgtaactaatcccgtggatgcctcctggttatttttgtccaaacgaagcagccgtggtagtagctgtctatgattcttgctcagcaaagtaaaataaatgttaaatatggaaaaaaaaaaccacatactcataaaataaggcgcgtttacaact

SEQ ID NO: 379255 - DNA, 2309 bp, Homo sapiens
tattgtacaattacccaccactggatttgactcagagaggacccccagagggtgtctccatcttccctatttattttcagcccttgagggcttcattgtagatcaaagccaaggcccccaggaaggtgacatactcctggaagttcacctcctggtccttgttccggtccaagtcttccatcagccttgcaatttcagcatcctgcagcttctaatgtgttagaatgtgaaatccatactcagtggtgatgacaaccctggattcttccccttccccctcccaggcaatcctctctgcaagtggctctgtgctccctcatcaccaaggacccatgtcactttggcattgcttctcctcagctacttctcagttactggtcctcatttggagagatggagaccggcagcaactctgaggaggcatcagagcagtctgccgaagaagtaagtgaggaagaaatgagtgaagatgaagaacgagaaaatgaaaaccacctcttggttgttccagagtcacggttcgaccgagattccggggagagtgaagaagcagaggaagaagtgggtgagggaacgccgcagagcagcgccctgacagagggcgactatgtgcccgactcccctgccctgtcgcccatcgagctcaagcaggagctgcccaagtacctgccggccctgcagggctgccggagcgtcgaggagttccagtgcctgaacaggatcgaggagggcacctatggagtggtctacagagcaaaagacaagaaaacagatgaaattgtggctctaaagcggctgaagatggagaaggagaaggagggcttcccgatcacgtcgctgagggagatcaacaccatcctcaaggcccagcatcccaacatcgtcaccgttagagagattgtggtgggcagcaacatggacaagatctacatcgtgatgaactatgtggagcacgacctcaagagcctgatggagaccatgaaacagcccttcctgccaggggaggtgaagaccctgatgatccagctgctgcgtggggtgaaacacctgcacgacaactggatcctgcaccgtgacctcaagacgtccaacctgctgctgagccacgccggcatcctcaaggtgggtgacttcgggctggcgcgggagtacggatcccctctgaaggcctacaccccggtcgtggtgaccctgtggtaccgcgccccagagctgctgcttggtgccaaggaatactccacggccgtggacatgtggtcagtgggttgcatcttcggggagctgctgactcagaagcctctgttccccgggaagtcagaaatcgatcagatcaacaaggtgttcaaggatctggggacccctagtgagaaaatctggcccggctacagcgagctcccagcagtcaagaagatgaccttcagcgagcacccctacaacaacctccgcaagcgcttcggggctctgctctcagaccagggcttcgacctcatgaacaagttcctgacctacttccccgggaggaggatcagcgctgaggacggcctcaagcatgagtatttccgcgagacccccctccccatcgacccctccatgttccccacgtggcccgccaagagcgagcagcagcgtgtgaagcggggcaccagcccgaggccccctgagggaggcctgggctacagccagctgggtgacgacgacctgaaggagacgggcttccaccttaccaccacgaaccagggggcctctgccgcgggccccggcttcagcctcaagttctgaaggtcagagtggaccccgtcatggggagaactcagccgggaccacaggcgtggctactgcggctggagctgcgatgagactcggaactcctcgtcttactttgtgctccatgttttgtttttgtattttggtttgtaaatttgtagaattaaatcattttccttgttgtggaggaaagagctgtgttttctccgtgacttgccagggcatcttcgggtgcccacgtggggcagcacaaacctccacacaccctctcccactctcgacacgcacggggctggctgggccgtgatttggaaaggaactggtgggagccgggtggattgtttaatcttcggagctggagacctgtttctgtgttgggatgagcgatgccctcttgccccaacccactcgtccagaccagccctgtccacacaggcccccggcccccaacccccagccccagctgtgccagcagactcgacaggtttttatacaaggttgttgagttttaaaatgtattaaaatattcttcgaggaaaaaaaac

SEQ ID NO: 379256 - DNA, 4191 bp, Homo sapiens
  misc_feature (9)..(9): n is a, c, g, or t
  misc_feature (1165)..(1165): n is a, c, g, or t
ggcactcanaacttctccccacctgacccagggctgtgggcatcctcagactatcccagaggcatcgcaagccttcaagctgcagcattgcacggcactcaagggctatgaccaacggaggccgttcagtcgcttctgtttagaggaaggccccctacctcttccacaccctgccctcctatcccttccacaccctgggctgcgtgactccccgcaaccccagggcaccctgccctcctacctgtgggggtttccagccctgaggttgaggacaaacctctcgtgtttaacttgggaggagatgtgtacgttccttttcttttttggactctgagtatgaggcaggctgttctgaggtccccgtggggtgagcctgtctgtcctccctcagagcccaccgttcctatcatcatctagcacctgtccggttccccacgtgagccttgggcaggacgctgcagtgttgatggtttgggttacgtggcgtttacctgggcgccgtccttactgaaaaaggaaacgtccacactgaatgtttctggggcgcgtggtgtgtgtcaggcgcccaccctgtcccactctccccaagggacagtagtacggcacactggggccaccagccagctcaactcatcctcctgtgtcacgcacccccgagggcgcaggaggcctgaggagtggctactggagccgtgtgttaggcagaggcttctgaccatgtctgagctctttacccccaatctcgcagctggcggattcccatgcccggtgcagcctgttgccagccagcctttgagacccagagctccagggcttgtcagaggcagcatggggctccagtggtcctgagtctcatttccctgcctgctctttaggcctttggcacccatggtcacttcactggctttccatttggcttctcacctgggaaatacaaaaatagcccctcctgaagataaaatcattcagaaacagagcaataattctgactcattaacttctacctactcaaaaaagtctgccatgatgatggaccgaagtgaggctttttaacccacaagtaacctttttatttttttgagacagtcttgctctgtctgtcacccaggctggagtacagtggcatgatcttggctcactgcagcctcgacttcctgggctcaantgatctcccacctcagcctcccatgtggctggaaccacaggcacgtgccaccatgcctggctatttttttgttgagctgggctctcgctttgttgcccaggctggtcttgaactcctcggctcaagcaatccttcccactcagcctcctgtagtgtcgagaatataggcgtgggctactacacctgcttcagccgcttctataaaaccgctgacctgtgtgtggaggacaggccaggtgtgtgctcactgcgctgcgaagatgttttgtcacgtgactttccccggatttccatttctttttttctgctttcctcaaaaactaatagaagactgggtgcggtggctcacgcctctaatcgcagcactttgggaggcagcagctggcggatcacaaggccaggagttcgagaccagcctggccaacatgatgaaaccctgtctctaccaaaaatacaaaaattagctgggtgcgatggtgggtgcctgtaatcccagatactcaggaggctgaggcaggagaattgtttgaaccccggagatggaggttgcagtgagccaagatcgtgccattgcactccagcctgggcaacagggcaagattccgtctcaaaaacaaacactattagaaaatgccctggaggtggcggggagttgttgatttgtgaggacagattgaaagcaactcccagggtggccttgtccacctccccatcgagaatgtggctgccggcctctttgaagattgtggtctggcataaggagaggtgcaggcgcctggttctgagcaccttggaatttccagccgcacagcatctggtgccctcccctccaccctcacaaggagctgccatcctgtttggattttctgtttgtggaccagaaacaaacgtttttccaaaggattagcaaatagggtaatttcctgtgtaacgctgctctggggcctcttcctcatcctggcagaaggagcctggagcccatgaggcagccagcactgtgcccttgctcagtcgtgctgtcccctccctctccctcagtctcctctccatgcccaagtcagtttccagccgctggtcttcatggcattcccagcacagccgggcaccaagaggcaaaacccaaggcctggcttggccgtgttaacgattgtacagacattttttaaaataactttgtgtaatacttttctggaatagtaagttcttgttgaactgtcacaggtgagcttctaggaacacaccgggtgtggttacttccactgggtgtgtccatggtcgtggtctgtgcttttgtaaacgaacagaacacttgaaccacctcccgaattgggtcatcggcttctttacgttgatacttaagagatttgcagctctctttcaaggaaacttcccctactgaaaggcataaaaaggttaaaaaagaaaatccgagagtcccaattccctgtataacagcattaaaataatctgcctgcctggaaagatgagaacactgttgcacaacccaaaatgtgtctttaatttgtgaaaaattaccatggtgagtcagacagtcattttaaacagctgaacagagactatcatcagcaaatagagctcagctttgtagctgcctttaaaatccttgtcccaaatccggtgagctctgcttgctgccgccgcgctcctgggtgatcactcagacgggtcagtgggaataacaggccaacaagacagctttttacatgtgtccaaaggatggcctttcgaaggcctggaagtatttcactgttggaagaagtaaacaagaatgacattccagatggaaatagaattctctctcttgcctttgaccaacatggtactaaggggtttcttctttcccaatgtatgtacgtgccctgctgggggccttactttatagaatgagagcatccgagcttccctaatgaatctggctagttctgtgtctggctgaggatacaggagtgggacatccactctcggatccctcagagcacagaaaccttcagctttgctgtctctgaagtatttcctccagtttccctgcgggcccctatgtttgagtttgatggctgctggatcctcactcaacgaaaactcggttggaaactgttccgcctggcagtccttttttgttgttttccatctcatttcccttccatctgaaagtggcattcagctgacttgctcatttagactgttcacggagtctgaatctgccaacgtggtgttggaggctccaccttgaaaagggccacagtcagggcaactttccccatacaggaaaacttgaaaattacatcaacagtctacgtcacagccaaattatatttcctttataccaaacaaaactatggagaactaaaagtacatcacacaaaacgtttatagtgttttgcatgtgacctatttcagtatttatataactagattagtgctttctagcaaacggttctgttaattagcgagtcactgttgattctgctgtggtggtaagttgataccgtgtaactaatcccgtggatgcctcctggttatttttgtccaaacgaagcagccgtggtagtagctgtctatgattcttgctcagcaaagtaaaataaatgttaaatatggaaaaaaaaaaaaaaaaaaaaaaaaaaggggggggggttaaaaaataaccttggaggggcccaaggtttaggggtacccggtttttttgtaaaaaggggggcccaataggggagggaaaaaaagaagcagggcgcggtttacaacggtcgtgctgggaaacctggtaggtgggatctttgggagggaccctacttgtggtgggccacgtgggcacctactagaagttaaaggttaggaaaattaattagggttcgggtaacaccgattgtggtgaagttgttccggtgtttgaatagggggttatttataaaaagagggaagaagagagatatatgagaggagtgatatacctgacagatcaaaagaaacgaagaaagaatagttataaataaaaggagagtataatg

SEQ ID NO: 379257 - DNA, 3449 bp, Homo sapiens
ggcacgaggaggaagtgacgatacttttggcgcgcgccggttgctgtttcttctctggctccgggaccggcggcggcggcggcggcacgggcggcggcgtagggtgttttaactcaaatgggtgatgaaaaggactcttggaaagtgaaaactttagatgaaattcttcaggaaaagaaacgaaggaaggaacaagaggagaaagcagagataaaacgcttaaaaaattctgatgaccgggattccaagcgggattcccttgaggagggggagctgagagatcactgcatggagatcacaataaggaactccccgtatagaagagaagactctatggaagacagaggagaagaagatgattctttggccatcaaaccaccccagcaaatgtctcggaaagaaaaagttcatcacagaaaagatgaaaagagaaaagagaaacgtaggcatcgtagccattcagcagaaggggggaagcatgctagagtgaaagaaaaagaaagagagcacgaacgtcggaaacgacatcgagaagaacaggataaagctcgccgggaatgggaaagacagaagagaagggaaatggcaagggagcattccaggagagaaagggaccgcttggagcagttagaaaggaagcgggagcgggagcgcaagatgcgggagcagcagaaggagcagcgggagcagaaggagcgcgagcggcgggcggaggagcggcgcaaggagcgggaggcccgcagggaagtgtctgcacatcaccgaacgatgagagaggactacagcgacaaagtgaaagccagccactggagtcgcagcccgcctcggccgccgcgggagcggttcgagttgggagacggccggaagccagtaaaagaagagaaaatggaagaaagggacctgctgtccgacttacaggacatcagcgacagcgagaggaagaccagctcggccgagtcctcgtcagcagaatcaggctcaggttctgaggaagaagaggaggaggaggaagaggaggaggaggaagggagcaccagtgaagaatcagaggaggaggaggaggaagaggaagaggaggaggaggagaccggcagcaactctgaggaggcatcagagcagtctgccgaagaagtaagtgaggaagaaatgagtgaagatgaagaacgagaaaatgaaaaccacctcttggttgttccagagtcacggttcgaccgagattccggggagagtgaagaagcagaggaagaagtgggtgagggaacgccgcagagcagcgccctgacagagggcgactatgtgcccgactcccctgccctgtcgcccatcgagctcaagcaggagctgcccaagtacctgccggccctgcagggctgccggagcgtcgaggagttccagtgcctgaacaggatcgaggagggcacctatggagtggtctacagagcaaaagacaagaaaacagatgaaattgtggctctaaagcggctgaagatggagaaggagaaggagggcttcccgatcacgtcgctgagggagatcaacaccatcctcaaggcccagcatcccaacatcgtcaccgttagagtgagcatggccccaccacgcctggccccgggtggaaggcttttccgacagggccccgtgctgtcctggggccgggtgcttcctacactctcctgcacttagtggagcccttcacagaccacacagaagcaagtatttgcctcccgggtggcaccggaggtccttactgtccctcagcatctgcgcccgggtgcaggggtgggtgggggcctggaggtgcccagcacccacagagccgtgccctgcaggagattgtggtgggcagcaacatggacaagatctacatcgtgatgaactatgtggagcacgacctcaagagcctgatggagaccatgaaacagcccttcctgccaggtacagccgcgccccggggtcctgtctgcgtacaagtgggggcagtgtcctggtcacccccgcggtgacagtgctgcagggagggccagctgcatccacagggaaagccctgagaagcctctgttgctgccgaggcgagcgggccaccctgagtgccctgggcttggggcggccgggtccacatgggagcctccctccctcccaggggaggtgaagaccctgatgatccagctgctgcgtggggtgaaacacctgcacgacaactggatcctgcaccgtgacctcaagacgtccaacctgctgctgagccacgccggcatcctcaaggtgggtgacttcgggctggcgcgggagtacggatcccctctgaaggcctacaccccggtcgtggtgaccctgtggtaccgcgccccagagctgctgcttggtgccaaggaatactccacggccgtggacatgtggtcagtgggttgcatcttcggggagctgctgactcagaagcctctgttccccgggaagtcagaaatcgatcagatcaacaaggtgttcaaggatctggggacccctagtgagaaaatctggcccggctacagcgagctcccagcagtcaagaagatgaccttcagcgagcacccctacaacaacctccgcaagcgcttcggggctctgctctcagaccagggcttcgacctcatgaacaagttcctgacctacttccccgggaggaggatcagcgctgaggacggcctcaagcatgagtatttccgcgagacccccctccccatcgacccctccatgttccccacgtggcccgccaagagcgagcagcagcgtgtgaagcggggcaccagcccgaggccccctgagggaggcctgggctacagccagctgggtgacgacgacctgaaggagacgggcttccaccttaccaccacgaaccagggggcctctgccgcgggccccggcttcagcctcaagttctgaaggtcagagtggaccccgtcatggggagaactcagccgggaccacaggcgtggctactgcggctggagctgcgatgagactcggaactcctcgtcttactttgtgctccatgttttgtttttgtattttggtttgtaaatttgtagaattaaatcattttccttgttgtggaggaaagagctgtgttttctccgtgacttgccagggcatcttcgggtgcccacgtggggcagcacaaacctccacacaccctctcccactctcgacacgcacggggctggctgggccgtgatttggaaaggaactggtgggagccgggtggattgtttaatcttcggagctggagacctgtttctgtgttgggatgagcgatgccctcttgccccaacccactcgtccagaccagccctgtccacacaggcccccggcccccaacccccagccccagctgtgccagcagactcgacaggtttttatacaaggttgttgagttttaaaatgtattaaaatattcttcgaggaaaaaaaac

SEQ ID NO: 379258 - DNA, 3195 bp, Homo sapiens
ggcacgaggaggaagtgacgatacttttggcgcgcgccggttgctgtttcttctctggctccgggaccggcggcggcggcggcggcacgggcggcggcgtagggtgttttaactcaaatgggtgatgaaaaggactcttggaaagtgaaaactttagatgaaattcttcaggaaaagaaacgaaggaaggaacaagaggagaaagcagagataaaacgcttaaaaaattctgatgaccgggattccaagcgggattcccttgaggagggggagctgagagatcactgcatggagatcacaataaggaactccccgtatagaagagaagactctatggaagacagaggagaagaagatgattctttggccatcaaaccaccccagcaaatgtctcggaaagaaaaagttcatcacagaaaagatgaaaagagaaaagagaaacgtaggcatcgtagccattcagcagaaggggggaagcatgctagagtgaaagaaaaagaaagagagcacgaacgtcggaaacgacatcgagaagaacaggataaagctcgccgggaatgggaaagacagaagagaagggaaatggcaagggagcattccaggagagaaagggaccgcttggagcagttagaaaggaagcgggagcgggagcgcaagatgcgggagcagcagaaggagcagcgggagcagaaggagcgcgagcggcgggcggaggagcggcgcaaggagcgggaggcccgcagggaagtgtctgcacatcaccgaacgatgagagaggactacagcgacaaagtgaaagccagccactggagtcgcagcccgcctcggccgccgcgggagcggttcgagttgggagacggccggaagccagtaaaagaagagaaaatggaagaaagggacctgctgtccgacttacaggacatcagcgacagcgagaggaagaccagctcggccgagtcctcgtcagcagaatcaggctcaggttctgaggaagaagaggaggaggaggaagaggaggaggaggaagggagcaccagtgaagaatcagaggaggaggaggaggaagaggaagaggaggaggaggagaccggcagcaactctgaggaggcatcagagcagtctgccgaagaagtaagtgaggaagaaatgagtgaagatgaagaacgagaaaatgaaaaccacctcttggttgttccagagtcacggttcgaccgagattccggggagagtgaagaagcagaggaagaagtgggtgagggaacgccgcagagcagcgccctgacagagggcgactatgtgcccgactcccctgccctgtcgcccatcgagctcaagcaggagctgcccaagtacctgccggccctgcagggctgccggagcgtcgaggagttccagtgcctgaacaggatcgaggagggcacctatggagtggtctacagagcaaaagacaagaaaacagatgaaattgtggctctaaagcggctgaagatggagaaggagaaggagggcttcccgatcacgtcgctgagggagatcaacaccatcctcaaggcccagcatcccaacatcgtcaccgttagagagattgtggtgggcagcaacatggacaagatctacatcgtgatgaactatgtggagcacgacctcaagagcctgatggagaccatgaaacagcccttcctgccaggggaggtgaagaccctgatgatccagctgctgcgtggggtgaaacacctgcacgacaactggatcctgcaccgtgacctcaagacgtccaacctgctgctgagccacgccggcatcctcaaggtgggtgacttcgggctggcgcgggagtacggatcccctctgaaggcctacaccccggtcgtggtgaccctgtggtaccgcgccccagagctgctgcttggtgccaaggaatactccacggccgtggacatgtggtcagtgggttgcatcttcggggagctgctgactcagaagcctctgttccccgggaagtcagaaatcgatcagatcaacaaggtgttcaaggtgggtctggccctgccgcaggtgcgctatggatttcagaggagttgcaggaatggggctgcggggcgcacaggtgctgggttgagatggggaccagggccactgagagccctcctggtggcttgtcttctctgacgggacacaggtgccaacactgtgggccacttggtgtggctgttgaagcacctctgtctttcaggatctggggacccctagtgagaaaatctggcccggctacagcgagctcccagcagtcaagaagatgaccttcagcgagcacccctacaacaacctccgcaagcgcttcggggctctgctctcagaccagggcttcgacctcatgaacaagttcctgacctacttccccgggaggaggatcagcgctgaggacggcctcaagcatgagtatttccgcgagacccccctccccatcgacccctccatgttccccacgtggcccgccaagagcgagcagcagcgtgtgaagcggggcaccagcccgaggccccctgagggaggcctgggctacagccagctgggtgacgacgacctgaaggagacgggcttccaccttaccaccacgaaccagggggcctctgccgcgggccccggcttcagcctcaagttctgaaggtcagagtggaccccgtcatggggagaactcagccgggaccacaggcgtggctactgcggctggagctgcgatgagactcggaactcctcgtcttactttgtgctccatgttttgtttttgtattttggtttgtaaatttgtagaattaaatcattttccttgttgtggaggaaagagctgtgttttctccgtgacttgccagggcatcttcgggtgcccacgtggggcagcacaaacctccacacaccctctcccactctcgacacgcacggggctggctgggccgtgatttggaaaggaactggtgggagccgggtggattgtttaatcttcggagctggagacctgtttctgtgttgggatgagcgatgccctcttgccccaacccactcgtccagaccagccctgtccacacaggcccccggcccccaacccccagccccagctgtgccagcagactcgacaggtttttatacaaggttgttgagttttaaaatgtattaaaatattcttcgaggaaaaaaaac

SEQ ID NO: 379259 - DNA, 1903 bp, Homo sapiens
ttcactagccgctctgcctgaaccaggtatgtgagcgcacacgaacactgaggtgaaccatgatagaactgagtaacattgaaaaccacctcttggtggttccagagtcacggttcgaccgagattccggggagagtgaagaagcagaggaagaagtgggtgagggaacgccgcagagcagcgccctgacagagggcgactatgtgcccgactcccctgccctgtcgcccatcgagctcaagcaggagctgcccaagtacctgccggccctgcagggctgccggagcgtcgaggagttccagtgcctgaacaggatcgaggagggcacctatggagtggtctacagagcaaaagacaagaaaacagatgaaattgtggctctaaagcggctgaagatggagaaggagaaggagggcttcccgatcacgtcgctgagggagatcaacaccatcctcaaggcccagcatcccaacatcgtcaccgttagagagattgtggtgggcagcaacatggacaagatctacatcgtgatgaactatgtggagcacgacctcaagagcctgatggagaccatgaaacagcccttcctgccaggggaggtgaagaccctgatgatccagctgctgcgtggggtgaaacacctgcacgacaactggatcctgcaccgtgacctcaagacgtccaacctgctgctgagccacgccggcatcctcaaggtgggtgacttcgggctggcgcgggagtacggatcccctctgaaggcctacaccccggtcgtggtgaccctgtggtaccgcgccccagagctgctgcttggtgccaaggaatactccacggccgtggacatgtggtcagtgggttgcatcttcggggagctgctgactcagaagcctctgttccccgggaagtcagaaatcgatcagatcaacaaggtgttcaaggatctggggacccctagtgagaaaatctggcccggctacagcgagctcccagcagtcaagaagatgaccttcagcgagcacccctacaacaacctccgcaagcgcttcggggctctgctctcagaccagggcttcgacctcatgaacaagttcctgacctacttccccgggaggaggatcagcgctgaggacggcctcaagcatgagtatttccgcgagacccccctccccatcgacccctccatgttccccacgtggcccgccaagagcgagcagcagcgtgtgaagcggggcaccagcccgaggccccctgagggaggcctgggctacagccagctgggtgacgacgacctgaaggagacgggcttccaccttaccaccacgaaccagggggcctctgccgcgggccccggcttcagcctcaagttctgaaggtcagagtggaccccgtcatggggagaactcagccgggaccacaggcgtggctactgcggctggagctgcgatgagactcggaactcctcgtcttactttgtgctccatgttttgtttttgtattttggtttgtaaatttgtagaattaaatcattttccttgttgtggaggaaagagctgtgttttctccgtgacttgccagggcatcttcgggtgcccacgtggggcagcacaaacctccacacaccctctcccactctcgacacgcacggggctggctgggccgtgatttggaaaggaactggtgggagccgggtggattgtttaatcttcggagctggagacctgtttctgtgttgggatgagcgatgccctcttgccccaacccactcgtccagaccagccctgtccacacaggcccccggcccccaacccccagccccagctgtgccagcagactcgacaggtttttatacaaggttgttgagttttaaaatgtattaaaatattcttcgaggaaaaaaaac

SEQ ID NO: 379260 - DNA, 3076 bp, Homo sapiens
ggcacgaggaggaagtgacgatacttttggcgcgcgccggttgctgtttcttctctggctccgggaccggcggcggcggcggcggcacgggcggcggcgtagggtgttttaactcaaatgggtgatgaaaaggactcttggaaagtgaaaactttagatgaaattcttcaggaaaagaaacgaaggaaggaacaagaggagaaagcagagataaaacgcttaaaaaattctgatgaccgggattccaagcgggattcccttgaggagggggagctgagagatcactgcatggagatcacaataaggaactccccgtatagaagagaagactctatggaagacagaggagaagaagatgattctttggccatcaaaccaccccagcaaatgtctcggaaagaaaaagttcatcacagaaaagatgaaaagagaaaagagaaacgtaggcatcgtagccattcagcagaaggggggaagcatgctagagtgaaagaaaaagaaagagagcacgaacgtcggaaacgacatcgagaagaacaggataaagctcgccgggaatgggaaagacagaagagaagggaaatggcaagggagcattccaggagagaaagggaccgcttggagcagttagaaaggaagcgggagcgggagcgcaagatgcgggagcagcagaaggagcagcgggagcagaaggagcgcgagcggcgggcggaggagcggcgcaaggagcgggaggcccgcagggaagtgtctgcacatcaccgaacgatgagagaggactacagcgacaaagtgaaagccagccactggagtcgcagcccgcctcggccgccgcgggagcggttcgagttgggagacggccggaagccagtaaaagaagagaaaatggaagaaagggacctgctgtccgacttacaggacatcagcgacagcgagaggaagaccagctcggccgagtcctcgtcagcagaatcaggctcaggttctgaggaagaagaggaggaggaggaagaggaggaggaggaagggagcaccagtgaagaatcagaggaggaggaggaggaagaggaagaggaggaggaggagaccggcagcaactctgaggaggcatcagagcagtctgccgaagaagtaagtgaggaagaaatgagtgaagatgaagaacgagaaaatgaaaaccacctcttggttgttccagagtcacggttcgaccgagattccggggagagtgaagaagcagaggaagaagtgggtgagggaacgccgcagagcagcgccctgacagagggcgactatgtgcccgactcccctgccctgtcgcccatcgagctcaagcaggagctgcccaagtacctgccggccctgcagggctgccggagcgtcgaggagttccagtgcctgaacaggatcgaggagggcacctatggagtggtctacagagcaaaagacaagaaaacagatgaaattgtggctctaaagcggctgaagatggagaaggagaaggagggcttcccgatcacgtcgctgagggagatcaacaccatcctcaaggcccagcatcccaacatcgtcaccgttagagagattgtggtgggcagcaacatggacaagatctacatcgtgatgaactatgtggagcacgacctcaagagcctgatggagaccatgaaacagcccttcctgccaggggaggtgaagaccctgatgatccagctgctgcgtggggtgaaacacctgcacgacaactggatcctgcaccgtgacctcaagacgtccaacctgctgctgagccacgccggcatcctcaaggtgggtgacttcgggctggcgcgggagtacggatcccctctgaaggcctacaccccggtcgtggtgaccctgtggtaccgcgccccagagctgctgcttggtgccaaggaatactccacggccgtggacatgtggtcagtgggttgcatcttcggggagctgctgactcagaagcctctgttccccgggaagtcagaaatcgatcagatcaacaaggtgttcaaggatctggggacccctagtgagaaaatctggcccggctacagcgagctcccagcagtcaagaagatgaccttcagcgagcacccctacaacaacctccgcaagcgcttcggggctctgctctcagaccagggcttcgacctcatgaacaagttcctgacctacttccccgggaggaggatcagcgctgaggacggcctcaagcatgagtatttccgcgagacccccctccccatcgacccctccatgttccccacgtggcccgccaagagcgagcagcagcgtgtgaagcggggcaccagcccgaggccccctgagggaggcctgggctacagccagctggtgaggggcctggcgggtggggcgtgcccacaggtggggctggcttgggcagggttctcacggtagccgactcgtcccagggtgacgacgacctgaaggagacgggcttccaccttaccaccacgaaccagggggcctctgccgcgggccccggcttcagcctcaagttctgaaggtcagagtggaccccgtcatggggagaactcagccgggaccacaggcgtggctactgcggctggagctgcgatgagactcggaactcctcgtcttactttgtgctccatgttttgtttttgtattttggtttgtaaatttgtagaattaaatcattttccttgttgtggaggaaagagctgtgttttctccgtgacttgccagggcatcttcgggtgcccacgtggggcagcacaaacctccacacaccctctcccactctcgacacgcacggggctggctgggccgtgatttggaaaggaactggtgggagccgggtggattgtttaatcttcggagctggagacctgtttctgtgttgggatgagcgatgccctcttgccccaacccactcgtccagaccagccctgtccacacaggcccccggcccccaacccccagccccagctgtgccagcagactcgacaggtttttatacaaggttgttgagttttaaaatgtattaaaatattcttcgaggaaaaaaaac

SEQ ID NO: 379261 - DNA, 3191 bp, Homo sapiens
ggcacgaggaggaagtgacgatacttttggcgcgcgccggttgctgtttcttctctggctccgggaccggcggcggcggcggcggcacgggcggcggcgtagggtgttttaactcaaatgggtgatgaaaaggactcttggaaagtgaaaactttagatgaaattcttcaggaaaagaaacgaaggaaggaacaagaggagaaagcagagataaaacgcttaaaaaattctgatgaccgggattccaagcgggattcccttgaggagggggagctgagagatcactgcatggagatcacaataaggaactccccgtatagaagagaagactctatggaagacagaggagaagaagatgattctttggccatcaaaccaccccagcaaatgtctcggaaagaaaaagttcatcacagaaaagatgaaaagagaaaagagaaacgtaggcatcgtagccattcagcagaaggggggaagcatgctagagtgaaagaaaaagaaagagagcacgaacgtcggaaacgacatcgagaagaacaggataaagctcgccgggaatgggaaagacagaagagaagggaaatggcaagggagcattccaggagagaaagggaccgcttggagcagttagaaaggaagcgggagcgggagcgcaagatgcgggagcagcagaaggagcagcgggagcagaaggagcgcgagcggcgggcggaggagcggcgcaaggagcgggaggcccgcagggaagtgtctgcacatcaccgaacgatgagagaggactacagcgacaaagtgaaagccagccactggagtcgcagcccgcctcggccgccgcgggagcggttcgagttgggagacggccggaagccagtaaaagaagagaaaatggaagaaagggacctgctgtccgacttacaggacatcagcgacagcgagaggaagaccagctcggccgagtcctcgtcagcagaatcaggctcaggttctgaggaagaagaggaggaggaggaagaggaggaggaggaagggagcaccagtgaagaatcagaggaggaggaggaggaagaggaagaggaggaggaggagaccggcagcaactctgaggaggcatcagagcagtctgccgaagaagtaagtgaggaagaaatgagtgaagatgaagaacgagaaaatgaaaaccacctcttggttgttccagagtcacggttcgaccgagattccggggagagtgaagaagcagaggaagaagtgggtgagggaacgccgcagagcagcgccctgacagagggcgactatgtgcccgactcccctgccctgtcgcccatcgagctcaagcaggagctgcccaagtacctgccggccctgcagggctgccggagcgtcgaggagttccagtgcctgaacaggatcgaggagggcacctatggagtggtctacagagcaaaagacaagaaaacagatgaaattgtggctctaaagcggctgaagatggagaaggagaaggagggcttcccgatcacgtcgctgagggagatcaacaccatcctcaaggcccagcatcccaacatcgtcaccgttagagtgagcatggccccaccacgcctggccccgggtggaaggcttttccgacagggccccgtgctgtcctggggccgggtgcttcctacactctcctgcacttagtggagcccttcacagaccacacagaagcaagtatttgcctcccgggtggcaccggaggtccttactgtccctcagcatctgcgcccgggtgcaggggtgggtgggggcctggaggtgcccagcacccacagagccgtgccctgcaggagattgtggtgggcagcaacatggacaagatctacatcgtgatgaactatgtggagcacgacctcaagagcctgatggagaccatgaaacagcccttcctgccaggggaggtgaagaccctgatgatccagctgctgcgtggggtgaaacacctgcacgacaactggatcctgcaccgtgacctcaagacgtccaacctgctgctgagccacgccggcatcctcaagcctcccacagcttcgcgggcactggccttcctgaacacctctcctggcgtcttaggaatactccacggccgtggacatgtggtcagtgggttgcatcttcggggagctgctgactcagaagcctctgttccccgggaagtcagaaatcgatcagatcaacaaggtgttcaaggatctggggacccctagtgagaaaatctggcccggctacagcgagctcccagcagtcaagaagatgaccttcagcgagcacccctacaacaacctccgcaagcgcttcggggctctgctctcagaccagggcttcgacctcatgaacaagttcctgacctacttccccgggaggaggatcagcgctgaggacggcctcaagcatgagtatttccgcgagacccccctccccatcgacccctccatgttccccacgtggcccgccaagagcgagcagcagcgtgtgaagcggggcaccagcccgaggccccctgagggaggcctgggctacagccagctgggtgacgacgacctgaaggagacgggcttccaccttaccaccacgaaccagggggcctctgccgcgggccccggcttcagcctcaagttctgaaggtcagagtggaccccgtcatggggagaactcagccgggaccacaggcgtggctactgcggctggagctgcgatgagactcggaactcctcgtcttactttgtgctccatgttttgtttttgtattttggtttgtaaatttgtagaattaaatcattttccttgttgtggaggaaagagctgtgttttctccgtgacttgccagggcatcttcgggtgcccacgtggggcagcacaaacctccacacaccctctcccactctcgacacgcacggggctggctgggccgtgatttggaaaggaactggtgggagccgggtggattgtttaatcttcggagctggagacctgtttctgtgttgggatgagcgatgccctcttgccccaacccactcgtccagaccagccctgtccacacaggcccccggcccccaacccccagccccagctgtgccagcagactcgacaggtttttatacaaggttgttgagttttaaaatgtattaaaatattcttcgaggaaaaaaaac

SEQ ID NO: 379262 - DNA, 3344 bp, Homo sapiens
  misc_feature (9)..(9): n is a, c, g, or t
  misc_feature (1165)..(1165): n is a, c, g, or t
ggcactcanaacttctccccacctgacccagggctgtgggcatcctcagactatcccagaggcatcgcaagccttcaagctgcagcattgcacggcactcaagggctatgaccaacggaggccgttcagtcgcttctgtttagaggaaggccccctacctcttccacaccctgccctcctatcccttccacaccctgggctgcgtgactccccgcaaccccagggcaccctgccctcctacctgtgggggtttccagccctgaggttgaggacaaacctctcgtgtttaacttgggaggagatgtgtacgttccttttcttttttggactctgagtatgaggcaggctgttctgaggtccccgtggggtgagcctgtctgtcctccctcagagcccaccgttcctatcatcatctagcacctgtccggttccccacgtgagccttgggcaggacgctgcagtgttgatggtttgggttacgtggcgtttacctgggcgccgtccttactgaaaaaggaaacgtccacactgaatgtttctggggcgcgtggtgtgtgtcaggcgcccaccctgtcccactctccccaagggacagtagtacggcacactggggccaccagccagctcaactcatcctcctgtgtcacgcacccccgagggcgcaggaggcctgaggagtggctactggagccgtgtgttaggcagaggcttctgaccatgtctgagctctttacccccaatctcgcagctggcggattcccatgcccggtgcagcctgttgccagccagcctttgagacccagagctccagggcttgtcagaggcagcatggggctccagtggtcctgagtctcatttccctgcctgctctttaggcctttggcacccatggtcacttcactggctttccatttggcttctcacctgggaaatacaaaaatagcccctcctgaagataaaatcattcagaaacagagcaataattctgactcattaacttctacctactcaaaaaagtctgccatgatgatggaccgaagtgaggctttttaacccacaagtaacctttttatttttttgagacagtcttgctctgtctgtcacccaggctggagtacagtggcatgatcttggctcactgcagcctcgacttcctgggctcaantgatctcccacctcagcctcccatgtggctggaaccacaggcacgtgccaccatgcctggctatttttttgttgagctgggctctcgctttgttgcccaggctggtcttgaactcctcggctcaagcaatccttcccactcagcctcctgtagtgtcgagaatataggcgtgggctactacacctgcttcagccgcttctataaaaccgctgacctgtgtgtggaggacaggccaggtgtgtgctcactgcgctgcgaagatgttttgtcacgtgactttccccggatttccatttctttttttctgctttcctcaaaaactaatagaagactgggtgcggtggctcacgcctctaatcgcagcactttgggaggcagcagctggcggatcacaaggccaggagttcgagaccagcctggccaacatgatgaaaccctgtctctaccaaaaatacaaaaattagctgggtgcgatggtgggtgcctgtaatcccagatactcaggaggctgaggcaggagaattgtttgaaccccggagatggaggttgcagtgagccaagatcgtgccattgcactccagcctgggcaacagggcaagattccgtctcaaaaacaaacactattagaaaatgccctggaggtggcggggagttgttgatttgtgaggacagattgaaagcaactcccagggtggccttgtccacctccccatcgagaatgtggctgccggcctctttgaagattgtggtctggcataaggagaggtgcaggcgcctggttctgagcaccttggaatttccagccgcacagcatctggtgccctcccctccaccctcacaaggagctgccatcctgtttggattttctgtttgtggaccagaaacaaacgtttttccaaaggattagcaaatagggtaatttcctgtgtaacgctgctctggggcctcttcctcatcctggcagaaggagcctggagcccatgaggcagccagcactgtgcccttgctcagtcgtgctgtcccctccctctccctcagtctcctctccatgcccaagtcagtttccagccgctggtcttcatggcattcccagcacagccgggcaccaagaggcaaaacccaaggcctggcttggccgtgttaacgattgtacagacattttttaaaataactttgtgtaatacttttctggaatagtaagttcttgttgaactgtcacaggtgagcttctaggaacacaccgggtgtggttacttccactgggtgtgtccatggtcgtggtctgtgcttttgtaaacgaacagaacacttgaaccacctcccgaattgggtcatcggcttctttacgttgatacttaagagatttgcagctctctttcaaggaaacttcccctactgaaaggcataaaaaggttaaaaaagaaaatccgagagtcccaattccctgtataacagcattaaaataatctgcctgcctggaaagatgagaacactgttgcacaacccaaaatgtgtctttaatttgtgaaaaattaccatggtgagtcagacagtcattttaaacagctgaacagagactatcatcagcaaatagagctcagctttgtagctgcctttaaaatccttgtcccaaatccggtgagctctgcttgctgccgccgcgctcctgggtgatcactcagacgggtcagtgggaataacaggccaacaagacagctttttacatgtgtccaaaggatggcctttcgaaggcctggaagtatttcactgaggcgcctcacgaggtaaccagcaggtaaatggagcgcgctccacccacccgccactaggggtcccagcggtcaagggggtggaatgcgggcgtccatcgcgaaggcattctgctcgcaagccttggcacaggcgcgggcttcgctaccggaaaagtcccggtaggattccggaagccggccacgcgttccgcgcaggcgcaaactgctccaaaagtcggcgtcgctctgctcggcgccccggcccgcgccgaagtcggaagtgcagctcacggcgcagtttcttttggagtcctggacctgagcaagcgctgttttatgcgtcatcatcccgcgcagacacaggaagtgccgcacagagcgagcccctgtcgtcttgagttctgggccagaggtcggctattatatca

SEQ ID NO: 379263 - DNA, 966 bp, Homo sapiens
  misc_feature (43)..(43): n is a, c, g, or t
cggacgcgtgggtcgacggacgcgtgggtcgaccacgcgtcgnagcgagctcccagcagtcaagaagatgaccttcagcgagcacccctacaacaacctccgcaagcgcttcggggctctgctctcagaccagggcttcgacctcatgaacaagttcctgacctacttccccgggaggaggatcagcgctgaggacggcctcaagcatgagtatttccgcgagacccccctccccatcgacccctccatgttccccacgtggcccgccaagagcgagcagcagcgtgtgaagcggggcaccagcccgaggccccctgagggaggcctgggctacagccagctgggtgacgacgacctgaaggagacgggcttccaccttaccaccacgaaccagggggcctctgccgcgggccccggcttcagcctcaagttctgaaggtcagagtggaccccgtcatggggagaactcagccgggaccacaggcgtggctactgcggctggagctgcgatgagactcggaactcctcgtcttactttgtgctccatgttttgtttttgtattttggtttgtaaatttgtagaattaaatcattttccttgttgtggaggaaagagctgtgttttctccgtgacttgccagggcatcttcgggtgcccacgtggggcagcacaaacctccacacaccctctcccactctcgacacgcacggggctggctgggccgtgatttggaaaggaactggtgggagccgggtggattgtttaatcttcggagctggagacctgtttctgtgttgggatgagcgatgccctcttgccccaacccactcgtccagaccagccctgtccacacaggcccccggcccccaacccccagccccagctgtgccagcagactcgacaggtttttatacaaggttgttgagttttaaaatgtattaaaatattcttcgaggaaaaaaaac

SEQ ID NO: 379264 - DNA, 1626 bp, Homo sapiens
  misc_feature (1614)..(1614): n is a, c, g, or t
ggcacgaggaggaagtgacgatacttttggcgcgcgccggttgctgtttcttctctggctccgggaccggcggcggcggcggcggcacgggcggcggcgtagggtgttttaactcaaatgggtgatgaaaaggactcttggaaagtgaaaactttagatgaaattcttcaggaaaagaaacgaaggaaggaacaagaggagaaagcagagataaaacgcttaaaaaattctgatgaccgggattccaagcgggattcccttgaggagggggagctgagagatcactgcatggagatcacaataaggaactccccgtatagaagagaagactctatggaagacagaggagaagaagatgattctttggccatcaaaccaccccagcaaatgtctcggaaagaaaaagttcatcacagaaaagatgaaaagagaaaagagaaacgtaggcatcgtagccattcagcagaaggggggaagcatgctagagtgaaagaaaaagaaagagagcacgaacgtcggaaacgacatcgagaagaacaggataaagctcgccgggaatgggaaagacagaagagaagggaaatggcaagggagcattccaggagagaaagggaccgcttggagcagttagaaaggaagcgggagcgggagcgcaagatgcgggagcagcagaaggagcagcgggagcagaaggagcgcgagcggcgggcggaggagcggcgcaaggagcgggaggcccgcagggaagtgtctgcacatcaccgaacgatgagagaggactacagcgacaaagtgaaagccagccactggagtcgcagcccgcctcggccgccgcgggagcggttcgagttgggagacggccggaagccagtaaaagaagagaaaatggaagaaagggacctgctgtccgacttacaggacatcagcgacagcgagaggaagaccagctcggccgagtcctcgtcagcagaatcaggctcaggttctgaggaagaagaggaggaggaggaagaggaggaggaggaagggagcaccagtgaagaatcagaggaggaggaggaggaagaggaagaggaggaggaggagaccggcagcaactctgaggaggcatcagagcagtctgccgaagaagtaagtgaggaagaaatgagtgaagatgaagaacgagaaaatgaaaaccacctcttggttgttccagagtcacggttcgaccgagattccggggagagtgaagaagcagaggaagaagtgggtgagggaacgccgcagagcagcgccctgacagagggcgactatgtgcccgactcccctgccctgtcgcccatcgagctcaagcaggagctgcccaagtacctgccggccctgcagggctgccggagcgtcgaggagttccagtgcctgaacaggatcgaggagggcacctatggagtggtctacagagcaaaagacaagaaaacagatgaaattgtggctctaaagcggctgaagatggagaaggagaaggagggcttcccgatcacgtcgctgagggagatcaacaccatcctcaaggcccagcatcccaacatcgtcaccgttagagagattgtggtgggcacacattatggaggcgcngtcgcctacgca

SEQ ID NO: 379265 - DNA, 500 bp, Homo sapiens
actgttgacacatgttctgatagaagtttgaacttgtaactaagtggaactaaggtaaactaaatggggcaatctgtaagtattttagtggctcttgaaggaggaccagttcgtagacatcaccctctcctgagcagttagaaagctgcttggaaagagctgtgcttctctcttggaaagaccgtgagactggggaagagcgccagccagtgaagtcaggacttctgtgttctggcgctggtttctacctctcactctagccaggtgacccgaggctggtaagtcacttcacttctctggattcctccacttgtaaaacatgagaagtgaactggatggtcctcccagcaactgcagtttcattctttatctttaaagaaatgtattttttaaaaaaaacaatgtgagaatgatgaaaagcttctcgctactcaatgtccttgccaatgatagtttgatagggaacctaaagttaatagctcccacagctctgactcttt

SEQ ID NO: 379266 - DNA, 760 bp, Homo sapiens
aaatacacacacatacatgtatacatacatagagatgtgatagccggcctcaagtttgcctcaataatcctggcctcctggtatttacacccttatgttgtcctctccccatagtcccctgcagggtcagtgagtgtgaccaattaaatagctgaagtgatggatatcacttctgagattactaagacagtgcagcttccattttggtctctctctctctctctctcatcacttactctgggggaagccagtggccatgtcatgaggaaattcaagtggactatagaaaggcccaggaggtgaggaactgagttctctggccaacagccaagaaagaactgtggcttcctgccaacagtcagagagagcgagcttggatgaaacttccctcccacaagtagagcctttagatggcccccagcccaggccaacagcttgacagcagccctgtgagaaaccttgaaccagaaccacccacctacgctactcttggattcctgactcatggaaattatgagataataaatgttttatatcataagtgtctaaggtttgaggtaatttgttacagagcaatagtgactaatacaagagttcagagggcaaaacagtcacacatacttaaaggctttaaaaagtcccagcagttttctgtctcgcctcttcttagccacccagacacattacccagaggctactgaccaagtgctaggctgccactgccagatttcctgttagaagaagaaaataaatttctagt

SEQ ID NO: 379267 - DNA, 1344 bp, Homo sapiens
tgagaaagggtcttgctctgttacccaggctggagtgcagtgatcacagctcactgtaacctcaaactcctgggctccggtgatcttcctgcctcagcctcctcagtagctggcaccaggggcacatgctgctgtgcctggctgatttttttttcttgtttttgtagagaccagttctctctaagcacaaagacttatttgtgctttcaacatcaaaacttataacaggcctgtaatcccaacactttgggaggctgaggcaggtgggtcacgtggggtcaggagttcgagatcagcctgggcaacatggtgaaacccctatctccactaaacatacaaaaattagccaggcatcatggcccgcgcctgtggtcccagctactagggaggctgaggcaggtgggtcacgtggggtcaggagttcgagatcagcctgggcaacatggcgaaacccccatctctaccaaaaatacaaaaatcagccaggcatcatggcccacgcctgtggtcccagctactagggaggctgaggtggaaggatcgcttaagtcctggggtcaaggttgcagtgagttattatcgcaccactgtactccagcctgggcaacagtgagaccctgcctcaaaaaaaaaaggaaaatgaaacaaaaacttacttgcctactcccacctaattaggtaggaacatcacctatatcccaatatttaactttgttacataatgtttgagctgaggaggaagttctgagatcataaagaacaattcctttatttttcagagaatctgtgtgcctagagaggttatatattttgttctcaccatttagcagtttgaaaaatctgtatcacttttatatcacagaacattcctcaacaatgaatcgtcatggtcccatttaaaaagccttgatgcaggcactaccatccgtgcttcatacatcccaaacctcttcacgtagatagttatcccagcctttgcctctaatgcactgatttctaattctaaatgcagagatggtgaatttgcagcaactaggcaaggagcttttggggctacctgggcctgcaattgtctaagaaataagttttaagaattcagaggctgaaaacagcaatcctacttgggatgtcgtcatgcttacttcagcctgaatcacacagaagaaagccttcaagcatggacctgaagcaatgctgtaaacacaaacatcaaaaggaagaggaggccaggtgtggtggctcacgcatgtaatcccagcactttgggaagcggaggcaggtggatcacctgaggtcaggaattcaagatcagcctggccaacatggtgaaaccctgtctctgct

SEQ ID NO: 379268 - DNA, 400 bp, Homo sapiens
atttgctattgaatcatgctggttcagttcaccatatctttcctcagtgcaggccggaactctgcataaatactatactgggatatttgtcatgtggttaatgatttgcatgcttaccctagagagggaaagatgaaagaatgcaaaggggtatactttgttaccgggtggagtagatatttttttgtgttgtatggtttaatgataagttaaccacctatcccacaaaatgtaccttcctgacattaaaagaataatgatacatggatcgttgtatagcttgtataaaatgatggcagatattttcttggtacaggttttaacaaaaagaaggaaaagaacataatcattagtgtagctgaagaacttggcaatgctgacagttttgctaagagccctt

SEQ ID NO: 379269 - DNA, 475 bp, Homo sapiens
agcattatacatagtatcccacaagtggaaacaacacaaatttccatcagttgattattggaaaaaacaaaatgtggtatatgtataaaatatatcaccctgcttttatgtttctaaataatcttttcattaaacttttttcagttaaaccctttgagtatgccatttactttttctttggacactgattgttagagtgggttaagagttttgcacaattgtctttataatttaaacaattttttttatttctggttaaatcgtatttcttatccctaaaacttatattgtatctattattgttaaatattaatatcattaataacttactcaattcctttaatatatataagcctattcagattatgtaatttttttggtgtgagacatggcagattgtgtctttcaagaactttgtccatttcatgaagattatcaactttgtgtgcatagagctgtttaagatattcctttc

SEQ ID NO: 379270 - DNA, 426 bp, Homo sapiens
tgcctgggcagagtactgtcccgtctctgagtctcagaggcctcccctgtgaaataagtatccaagcatcataatcatgacctgtttcagtccctaggagtgttatgaggatcaaatgaaattgttccatgttgtaaaaccactttacacgatcatgtcccactgcggtctcaaactcaagcaatcctcctacctcagcctcccgagtagctggggccacagtaatgcaccaccatacccagctaggttttatatatactgtcatatccttaatttcttataaattttagttaaaaaattttctaggacaggtgcagtggctcacacctgtaatcccaacactttgggaggctgaagtaggaggatcacttgaatccaggagttcaagaccaacctgggcaacatagacagaccttgtctctatta

SEQ ID NO: 379271 - DNA, 298 bp, Homo sapiens
aaaaagaataaggaccaaaacaatagcatgtgaggatttcaccttactggtgaagacacacctgtcctcagagtaggagacggcttccaggagtatcagcaaaaacaaactaaaggaaaagacagaaatatttaactacataaaaagtcaaccttatttttaattttaatttaaaaaatgtaaatgttatattaattttattgagatgggtctcgcaacgttgcccaggctggtctcgaactcctgggctcaagcaatcctcccgcctcagcctcccaaagtgctgggattacaggca

SEQ ID NO: 379272 - DNA, 466 bp, Homo sapiens
ataatggctatagaaaacaaaaattaaataattgctgggatatatttaagttttccagaataaaagaaaatgatggcttcagctgatctccccaactaccttcctgtgtttccttttcttgaccaagttcattagagaaagcccttccttaagatgttacattttctacttctaacagatcaactaaaacaatgattgtaacttttttgcttgggacttaagactgttgacctatttcttatgaaatggtgcctggtgtttttctggtatctatctttaagctgttttattgatgaaagggatacttgcattatttgatttttctaaccctttatctcaagacccaagaaattatatgacaaacttttatttttatttttgagatggagtctcactctgtcacccaggctagagtacagtggcgcaatctcagctcactgtaacctccgcctcccaggttcaagca

SEQ ID NO: 379273 - DNA, 295 bp, Homo sapiens
tagtagagatggggtttcaccgtattagccaggatggtctcaatctcctgacctcgtgatccgcccacctcagcctcccaaagtgctgggattacaggcgtgagccaccgcgcccatctggattacataaatttcctaatgcactcagagtcagcctgtatctataaacattagatttgctttttaaaagtacagttaaaataggcatcaaaccagtcagtaatttccacccagccttttcttttagagatttcaaaaattaagaaagaatattttccaaattttgagaagcact

SEQ ID NO: 379274 - DNA, 1691 bp, Homo sapiens
atttctttcgacaccgaagagaaggactgtataattgtgttattccttaattatttttcttctctttttgagtgatagaaattggccgctacaatgaagtctggaagtggcatcataagaacacaaagcaacattaatggagacagggtcattgtaggtagagttctcactgctttcaactaactgctgtatgtgctctccataaatcatgtcctccatatcattgataacctctaaattacatcagtcccgcttcctggatctcctctcccgatctggaattaaactgccctgcttaggcctcattttttctttattaggtgttaactgcctccagtgtcctctccttaaaaccattcaccaacttggctgggggtggctcacgcctgtaattatccggggggcccttttcagctctaaaattctatctaaaccatctttgtagatgttttttaagtaatgagttggtttaaaagtgaacaagggaagactgataaatttttctttttcacttttctgctgtcatatccgattggctaaaagtttttcttgacctgactttttgatctttaaaatgcagcagggtattgatgccaaggttttcactggactttgtaatttgagaagcagaaaatatggttatgcctttcaaaaacatctgcaaaggtttttgtttttgtattttttaaaatcttactcaagcttttcaaaacaataactttctggttcttagtggctatctcagacagttttacggaaaatatttcttacagagacagaaaggattcccacccagttaaatgtttcatcttctgtgatttgccctgcaaggagctcatctgtgtgttgagagggcatctagctttgggctccaattacaagagcagggccataggtggccatgctgcagggcactgctgttcagagggggctggccaaggaaaacactttcttgagcatttgaagcagaagatgaaacagatggtttttagctaggaaagcactcatgaacgtgtccccaagtaaatgttccatatgttaaatcctgactgcagtggaagcagcttgtcattaagtatgctacctgggaaatctccagtcaaacactccatacctgccattttatattctttgattggaaagccacacattaaatatggttctcaactttaaaagcagcactttctaatgcagacattaagtgcttgtggtaaaaatggaaatacaaacaaacctctttcatgttggctgaatcatcatcgttcttattatcatcaatagcaataggaaaaatttatatctcaccagtaaccctgctgttctttttggggtagagaagtagttatgaaatttaattcctgtcttcaagaaatttctaggctgggcgcagtggctcacgccggaaatcccaacactttgggaggccaaggcgggcagatctcttgaggacaggagttagagaccagtcgggttaacatggtgaaaccctgtctctactaaaacaaaaattagctgggcgtgatggagtgtgcctgtactcccagctactcaggaggctgaggcaggataattgctcgaacccaggaagtggaggttgcagtaagccaagatcgcaccattgcactccagcctgggcatcgcagcaacactccaaaaaagaaagaaagagagagcgagagagagagagagag

SEQ ID NO: 379275 - DNA, 1231 bp, Homo sapiens
ttctgtagccagtttaccacctgctgctgtgtgctgagttccagtaaaatcaccttgtctaaataagtgtatcatcaaggatccctcttttcagggactggataaaatggctacaagaactgtcccaggcagccagctcttcctgtataaataccacgtttttattcagttcttatttgaaaattgcgatttaaaaaactataattattcccttgggtacatgacaagtgtttttttggaaaagcaactttatttcctagcccattgccctgcccaaaagcatctggctgttccccagtgggatcgctctccccaaagagcagtgagggcttaaaagcatttttaggcagatactattaggggcgaagtctctctctgaagggaaacaaaatttttggttagttttctgaaagagaaaaagccaaaccctctgcttagctgggccaactgaatagtccacatactgcagtgacctctcatagttcaggaaaactgctgctgacacagaggaacacaaggccccctattaccttgtggctcatttaatgtgctacctgtaacatgctatgcatgcctctggaatatctttaaattctgaaccaagacccatgtattcctatttccatctgcaccagataacttataatatcaaaatgaatagaagaaaatgtgttcactggaaactggctgttgagcccctccaatgggagctgaggagctgtgtctctgcaggcatggggactggccacaagcaaagagtcagcagcatgaagccccggagctgtagcgtgtgcagcaggcgccaatccaacagcatgggaacaacagtgtcgcaatcattcctcagttatggcaagaatgtgctatttttcactgttaggtgttgcttctgagaactacaaataaaactctccaaccaagtgaacagactctctgctggccaaggggactccagagaaccttagaaactgagtttctgaccataacaggatgggaggtcagacacacctcatcataccccctcccttttgtggttttagacacaacaactgatcagcattgatattaaaagagagatcataagactgacggaacaactttgtgacaataagataccaaataataaacaggatctaaagccatgtcagccaagggttaagtcatgcacccctccctacacttaaagaataaaacaattggccaggcgcagtggctcaggcctgtaatcgca

SEQ ID NO: 379276 - DNA, 278 bp, Homo sapiens
catttttttgatgtttctcactctattaacaaaatacagcccaaaggatctgaaggccgttccaagcgagggtgcttctgaggacactgagaagagttttgccattctgaagaggcgagcctgtggaactgtttaaggtcctgttcccagaagaataaaagtttctcattatggcattaaactctatttatttagtatttgaaacatggtgtacatgtatgtatttgtataaacatttgttacatctaaaatccacaacaggtaaacaatctgtgctt

SEQ ID NO: 379277 - DNA, 3290 bp, Homo sapiens
cccctgtcaggcgggcaaaggatacagtcccggctccagaacgccgcggcactggggcgggaggggcccgccacgtccgccatcttgaaacaaccgccactcggggcgtcgcgcctgggccgccacgcctcggcctgcaggctcggtccccattggccgcaccacgcagaggcccgcccccgcctgcgcggccggcccctgcggggcgagagggtcggggcgaaggggaagctacgtcccggaggtgcggtgtggggcaccgggcggggccgcgggaaccggcgccccacggagctgctgctgtcagaccaaccccgggcccccatcatcactgcgccgcgctttcaggcgccgagaactaccgttcccggcatgccatgaaattggcctcggcgctgaggcggggtccggccctccacccgctcccgccgcgcgcgaatcgcggtcgcgagccatggaggaggaggcatcgtccccggggctgggctgcagcaagccgcacctggagaagctgaccctgggcatcacgcgcatcctagaatcttccccaggtgtgactgaggtgaccatcatagaaaagcctcctgctgaacgtcatatgatttcttcctgggaacaaaagaataactgtgtgatgcctgaagatgtgaagaacttttacctgatgaccaatggcttccacatgacatggagtgtgaagctggatgagcacatcattccactgggaagcatggcaattaacagcatctcaaaactgactcagctcacccagtcttccatgtattcacttcctaatgcacccactctggcagacctggaggacgatacacatgaagccagtgatgatcagccagagaagcctcactttgactctcgcagtgtgatatttgagctggattcatgcaatggcagtgggaaagtttgccttgtctacaaaagtgggaaaccagcattagcagaagacactgagatctggttcctggacagagcgttatactggcattttctcacagacacctttactgcctattaccgcctgctcatcacccacctgggcctgccccagtggcaatatgccttcaccagctatggcattagcccacaggccaagcaatggttcagcatgtataaacctatcacctacaacacaaacctgctcacagaagagaccgactcctttgtgaataagctagatcccagcaaagtgtttaagagcaagaacaagatcgtaatcccaaaaaagaaagggcctgtgcagcctgcaggtggccagaaagggccctcaggaccctccggtccctccacttcctccacttctaaatcctcctctggctctggaaaccccacccggaagtgagcacccctccctccaactccctaccagctccagagtggtggtttccatgcacagatggccctaggggtgacctccagttttgcgtgtggaccgtaggcctctttctagttgaatgaccaaaattgtaaggcttttagtcccaccgacattagccaggctcgtagtgaggcctccagagcaggttgtgctgtcccctgcctctggaagcaatggggaatttggaatcttgtgtaagtgcccaaataagtctgagtgctttcctcttcttcaacactcaaccctcaatcccttagcactgattgattagagaggtcccccaaagaaaccactggttttgacccatgaagcattagaactgcattgttcattcaggagccactagtcacatatgactatttaaatttaaagtaaattgtatgaaaaattcatttcttcaattgcattagccacattttgagtattcatgtggctggtagattctgtattagcacaaagatatggaacatttccatcaccacagaaagttctgttggacagcactgcattagaatattttcatactgctcttcctcaattaatttttgttgttaatgttgatgtcttcattggatgggtcataatgttccatgaaacctctcaagtacacaattgtatgttctttgtatcccttaccacaaatatctcgctctgctcatttcttttgcagcttcctataaagtttgtcttcctcatcagtttccagtgaagtttcttgcttccagttttgtgttatgatgtttgtacacgttccacaattatcttccttattaactttttaaagaaggtgtacttctgctatactttattcttaccatttaaaaacaaaaaattcccaaacattgttttgcacaactcttcataaagaaagagttttaatggtgccagacactgttaacagaagctttccacctgctctgcctgcctcttcacagctctgagttgtccagcctcactttgcctggtccctggccatccttaggacaagcagtctcctgcttagaacagggtgggcttccaagagttcctttggaagcaagttgcctgtaattcagaaatcattttcccattgacatatgggggaacctctagcccacatatgcttaatatttgacacaagataaatctgacatacctactacatttaatgaaatttttacagagaaggttgctcagattttcaattaggaatgcctatttatttcctccctctacagtcctggctgtgggcagaagcaaggccttcaccctgcttcccaacagggaaagtggggagtcacccacctagccccaagttctttgggtggctgcagtttttgtactgaagtcccagaggttagagaattaggagttttgaggaatgaggtgcaggggcctctaccatctgcacacttcagtcccagctggctcattctctttcctgacttctctctaccccggtgattggccagacttccttcctttgcactgtctacctgctaatcgacccagggtttccctcttccaaacccactggggaactaagagcagtccacaggattctccacatgcacttttgctctgaaacatgtttattttgattgttgacaatagtgatagatattcatgagaaagcgccttcgatatctcctccacctaccactttccatagcccctgaggaaaaccaaggtgaagagttagccttcaaggatcagggcaagctctaactggctgcttccccatatttgtaatagttcaaagtcttgaaatatcagcgcttaagagtctttgggagcataaactgagcttcgtattaacagcttcttcatttgctttaaaatagcgagacctcttaccttttcaatcccaaaactaaccacttataattcagtgtggtcatttaaacgtgtgtgtgtg

SEQ ID NO: 379278 - DNA, 1821 bp, Homo sapiens
gctggtacggccggaattaagggatgacaaccccgggcccccatcatcactgcgccgcgctttcaggcgccgagaactaccgttcccggcatgccatgaaattggcctcggcgctgaggcggggtccggccctccacccgctcccgccgcgcgcgaatcgcggtcgcgagccatggaggaggaggcatcgtccccggggctgggctgcagcaagccgcacctggagaagctgaccctgggcatcacgcgcatcctagaatcttccccaggtgtgactgaggtgaccatcatagaaaagcctcctgctgaacgtcatatgatttcttcctgggaacaaaagaataactgtgtgatgcctgaagatgtgaagaacttttacctgatgaccaatggcttccacatgacatggagtgtgaagctggatgagcacatcattccactgggaagcatggcaattaacagcatctcaaaactgactcagctcacccagtcttccatgtattcacttcctaatgcacccactctggcagacctggaggacgatacacatgaagccagtgatgatcagccagagaagcctcactttgactctcgcagtgtgatatttgagctggattcatgcaatggcagtgggaaagtttgccttgtctacaaaagtgggaaaccagcattagcagaagacactgagatctggttcctggacagagcgttatactggcattttctcacagacacctttactgcctattaccgcctgctcatcacccacctgggcctgccccagtggcaatatgccttcaccagctatggcattagcccacaggccaagcaatggttcagcatgtataaacctatcacctacaacacaaacctgctcacagaagagaccgactcctttgtgaataagctagatcccagcaaagtgtttaagagcaagaacaagatcgtaatcccaaaaaagaaagggcctgtgcagcctgcaggtggccagaaagggccctcaggaccctccggtccctccacttcctccacttctaaatcctcctctggctctggaaaccccacccggaagtgagcacccctccctccaactccctaccagctccagagtggtggtttccatgcacagatggccctaggggtgacctccagttttgcgtgtggaccgtaggcctctttctagttgaatgaccaaaattgtaaggcttttagtcccaccgacattagccaggctcgtagtgaggcctccagagcaggttgtgctgtcccctgcctctggaagcaatggggaatttggaatcttgtgtaagtgcccaaataagtctgagtgctttcctcttcttcaacactcaaccctcaatcccttagcactgattgattagagaggtcccccaaagaaaccactggttttgacccatgaagcattagaactgcattgttcattcaggagccactagtcacatatgactatttaaatttaaagtaaattgtatgaaaaattcatttcttcaattgcattagccacattttgagtattcatgtggctggtagattctgtattagcacaaagatatggaacatttccatcaccacagaaagttctgttggacagcactgcattagaatattttcatactgctcttcctcaattaatttttgttgttaatgttgatgtcttcattggatgggtcataatgttccatgaaacctctcaagtacacaattgtatgttctttgtatcccttaccacaaatatctcgctctgctcatttcttttgcagcttcctataaagtttgtcttcctcatcagtttccagtgaa

SEQ ID NO: 379279 - DNA, 1778 bp, Homo sapiens
cggacgcgtgggtccggacgcgtgcgccgagaactaccgttcccggcatgccatgaaattggcctcggcgctgaggcggggtccggccctccacccgctcccgccgcgcgcgaatcgcggtcgcgagccatggaggaggaggcatcgtccccggggctgggctgcagcaagccgcacctggagaagctgaccctgggcatcacgcgcatcctagaatcttccccaggtgtgactgaggtgaccatcatagaaaagcctcctgctgaacgtcatatgatttcttcctgggaacaaaagaataactgtgtgatgcctgaagatgtgaagaacttttacctgatgaccaatggcttccacatgacatggagtgtgaagctggatgagcacatcattccactgggaagcatggcaattaacagcatctcaaaactgactcagctcacccagtcttccatgtattcacttcctaatgcacccactctggcagacctggaggacgatacacatgaagccagtgatgatcagccagagaagcctcactttgactctcgcagtgtgatatttgagctggattcatgcaatggcagtgggaaagtttgccttgtctacaaaagtgggaaaccagcattagcagaagacactgagatctggttcctggacagagcgttatactggcattttctcacagacacctttactgcctattaccgcctgctcatcacccacctgggcctgccccagtggcaatatgccttcaccagctatggcattagcccacaggccaagcaatggttcagcatgtataaacctatcacctacaacacaaacctgctcacagaagagaccgactcctttgtgaataagctagatcccagcaaagtgtttaagagcaagaacaagatcgtaatcccaaaaaagaaagggcctgtgcagcctgcaggtggccagaaagggccctcaggaccctccggtccctccacttcctccacttctaaatcctcctctggctctggaaaccccacccggaagtgagcacccctccctccaactccctaccagctccagagtggtggtttccatgcacagatggccctaggggtgacctccagttttgcgtgtggaccgtaggcctctttctagttgaatgaccaaaattgtaaggcttttagtcccaccgacattagccaggctcgtagtgaggcctccagagcaggttgtgctgtcccctgcctctggaagcaatggggaatttggaatcttgtgtaagtgcccaaataagtctgagtgctttcctcttcttcaacactcaaccctcaatcccttagcactgattgattagagaggtcccccaaagaaaccactggttttgacccatgaagcattagaactgcattgttcattcaggagccactagtcacatatgactatttaaatttaaagtaaattgtatgaaaaattcatttcttcaattgcattagccacattttgagtattcatgtggctggtagattctgtattagcacaaagatatggaacatttccatcaccacagaaagttctgttggacagcactgcattagaatattttcatactgctcttcctcaattaatttttgttgttaatgttgatgtcttcattggatgggtcataatgttccatgaaacctctcaagtacacaattgtatgttctttgtatcccttaccacaaatatctcgctctgctcatttcttttgcagcttcctataaagtttgtcttcctcatcagtttccagtgaa

SEQ ID NO: 379280 - DNA, 1680 bp, Homo sapiens
taatctgtactcatgcgggcggtcgcgagccatggaggaggaggcatcgtccccggggctgggctgcagcaagccgcacctggagaagctgaccctgggcatcacgcgcatcctagaatcttccccaggtgtgactgaggtgaccatcatagaaaagcctcctgctgaacgtcatatgatttcttcctgggaacaaaagaataactgtgtgatgcctgaagatgtgaagaacttttacctgatgaccaatggcttccacatgacatggagtgtgaagctggatgagcacatcattccactgggaagcatggcaattaacagcatctcaaaactgactcagctcacccagtcttccatgtattcacttcctaatgcacccactctggcagacctggaggacgatacacatgaagccagtgatgatcagccagagaagcctcactttgactctcgcagtgtgatatttgagctggattcatgcaatggcagtgggaaagtttgccttgtctacaaaagtgggaaaccagcattagcagaagacactgagatctggttcctggacagagcgttatactggcattttctcacagacacctttactgcctattaccgcctgctcatcacccacctgggcctgccccagtggcaatatgccttcaccagctatggcattagcccacaggccaagcaatggttcagcatgtataaacctatcacctacaacacaaacctgctcacagaagagaccgactcctttgtgaataagctagatcccagcaaagtgtttaagagcaagaacaagatcgtaatcccaaaaaagaaagggcctgtgcagcctgcaggtggccagaaagggccctcaggaccctccggtccctccacttcctccacttctaaatcctcctctggctctggaaaccccacccggaagtgagcacccctccctccaactccctaccagctccagagtggtggtttccatgcacagatggccctaggggtgacctccagttttgcgtgtggaccgtaggcctctttctagttgaatgaccaaaattgtaaggcttttagtcccaccgacattagccaggctcgtagtgaggcctccagagcaggttgtgctgtcccctgcctctggaagcaatggggaatttggaatcttgtgtaagtgcccaaataagtctgagtgctttcctcttcttcaacactcaaccctcaatcccttagcactgattgattagagaggtcccccaaagaaaccactggttttgacccatgaagcattagaactgcattgttcattcaggagccactagtcacatatgactatttaaatttaaagtaaattgtatgaaaaattcatttcttcaattgcattagccacattttgagtattcatgtggctggtagattctgtattagcacaaagatatggaacatttccatcaccacagaaagttctgttggacagcactgcattagaatattttcatactgctcttcctcaattaatttttgttgttaatgttgatgtcttcattggatgggtcataatgttccatgaaacctctcaagtacacaattgtatgttctttgtatcccttaccacaaatatctcgctctgctcatttcttttgcagcttcctataaagtttgtcttcctcatcagtttccagtgaa

SEQ ID NO: 379281 - DNA, 2172 bp, Homo sapiens
cccctgtcaggcgggcaaaggatacagtcccggctccagaacgccgcggcactggggcgggaggggcccgccacgtccgccatcttgaaacaaccgccactcggggcgtcgcgcctgggccgccacgcctcggcctgcaggctcggtccccattggccgcaccacgcagaggcccgcccccgcctgcgcggccggcccctgcggggcgagagggtcggggcgaaggggaagctacgtcccggaggtgcggtgtggggcaccgggcggggccgcgggaaccggcgccccacggagctgctgctgtcagaccaaccccgggcccccatcatcactgcgccgcgctttcaggcgccgagaactaccgttcccggcatgccatgaaattggcctcggcgctgaggcggggtccggccctccacccgctcccgccgcgcgcgaatcgcggtcgcgagccatggaggaggaggcatcgtccccggggctgggctgcagcaagccgcacctggagaagctgaccctgggcatcacgcgcatcctaggactgtgaagatgatgagataccacaccttgattatgttacattaaatggcaaaagcaagattatccagaatcttccccaggtgtgactgaggtgaccatcatagaaaagcctcctgctgaacgtcatatgatttcttcctgggaacaaaagaataactgtgtgatgcctgaagatgtgaagaacttttacctgatgaccaatggcttccacatgacatggagtgtgaagctggatgagcacatcattccactgggaagcatggcaattaacagcatctcaaaactgactcagctcacccagtcttccatgtattcacttcctaatgcacccactctggcagacctggaggacgatacacatgaagccagtgatgatcagccagagaagcctcactttgactctcgcagtgtgatatttgagctggattcatgcaatggcagtgggaaagtttgccttgtctacaaaagtgggaaaccagcattagcagaagacactgagatctggttcctggacagagcgttatactggcattttctcacagacacctttactgcctattaccgcctgctcatcacccacctgggcctgccccagtggcaatatgccttcaccagctatggcattagcccacaggccaagcaatggttcagcatgtataaacctatcacctacaacacaaacctgctcacagaagagaccgactcctttgtgaataagctagatcccagcaaagtgtttaagagcaagaacaagatcgtaatcccaaaaaagaaagggcctgtgcagcctgcaggtggccagaaagggccctcaggaccctccggtccctccacttcctccacttctaaatcctcctctggctctggaaaccccacccggaagtgagcacccctccctccaactccctaccagctccagagtggtggtttccatgcacagatggccctaggggtgacctccagttttgcgtgtggaccgtaggcctctttctagttgaatgaccaaaattgtaaggcttttagtcccaccgacattagccaggctcgtagtgaggcctccagagcaggttgtgctgtcccctgcctctggaagcaatggggaatttggaatcttgtgtaagtgcccaaataagtctgagtgctttcctcttcttcaacactcaaccctcaatcccttagcactgattgattagagaggtcccccaaagaaaccactggttttgacccatgaagcattagaactgcattgttcattcaggagccactagtcacatatgactatttaaatttaaagtaaattgtatgaaaaattcatttcttcaattgcattagccacattttgagtattcatgtggctggtagattctgtattagcacaaagatatggaacatttccatcaccacagaaagttctgttggacagcactgcattagaatattttcatactgctcttcctcaattaatttttgttgttaatgttgatgtcttcattggatgggtcataatgttccatgaaacctctcaagtacacaattgtatgttctttgtatcccttaccacaaatatctcgctctgctcatttcttttgcagcttcctataaagtttgtcttcctcatcagtttccagtgaa

SEQ ID NO: 379282 - DNA, 1627 bp, Homo sapiens
ctccaagtgattccaaagatgctatcattatgagtgctacatgaagccgtattactacaaatgctgcctcagagttatagcgtgaggtgaccatcatagaaaagcctcctgctgaacgtcatatgatttcttcctgggaacaaaagaataactgtgtgatgcctgaagatgtgaagaacttttacctgatgaccaatggcttccacatgacatggagtgtgaagctggatgagcacatcattccactgggaagcatggcaattaacagcatctcaaaactgactcagctcacccagtcttccatgtattcacttcctaatgcacccactctggcagacctggaggacgatacacatgaagccagtgatgatcagccagagaagcctcactttgactctcgcagtgtgatatttgagctggattcatgcaatggcagtgggaaagtttgccttgtctacaaaagtgggaaaccagcattagcagaagacactgagatctggttcctggacagagcgttatactggcattttctcacagacacctttactgcctattaccgcctgctcatcacccacctgggcctgccccagtggcaatatgccttcaccagctatggcattagcccacaggccaagcaatggttcagcatgtataaacctatcacctacaacacaaacctgctcacagaagagaccgactcctttgtgaataagctagatcccagcaaagtgtttaagagcaagaacaagatcgtaatcccaaaaaagaaagggcctgtgcagcctgcaggtggccagaaagggccctcaggaccctccggtccctccacttcctccacttctaaatcctcctctggctctggaaaccccacccggaagtgagcacccctccctccaactccctaccagctccagagtggtggtttccatgcacagatggccctaggggtgacctccagttttgcgtgtggaccgtaggcctctttctagttgaatgaccaaaattgtaaggcttttagtcccaccgacattagccaggctcgtagtgaggcctccagagcaggttgtgctgtcccctgcctctggaagcaatggggaatttggaatcttgtgtaagtgcccaaataagtctgagtgctttcctcttcttcaacactcaaccctcaatcccttagcactgattgattagagaggtcccccaaagaaaccactggttttgacccatgaagcattagaactgcattgttcattcaggagccactagtcacatatgactatttaaatttaaagtaaattgtatgaaaaattcatttcttcaattgcattagccacattttgagtattcatgtggctggtagattctgtattagcacaaagatatggaacatttccatcaccacagaaagttctgttggacagcactgcattagaatattttcatactgctcttcctcaattaatttttgttgttaatgttgatgtcttcattggatgggtcataatgttccatgaaacctctcaagtacacaattgtatgttctttgtatcccttaccacaaatatctcgctctgctcatttcttttgcagcttcctataaagtttgtcttcctcatcagtttccagtgaa

SEQ ID NO: 379283 - DNA, 2280 bp, Homo sapiens
cccctgtcaggcgggcaaaggatacagtcccggctccagaacgccgcggcactggggcgggaggggcccgccacgtccgccatcttgaaacaaccgccactcggggcgtcgcgcctgggccgccacgcctcggcctgcaggctcggtccccattggccgcaccacgcagaggcccgcccccgcctgcgcggccggcccctgcggggcgagagggtcggggcgaaggggaagctacgtcccggaggtgcggtgtggggcaccgggcggggccgcgggaaccggcgccccacggagctgctgctgtcagaccaaccccgggcccccatcatcactgcgccgcgctttcaggcgccgagaactaccgttcccggcatgccatgaaattggcctcggcgctgaggcggggtccggccctccacccgctcccgccgcgcgcgaatcgcggtcgcgagccatggaggaggaggcatcgtccccggggctgggctgcagcaagccgcacctggagaagctgaccctgggcatcacgcgcatcctagaatcttccccaggtgtgactgaggtgaccatcatagaaaagcctcctgctgaacgtcatatgatttcttcctgggaacaaatgaagaaacagaggctgaaagagtttaaagaatttggccggcacagtggctcatgcttgtaatctcagtgttttggaaggccagggcagaggattgcttgaggccaggagttcaagacaagcctggacaacatggcaatactccagctctacaaaacaataatgttaattagccagaagaataactgtgtgatgcctgaagatgtgaagaacttttacctgatgaccaatggcttccacatgacatggagtgtgaagctggatgagcacatcattccactgggaagcatggcaattaacagcatctcaaaactgactcagctcacccagtcttccatgtattcacttcctaatgcacccactctggcagacctggaggacgatacacatgaagccagtgatgatcagccagagaagcctcactttgactctcgcagtgtgatatttgagctggattcatgcaatggcagtgggaaagtttgccttgtctacaaaagtgggaaaccagcattagcagaagacactgagatctggttcctggacagagcgttatactggcattttctcacagacacctttactgcctattaccgcctgctcatcacccacctgggcctgccccagtggcaatatgccttcaccagctatggcattagcccacaggccaagcaatggttcagcatgtataaacctatcacctacaacacaaacctgctcacagaagagaccgactcctttgtgaataagctagatcccagcaaagtgtttaagagcaagaacaagatcgtaatcccaaaaaagaaagggcctgtgcagcctgcaggtggccagaaagggccctcaggaccctccggtccctccacttcctccacttctaaatcctcctctggctctggaaaccccacccggaagtgagcacccctccctccaactccctaccagctccagagtggtggtttccatgcacagatggccctaggggtgacctccagttttgcgtgtggaccgtaggcctctttctagttgaatgaccaaaattgtaaggcttttagtcccaccgacattagccaggctcgtagtgaggcctccagagcaggttgtgctgtcccctgcctctggaagcaatggggaatttggaatcttgtgtaagtgcccaaataagtctgagtgctttcctcttcttcaacactcaaccctcaatcccttagcactgattgattagagaggtcccccaaagaaaccactggttttgacccatgaagcattagaactgcattgttcattcaggagccactagtcacatatgactatttaaatttaaagtaaattgtatgaaaaattcatttcttcaattgcattagccacattttgagtattcatgtggctggtagattctgtattagcacaaagatatggaacatttccatcaccacagaaagttctgttggacagcactgcattagaatattttcatactgctcttcctcaattaatttttgttgttaatgttgatgtcttcattggatgggtcataatgttccatgaaacctctcaagtacacaattgtatgttctttgtatcccttaccacaaatatctcgctctgctcatttcttttgcagcttcctataaagtttgtcttcctcatcagtttccagtgaa

SEQ ID NO: 379284 - DNA, 1474 bp, Homo sapiens
cccctgtcaggcgggcaaaggatacagtcccggctccagaacgccgcggcactggggcgggaggggcccgccacgtccgccatcttgaaacaaccgccactcggggcgtcgcgcctgggccgccacgcctcggcctgcaggctcggtccccattggccgcaccacgcagaggcccgcccccgcctgcgcggccggcccctgcggggcgagagggtcggggcgaaggggaagctacgtcccggaggtgcggtgtggggcaccgggcggggccgcgggaaccggcgccccacggagctgctgctgtcagaccaaccccgggcccccatcatcactgcgccgcgctttcaggcgccgagaactaccgttcccggcatgccatgaaattggcctcggcgctgaggcggggtccggccctccacccgctcccgccgcgcgcgaatcgcggtcgcgagccatggaggaggaggcatcgtccccggggctgggctgcagcaagccgcacctggagaagctgaccctgggcatcacgcgcatcctagaatcttccccaggtgtgactgaggtgaccatcatagaaaagcctcctgctgaacgtcatatgatttcttcctgggaacaaaagaataactgtgtgatgcctgaagatgtgaagaacttttacctgatgaccaatggcttccacatgacatggagtgtgaagctggatgagcacatcattccactgggaagcatggcaattaacagcatctcaaaactgactcagctcacccagtcttccatgtattcacttcctaatgcacccactctggcagacctggaggacgatacacatgaagccagtgatgatcagccagagaagcctcactttgactctcgcagtgtgatatttgagctggattcatgcaatggcagtgggaaagtttgccttgtctacaaaagtgggaaaccagcattagcagaagacactgagatctggttcctggacagagcgttatactggcattttctcacagacacctttactgcctattaccgcctgctcatcacccacctgggcctgccccagtggcaatatgccttcaccagctatggcattagcccacaggccaaggtgattaaacacaaccgtctataatgtacagacccaactctcgcaagttccaggctctcctggggtgttcacatccatcatgtactatttgacaaatgtctgcttcaacaagctccctgtctcgcccaaaggatctgaaggccgttccaagcgagggtgcttctgaggacactgagaagagttttgccattctgaagaggcgagcctgtggaactgtttaaggtcctgttcccagaagaataaaagtttctcattatggcattaaactctatttatttagtatttgaaacatggtgtacatgtatgtatttgtataaacatttgttacatctaaaatccacaacaggtaaacaatctgtgctt

SEQ ID NO: 379285 - DNA, 1350 bp, Homo sapiens
cccctgtcaggcgggcaaaggatacagtcccggctccagaacgccgcggcactggggcgggaggggcccgccacgtccgccatcttgaaacaaccgccactcggggcgtcgcgcctgggccgccacgcctcggcctgcaggctcggtccccattggccgcaccacgcagaggcccgcccccgcctgcgcggccggcccctgcggggcgagagggtcggggcgaaggggaagctacgtcccggaggtgcggtgtggggcaccgggcggggccgcgggaaccggcgccccacggagctgctgctgtcagaccaaccccgggcccccatcatcactgcgccgcgctttcaggcgccgagaactaccgttcccggcatgccatgaaattggcctcggcgctgaggcggggtccggccctccacccgctcccgccgcgcgcgaatcgcggtcgcgagccatggaggaggaggcatcgtccccggggctgggctgcagcaagccgcacctggagaagctgaccctgggcatcacgcgcatcctagaatcttccccaggtgtgactgaggtgaccatcatagaaaagcctcctgctgaacgtcatatgatttcttcctgggaacaaaagaataactgtgtgatgcctgaagatgtgaagaacttttacctgatgaccaatggcttccacatgacatggagtgtgaagctggatgagcacatcattccactgggaagcatggcaattaacagcatctcaaaactgactcagctcacccagtcttccatgtattcacttcctaatgcacccactctggcagacctggaggacgatacacatgaagccagtgatgatcagccagagaagcctcactttgactctcgcagtgtgatatttgagctggattcatgcaatggcagtgggaaagtttgccttgtctacaaaagtgggaaaccagcattagcagaagacactgagatctggttcctggacagagcgttatactggcattttctcacagacacctttactgcctattaccgcctgctcatcacccacctgggcctgccccagtggcaatatgccttcaccagctatggcattagcccacaggccaagcccaaaggatctgaaggccgttccaagcgagggtgcttctgaggacactgagaagagttttgccattctgaagaggcgagcctgtggaactgtttaaggtcctgttcccagaagaataaaagtttctcattatggcattaaactctatttatttagtatttgaaacatggtgtacatgtatgtatttgtataaacatttgttacatctaaaatccacaacaggtaaacaatctgtgctt

SEQ ID NO: 379286 - DNA, 1440 bp, Homo sapiens
tgatagaaccgaggtgatacctagctgggtgaaggcgtgaatagagcacatcattccactgggaagcatggcaattaacagcatctcaaaactgactcagctcacccagtcttccatgtattcacttcctaatgcacccactctggcagacctggaggacgatacacatgaagccagtgatgatcagccagagaagcctcactttgactctcgcagtgtgatatttgagctggattcatgcaatggcagtgggaaagtttgccttgtctacaaaagtgggaaaccagcattagcagaagacactgagatctggttcctggacagagcgttatactggcattttctcacagacacctttactgcctattaccgcctgctcatcacccacctgggcctgccccagtggcaatatgccttcaccagctatggcattagcccacaggccaagcaatggttcagcatgtataaacctatcacctacaacacaaacctgctcacagaagagaccgactcctttgtgaataagctagatcccagcaaagtgtttaagagcaagaacaagatcgtaatcccaaaaaagaaagggcctgtgcagcctgcaggtggccagaaagggccctcaggaccctccggtccctccacttcctccacttctaaatcctcctctggctctggaaaccccacccggaagtgagcacccctccctccaactccctaccagctccagagtggtggtttccatgcacagatggccctaggggtgacctccagttttgcgtgtggaccgtaggcctctttctagttgaatgaccaaaattgtaaggcttttagtcccaccgacattagccaggctcgtagtgaggcctccagagcaggttgtgctgtcccctgcctctggaagcaatggggaatttggaatcttgtgtaagtgcccaaataagtctgagtgctttcctcttcttcaacactcaaccctcaatcccttagcactgattgattagagaggtcccccaaagaaaccactggttttgacccatgaagcattagaactgcattgttcattcaggagccactagtcacatatgactatttaaatttaaagtaaattgtatgaaaaattcatttcttcaattgcattagccacattttgagtattcatgtggctggtagattctgtattagcacaaagatatggaacatttccatcaccacagaaagttctgttggacagcactgcattagaatattttcatactgctcttcctcaattaatttttgttgttaatgttgatgtcttcattggatgggtcataatgttccatgaaacctctcaagtacacaattgtatgttctttgtatcccttaccacaaatatctcgctctgctcatttcttttgcagcttcctataaagtttgtcttcctcatcagtttccagtgaa

SEQ ID NO: 379287 - DNA, 1974 bp, Homo sapiens
cccctgtcaggcgggcaaaggatacagtcccggctccagaacgccgcggcactggggcgggaggggcccgccacgtccgccatcttgaaacaaccgccactcggggcgtcgcgcctgggccgccacgcctcggcctgcaggctcggtccccattggccgcaccacgcagaggcccgcccccgcctgcgcggccggcccctgcggggcgagagggtcggggcgaaggggaagctacgtcccggaggtgcggtgtggggcaccgggcggggccgcgggaaccggcgccccacggagctgctgctgtcagaccaaccccgggcccccatcatcactgcgccgcgctttcaggcgccgagaactaccgttcccggcatgccatgaaattggcctcggcgctgaggcggggtccggccctccacccgctcccgccgcgcgcgaatcgcggtcgcgagccatggaggaggaggcatcgtccccggggctgggctgcagcaagccgcacctggagaagctgaccctgggcatcacgcgcatcctagaatcttccccaggtgtgactgaggtgaccatcatagaaaagcctcctgctgaacgtcatatgatttcttcctgggaacaaaagaataactgtgtgatgcctgaagatgtgaagaacttttacctgatgaccaatggcttccacatgacatggagtgtgaagctggatgccagtgatgatcagccagagaagcctcactttgactctcgcagtgtgatatttgagctggattcatgcaatggcagtgggaaagtttgccttgtctacaaaagtgggaaaccagcattagcagaagacactgagatctggttcctggacagagcgttatactggcattttctcacagacacctttactgcctattaccgcctgctcatcacccacctgggcctgccccagtggcaatatgccttcaccagctatggcattagcccacaggccaagcaatggttcagcatgtataaacctatcacctacaacacaaacctgctcacagaagagaccgactcctttgtgaataagctagatcccagcaaagtgtttaagagcaagaacaagatcgtaatcccaaaaaagaaagggcctgtgcagcctgcaggtggccagaaagggccctcaggaccctccggtccctccacttcctccacttctaaatcctcctctggctctggaaaccccacccggaagtgagcacccctccctccaactccctaccagctccagagtggtggtttccatgcacagatggccctaggggtgacctccagttttgcgtgtggaccgtaggcctctttctagttgaatgaccaaaattgtaaggcttttagtcccaccgacattagccaggctcgtagtgaggcctccagagcaggttgtgctgtcccctgcctctggaagcaatggggaatttggaatcttgtgtaagtgcccaaataagtctgagtgctttcctcttcttcaacactcaaccctcaatcccttagcactgattgattagagaggtcccccaaagaaaccactggttttgacccatgaagcattagaactgcattgttcattcaggagccactagtcacatatgactatttaaatttaaagtaaattgtatgaaaaattcatttcttcaattgcattagccacattttgagtattcatgtggctggtagattctgtattagcacaaagatatggaacatttccatcaccacagaaagttctgttggacagcactgcattagaatattttcatactgctcttcctcaattaatttttgttgttaatgttgatgtcttcattggatgggtcataatgttccatgaaacctctcaagtacacaattgtatgttctttgtatcccttaccacaaatatctcgctctgctcatttcttttgcagcttcctataaagtttgtcttcctcatcagtttccagtgaa

SEQ ID NO: 379288 - DNA, 1279 bp, Homo sapiens
tcacgcatacttgatgaacccggcaggcgctaacacctcactttgactctcgcagtgtgatatttgagctggattcatgcaatggcagtgggaaagtttgccttgtctacaaaagtgggaaaccagcattagcagaagacactgagatctggttcctggacagagcgttatactggcattttctcacagacacctttactgcctattaccgcctgctcatcacccacctgggcctgccccagtggcaatatgccttcaccagctatggcattagcccacaggccaagcaatggttcagcatgtataaacctatcacctacaacacaaacctgctcacagaagagaccgactcctttgtgaataagctagatcccagcaaagtgtttaagagcaagaacaagatcgtaatcccaaaaaagaaagggcctgtgcagcctgcaggtggccagaaagggccctcaggaccctccggtccctccacttcctccacttctaaatcctcctctggctctggaaaccccacccggaagtgagcacccctccctccaactccctaccagctccagagtggtggtttccatgcacagatggccctaggggtgacctccagttttgcgtgtggaccgtaggcctctttctagttgaatgaccaaaattgtaaggcttttagtcccaccgacattagccaggctcgtagtgaggcctccagagcaggttgtgctgtcccctgcctctggaagcaatggggaatttggaatcttgtgtaagtgcccaaataagtctgagtgctttcctcttcttcaacactcaaccctcaatcccttagcactgattgattagagaggtcccccaaagaaaccactggttttgacccatgaagcattagaactgcattgttcattcaggagccactagtcacatatgactatttaaatttaaagtaaattgtatgaaaaattcatttcttcaattgcattagccacattttgagtattcatgtggctggtagattctgtattagcacaaagatatggaacatttccatcaccacagaaagttctgttggacagcactgcattagaatattttcatactgctcttcctcaattaatttttgttgttaatgttgatgtcttcattggatgggtcataatgttccatgaaacctctcaagtacacaattgtatgttctttgtatcccttaccacaaatatctcgctctgctcatttcttttgcagcttcctataaagtttgtcttcctcatcagtttccagtgaa

SEQ ID NO: 379289 - DNA, 1475 bp, Homo sapiens
tgccaaaaaaaaaaaacagtaggaaacagaacaccaacaagatacagcatccctcagcagaggcccacactagcctctgtctcctgcctttcctgggggaatggtgctgccagaatccacctgatggggagtagctggtttgagggcagaacaatagacgctgtcctctagtgctttgggatctagcatcccaggctcaggactcactaaatcagaaggaggtgtgctcagattcttagttttcatactgcatttatcttaaaggtcctgagacctcataaagcaatgtgtctatcttaccagaggttgatgggatctgttatcacctccacttaaaggaagagcaaatagatttttaggcagtttttcatgaaaatgtacctctgcctcctgttcccaactctcctgcatcccacaaaaagagcacacagaatggcatttttcctttgaattgtgaccttgtcttccaattctgccttacagcaatggttcagcatgtataaacctatcacctacaacacaaacctgctcacagaagagaccgactcctttgtgaataagctagatcccagcaaagtgtttaagagcaagaacaagatcgtaatcccaaaaaagaaagggcctgtgcagcctgcaggtggccagaaagggccctcaggaccctccggtccctccacttcctccacttctaaatcctcctctggctctggaaaccccacccggaagtgagcacccctccctccaactccctaccagctccagagtggtggtttccatgcacagatggccctaggggtgacctccagttttgcgtgtggaccgtaggcctctttctagttgaatgaccaaaattgtaaggcttttagtcccaccgacattagccaggctcgtagtgaggcctccagagcaggttgtgctgtcccctgcctctggaagcaatggggaatttggaatcttgtgtaagtgcccaaataagtctgagtgctttcctcttcttcaacactcaaccctcaatcccttagcactgattgattagagaggtcccccaaagaaaccactggttttgacccatgaagcattagaactgcattgttcattcaggagccactagtcacatatgactatttaaatttaaagtaaattgtatgaaaaattcatttcttcaattgcattagccacattttgagtattcatgtggctggtagattctgtattagcacaaagatatggaacatttccatcaccacagaaagttctgttggacagcactgcattagaatattttcatactgctcttcctcaattaatttttgttgttaatgttgatgtcttcattggatgggtcataatgttccatgaaacctctcaagtacacaattgtatgttctttgtatcccttaccacaaatatctcgctctgctcatttcttttgcagcttcctataaagtttgtcttcctcatcagtttccagtgaa

SEQ ID NO: 379290 - DNA, 778 bp, Homo sapiens
atttccctggtctgaggattcggcacgagtgagcacccctccctccaactccctaccagctccagagtggtggtttccatgcacagatggccctaggggtgacctccagttttgcgtgtggaccgtaggcctctttctagttgaatgaccaaaattgtaaggcttttagtcccaccgacattagccaggctcgtagtgaggcctccagagcaggttgtgctgtcccctgcctctggaagcaatggggaatttggaatcttgtgtaagtgcccaaataagtctgagtgctttcctcttcttcaacactcaaccctcaatcccttagcactgattgattagagaggtcccccaaagaaaccactggttttgacccatgaagcattagaactgcattgttcattcaggagccactagtcacatatgactatttaaatttaaagtaaattgtatgaaaaattcatttcttcaattgcattagccacattttgagtattcatgtggctggtagattctgtattagcacaaagatatggaacatttccatcaccacagaaagttctgttggacagcactgcattagaatattttcatactgctcttcctcaattaatttttgttgttaatgttgatgtcttcattggatgggtcataatgttccatgaaacctctcaagtacacaattgtatgttctttgtatcccttaccacaaatatctcgctctgctcatttcttttgcagcttcctataaagtttgtcttcctcatcagtttccagtgaa

SEQ ID NO: 379291 - DNA, 1371 bp, Homo sapiens
cccctgtcaggcgggcaaaggatacagtcccggctccagaacgccgcggcactggggcgggaggggcccgccacgtccgccatcttgaaacaaccgccactcggggcgtcgcgcctgggccgccacgcctcggcctgcaggctcggtccccattggccgcaccacgcagaggcccgcccccgcctgcgcggccggcccctgcggggcgagagggtcggggcgaaggggaagctacgtcccggaggtgcggtgtggggcaccgggcggggccgcgggaaccggcgccccacggagctgctgctgtcagaccaaccccgggcccccatcatcactgcgccgcgctttcaggcgccgagaactaccgttcccggcatgccatgaaattggcctcggcgctgaggcggggtccggccctccacccgctcccgccgcgcgcgaatcgcggtcgcgagccatggaggaggaggcatcgtccccggggctgggctgcagcaagccgcacctggagaagctgaccctgggcatcacgcgcatcctaggactgtgaagatgatgagataccacaccttgattatgttacattaaatggcaaaagcaagattatccagaatcttccccaggtgtgactgaggtgaccatcatagaaaagcctcctgctgaacgtcatatgatttcttcctgggaacaaaagaataactgtgtgatgcctgaagatgtgaagaacttttacctgatgaccaatggcttccacatgacatggagtgtgaagctggatgagcacatcattccactgggaagcatggcaattaacagcatctcaaaactgactcagctcacccagtcttccatgtattcacttcctaatgcacccactctggcagacctggaggacgatacacatgaagccagtgatgatcagccagagaagcctcactttgactctcgcagtgtgatatttgagctggattcatgcaatggcagtgggaaagtttgccttgtctacaaaagtgggaaaccagcattagcagaagacactgagatctggttcctggacagagcgttatactggcattttctcacagacacctttactgcctattaccgcctgctcatcacccacctgggcctgccccagtggcaatatgccttcaccagctatggcattagcccacaggccaagcaatggttcagcatgtataaacctatcacctacaacacaaacctgctcacagaagagaccgactcctttgtgaataagctagatcccagcaaagtgtttaagagcaagaacaagatcgtaatcccagcaaaaaatacatcccagaaaccgtcgggggctttattcggggggcgggacaacacgggttcgca

SEQ ID NO: 379292 - DNA, 1481 bp, Homo sapiens
cccctgtcaggcgggcaaaggatacagtcccggctccagaacgccgcggcactggggcgggaggggcccgccacgtccgccatcttgaaacaaccgccactcggggcgtcgcgcctgggccgccacgcctcggcctgcaggctcggtccccattggccgcaccacgcagaggcccgcccccgcctgcgcggccggcccctgcggggcgagagggtcggggcgaaggggaagctacgtcccggaggtgcggtgtggggcaccgggcggggccgcgggaaccggcgccccacggagctgctgctgtcagaccaaccccgggcccccatcatcactgcgccgcgctttcaggcgccgagaactaccgttcccggcatgccatgaaattggcctcggcgctgaggcggggtccggccctccacccgctcccgccgcgcgcgaatcgcggtcgcgagccatggaggaggaggcatcgtccccggggctgggctgcagcaagccgcacctggagaagctgaccctgggcatcacgcgcatcctagaatcttccccaggtgtgactgaggtgaccatcatagaaaagcctcctgctgaacgtcatatgatttcttcctgggaacaaaagaataactgtgtgatgcctgaagatgtgaagaacttttacctgatgaccaatggcttccacatgacatggagtgtgaagctggatgccagtgatgatcagccagagaagcctcactttgactctcgcagtgtgatatttgagctggattcatgcaatggcagtgggaaagtttgccttgtctacaaaagtgggaaaccagcattagcagaagacactgagatctggttcctggacagagcgttatactggcattttctcacagacacctttactgcctattaccgcctgctcatcacccacctgggcctgccccagtggcaatatgccttcaccagctatggcattagcccacaggccaaggcatggggactggccacaagcaaagagtcagcagcatgaagccccggagctgtagcgtgtgcagcaggcgccaatccaacagcatgggaacaacagtgtcgcaatcattcctcagttatggcaagaatgtgctatttttcactgttaggtgttgcttctgagaactacaaataaaactctccaaccaagtgaacagactctctgctggccaaggggactccagagaaccttagaaactgagtttctgaccataacaggatgggaggtcagacacacctcatcataccccctcccttttgtggttttagacacaacaactgatcagcattgatattaaaagagagatcataagactgacggaacaactttgtgacaataagataccaaataataaacaggatctaaagccatgtcagccaagggttaagtcatgcacccctccctacacttaaagaataaaacaattggccaggcgcagtggctcaggcctgtaatcgca

SEQ ID NO: 379293 - DNA, 1455 bp, Homo sapiens
gactgctccttgacatttgtggacagggctctgggttcacctctgtcccagcatgtctgtcctgccactgagctggcaggcatttccgagggtgaagaaaaaagagagaagtggcaagagctggccctttataccacttccgatgttcctcccatgttactgggcatttttcaaacgttcatttcatttccaaatgtttagtgagggactcaattgctgccgcctcctggctttcagggcaggcaaggaagcggcagagatgtctgggcacacagtgtgaaggcagctttgctcaaacatgtcctagttgatcagttaattgatagtgattaaaaaccagctctgccttggggaattattactggttttgcgaagttctcaaaaacatcatcttcagtctctaactcccactccatctccccaccaaaaaaagagagagaaaaaaaatacccagtgatttccaaacctatcttcacattagaatcggggggaaggagatgagaagatcttttaaatgttccaaagtccaggccacacttcacaccaattaaaccacaatctctggtggagggacagaaatatcagtagttcttaaagcatccaggtgagtccgatgtgtagattgggctgggaatcaccaccctatcttattctcatactgcagtggcactattcaagatgctgggcccaataaaagagaccctttttacttagctgaaagcaagaaattagttgaccttgcttgctgcttctgtgaactttttgatccctaaaacaaaattaagattaggtttattcaatcacttccttctaaatatgaccttccattctaaagcaacaactcagcagaataccaaggaccctcaggaggacattgacatatttgttcactaaacagtgtgacaaaaatacagcttccttttgtctgtgcatcattatctcatgtcatacaaacattccaaatctgcattcagtgccaagcaataggcgaacactctcacaaactattaaaccataagtggaatattgtacctgttatttagaagcatatggaaaatgactattaataccctatgtattcttttcaataaggtgattaaacacaaccgtctataatgtacagacccaactctcgcaagttccaggctctcctggggtgttcacatccatcatgtactatttgacaaatgtctgcttcaacaagctccctgtctcgcccaaaggatctgaaggccgttccaagcgagggtgcttctgaggacactgagaagagttttgccattctgaagaggcgagcctgtggaactgtttaaggtcctgttcccagaagaataaaagtttctcattatggcattaaactctatttatttagtatttgaaacatggtgtacatgtatgtatttgtataaacatttgttacatctaaaatccacaacaggtaaacaatctgtgctt

SEQ ID NO: 379294 - DNA, 418 bp, Homo sapiens
ctctgctttcattacaggggtaataagtgttcatgagaaggattggatgttcttaagagcagtcatcaacagttagtcaacaactagcgtagaaatgtatgacagcggaccaattgcaactctacagactcttttttctcttccagaatcttccccaggtgtgactgaggtgaccatcatagaaaagcctcctgctgaacgtcatatgatttcttcctgggaacaagtaagtgttgccacatgaactctacctcccatcaaagagaggtcagtgtaaatgtccctgagaaggaaagattaggggaggaagaatatttactcagaccacagctgctttcaaggtagagtttaccttttctatgttcctgttcagcccacttaacagttcctttcattctatgccacttacccagcatgg

SEQ ID NO: 379295 - DNA, 2103 bp, Homo sapiens
cccctgtcaggcgggcaaaggatacagtcccggctccagaacgccgcggcactggggcgggaggggcccgccacgtccgccatcttgaaacaaccgccactcggggcgtcgcgcctgggccgccacgcctcggcctgcaggctcggtccccattggccgcaccacgcagaggcccgcccccgcctgcgcggccggcccctgcggggcgagagggtcggggcgaaggggaagctacgtcccggaggtgcggtgtggggcaccgggcggggccgcgggaaccggcgccccacggagctgctgctgtcagaccaaccccgggcccccatcatcactgcgccgcgctttcaggcgccgagaactaccgttcccggcatgccatgaaattggcctcggcgctgaggcggggtccggccctccacccgctcccgccgcgcgcgaatcgcggtcgcgagccatggaggaggaggcatcgtccccggggctgggctgcagcaagccgcacctggagaagctgaccctgggcatcacgcgcatcctagaatcttccccaggtgtgactgaggtgaccatcatagaaaagcctcctgctgaacgtcatatgatttcttcctgggaacaaaagaataactgtgtgatgcctgaagatgtgaagaacttttacctgatgaccaatggcttccacatgacatggagtgtgaagctggatgagcacatcattccactgggaagcatggcaattaacagcatctcaaaactgactcagctcacccagtcttccatgtattcacttcctaatgcacccactctggcagacctggaggacgatacacatgaagccagtgatgatcagccagagaagcctcactttgactctcgcagtgtgatatttgagctggattcatgcaatggcagtgggaaagtttgccttgtctacaaaagtgggaaaccagcattagcagaagacactgagatctggttcctggacagagcgttatactggcattttctcacagacacctttactgcctattaccgcctgctcatcacccacctgggcctgccccagtggcaatatgccttcaccagctatggcattagcccacaggccaagcaatggttcagcatgtataaacctatcacctacaacacaaacctgctcacagaagagaccgactcctttgtgaataagctagatcccagcaaagtgtttaagagcaagaacaagatcgtaatcccaaaaaagaaagggcctgtgcagcctgcaggtggccagaaagggccctcaggaccctccggtccctccacttcctccacttctaaatcctcctctggctctggaaaccccacccggaagtgagcacccctccctccaactccctaccagctccagagtggtggtttccatgcacagatggccctaggggtgacctccagttttgcgtgtggaccgtaggcctctttctagttgaatgaccaaaattgtaaggcttttagtcccaccgacattagccaggctcgtagtgaggcctccagagcaggttgtgctgtcccctgcctctggaagcaatggggaatttggaatcttgtgtaagtgcccaaataagtctgagtgctttcctcttcttcaacactcaaccctcaatcccttagcactgattgattagagaggtcccccaaagaaaccactggttttgacccatgaagcattagaactgcattgttcattcaggagccactagtcacatatgactatttaaatttaaagtaaattgtatgaaaaattcatttcttcaattgcattagccacattttgagtattcatgtggctggtagattctgtattagcacaaagatatggaacatttccatcaccacagaaagttctgttggacagcactgcattagaatattttcatactgctcttcctcaattaatttttgttgttaatgttgatgtcttcattggatgggtcataatgttccatgaaacctctcaagtacacaattgtatgttctttgtatcccttaccacaaatatctcgctctgctcatttcttttgcagcttcctataaagtttgtcttcctcatcagtttccagtgaa

SEQ ID NO: 379296 - DNA, 1000 bp, Homo sapiens
cccctgtcaggcgggcaaaggatacagtcccggctccagaacgccgcggcactggggcgggaggggcccgccacgtccgccatcttgaaacaaccgccactcggggcgtcgcgcctgggccgccacgcctcggcctgcaggctcggtccccattggccgcaccacgcagaggcccgcccccgcctgcgcggccggcccctgcggggcgagagggtcggggcgaaggggaagctacgtcccggaggtgcggtgtggggcaccgggcggggccgcgggaaccggcgccccacggagctgctgctgtcagaccaaccccgggcccccatcatcactgcgccgcgctttcaggcgccgagaactaccgttcccggcatgccatgaaattggcctcggcgctgaggcggggtccggccctccacccgctcccgccgcgcgcgaatcgcggtcgcgagccatggaggaggaggcatcgtccccggggctgggctgcagcaagccgcacctggagaagctgaccctgggcatcacgcgcatcctagaatcttccccaggtgtgactgaggtgaccatcatagaaaagcctcctgctgaacgtcatatgatttcttcctgggaacaagtaagtgttgccacatgaactctacctcccatcaaagagaggtcagtgtaaatgtccctgagaaggaaagattaggggaggaagaatatttactcagaccacagctgctttcaaggtagagtttaccttttctatgttcctgttcagcccacttaacagttcctttcattctatgccacttacccagcatggagtgtttcccctgagccccactctcctacagaagcagtggacattcaaagttgtgtacaacaaagctaaaaatcaattaaggaaaagaaaggatatgtgttaataagtgtcatgctgtccagaacatgattaagtgttgcacataactactaagcagattaaaagctaatgctttccaactttcctctg

SEQ ID NO: 379297 - DNA, 2326 bp, Homo sapiens
cccctgtcaggcgggcaaaggatacagtcccggctccagaacgccgcggcactggggcgggaggggcccgccacgtccgccatcttgaaacaaccgccactcggggcgtcgcgcctgggccgccacgcctcggcctgcaggctcggtccccattggccgcaccacgcagaggcccgcccccgcctgcgcggccggcccctgcggggcgagagggtcggggcgaaggggaagctacgtcccggaggtgcggtgtggggcaccgggcggggccgcgggaaccggcgccccacggagctgctgctgtcagaccaaccccgggcccccatcatcactgcgccgcgctttcaggcgccgagaactaccgttcccggcatgccatgaaattggcctcggcgctgaggcggggtccggccctccacccgctcccgccgcgcgcgaatcgcggtcgcgagccatggaggaggaggcatcgtccccggggctgggctgcagcaagccgcacctggagaagctgaccctgggcatcacgcgcatcctagaatcttccccaggtgtgactgaggtgaccatcatagaaaagcctcctgctgaacgtcatatgatttcttcctgggaacaaaagaataactgtgtgatgcctgaagatgtgaagaacttttacctgatgaccaatggcttccacatgacatggagtgtgaagctggatgagcacatcattccactgggaagcatggcaattaacagcatctcaaaactgactcagctcacccagtcttccatgtattcacttcctaatgcacccactctggcagacctggaggacgatacacatgaagccagtgatgatcagccagagaagcctcactttgactctcgcagtgtgatatttgagctggattcatgcaatggcagtgggaaagtttgccttgtctacaaaagtgggaaaccagcattagcagaagacactgagatctggttcctggacagagcgttatactggcattttctcacagacacctttactgcctattaccgcctgctcatcacccacctgggcctgccccagtggcaatatgccttcaccagctatggcattagcccacaggccaagcaatggttcagcatgtataaacctatcacctacaacacaaacctgctcacagaagagaccgactcctttgtgaataagctagatcccagcaaagtgtttaagagcaagaacaagatcgtaatcccaaaaaagaaagggcctgtgcagcctgcaggtggccagaaagggccctcaggaccctccggtccctccacttcctccacttctaaatcctcctctggctctggaaaccccacccggaagtgagcacccctccctccaactccctaccagctccagagtggtggtttccatgcacagatggccctaggggtgacctccagttttgcgtgtggaccgtaggcctctttctagttgaatgaccaaaattgtaaggcttttagtcccaccgacattagccaggctcgtagtgaggcctccagagcaggttgtgctgtcccctgcctctggaagcaatggggaatttggaatcttgtgtaagtgcccaaataagtctgagtgctttcctcttcttcaacactcaaccctcaatcccttagcactgattgattagagaggtcccccaaagaaaccactggttttgacccatgaagcattagaactgcattgttcattcaggagccactagtcacatatgactatttaaatttaaagtaaattgtatgaaaaattcatttcttcaattgcattagccacattttgagtattcatgtggctggtagattctgtattagcacaaagatatggaacatttccatcaccacagaaagttctgttggacagcactgcattagaatattttcatactgctcttcctcaattaatttttgttgttaatgttgatgtcttcattggatgggtcataatgttccatgaaacctctcaagtacacaattgtatgttctttgtatcccttaccacaaatatctcgctctgctcatttcttttgcagcttcctataaagtttgtcttcctcatcagtttccagtgaaaaaaaaacacaagaacaggacaaggagaacaagagatagaaaaaaaaaaaggggggggccttaaatatccagggggcaataacgcacacctttttgagagggcccaagggggttataaaggagggggtaaaagcgggagggaaaggtctggtttaggagcctttggggattggagccccagagtagcccgaaattgtgatggacctttggggttttttattcg

SEQ ID NO: 379298 - DNA, 1844 bp, Homo sapiens
cccctgtcaggcgggcaaaggatacagtcccggctccagaacgccgcggcactggggcgggaggggcccgccacgtccgccatcttgaaacaaccgccactcggggcgtcgcgcctgggccgccacgcctcggcctgcaggctcggtccccattggccgcaccacgcagaggcccgcccccgcctgcgcggccggcccctgcggggcgagagggtcggggcgaaggggaagctacgtcccggaggtgcggtgtggggcaccgggcggggccgcgggaaccggcgccccacggagctgctgctgtcagaccaaccccgggcccccatcatcactgcgccgcgctttcaggcgccgagaactaccgttcccggcatgccatgaaattggcctcggcgctgaggcggggtccggccctccacccgctcccgccgcgcgcgaatcgcggtcgcgagccatggaggaggaggcatcgtccccggggctgggctgcagcaagccgcacctggagaagctgaccctgggcatcacgcgcatcctagaatcttccccaggtgtgactgaggtgaccatcatagaaaagcctcctgctgaacgtcatatgatttcttcctgggaacaaaagaataactgtgtgatgcctgaagatgtgaagaacttttacctgatgaccaatggcttccacatgacatggagtgtgaagctggatgagcacatcattccactgggaagcatggcaattaacagcatctcaaaactgactcagctcacccagtcttccatgtattcacttcctaatgcacccactctggcagacctggaggacgatacacatgaagccagtgatgatcagccagagaagcctcactttgactctcgcagtgtgatatttgagctggattcatgcaatggcagtgggaaagtttgccttgtctacaaaagtgggaaaccagcattagcagaagacactgagatctggttcctggacagagcgttatactggcattttctcacagacacctttactgcctattaccgcctgctcatcacccacctgggcctgccccagtggcaatatgccttcaccagctatggcattagcccacaggccaagcaatggttcagcatgtataaacctatcacctacaacacaaacctgctcacagaagagaccgactcctttgtgaataagctagatcccagcaaagtgtttaagagcaagaacaagatcgtaatcccaaaaaagaaagggcctgtgcagcctgcaggtggccagaaagggccctcaggaccctccggtccctccacttcctccacttctaaatcctcctctggctctggaaaccccacccggaagtgagcacccctccctccaactccctaccagctccagagtggtggtttccatgcacagatggccctaggggtgacctccagttttgcgtgtggaccgtaggcctctttctagttgaatgaccaaaattgtaaggcttttagtcccaccgacattagccaggctcgtagtgaggcctccagagcaggttgtgctgtcccctgcctctggaagcaatggggaatttggaatcttgtgtaagtgcccaaataagtctgagtgctttcctcttcttcaacactcaaccctcaatcccttagcactgattgattagagaggtcccccaaagaaaccactggttttgacccatgaagcattagaactgcattgttcattcaggagccactagtcacatatgactatttaaatttaaagtaaattgtatgaaatcattctcatcatagcacattgagtatcatgggcgagatctatagacagatgacatcataccaga

SEQ ID NO: 379299 - DNA, 2265 bp, Homo sapiens
cccctgtcaggcgggcaaaggatacagtcccggctccagaacgccgcggcactggggcgggaggggcccgccacgtccgccatcttgaaacaaccgccactcggggcgtcgcgcctgggccgccacgcctcggcctgcaggctcggtccccattggccgcaccacgcagaggcccgcccccgcctgcgcggccggcccctgcggggcgagagggtcggggcgaaggggaagctacgtcccggaggtgcggtgtggggcaccgggcggggccgcgggaaccggcgccccacggagctgctgctgtcagaccaaccccgggcccccatcatcactgcgccgcgctttcaggcgccgagaactaccgttcccggcatgccatgaaattggcctcggcgctgaggcggggtccggccctccacccgctcccgccgcgcgcgaatcgcggtcgcgagccatggaggaggaggcatcgtccccggggctgggctgcagcaagccgcacctggagaagctgaccctgggcatcacgcgcatcctagggcaaggcactcacaggccaactccaaactcaagaagttggagaaatagactcacctctcaatgagaagtgctatgggcatgcagggaaggaaggaattgacagcacccacctttggagtaagctaccacagagagttttaatccacggcatatctaaagataatcttccccaggtgtgactgaggtgaccatcatagaaaagcctcctgctgaacgtcatatgatttcttcctgggaacaaaagaataactgtgtgatgcctgaagatgtgaagaacttttacctgatgaccaatggcttccacatgacatggagtgtgaagctggatgagcacatcattccactgggaagcatggcaattaacagcatctcaaaactgactcagctcacccagtcttccatgtattcacttcctaatgcacccactctggcagacctggaggacgatacacatgaagccagtgatgatcagccagagaagcctcactttgactctcgcagtgtgatatttgagctggattcatgcaatggcagtgggaaagtttgccttgtctacaaaagtgggaaaccagcattagcagaagacactgagatctggttcctggacagagcgttatactggcattttctcacagacacctttactgcctattaccgcctgctcatcacccacctgggcctgccccagtggcaatatgccttcaccagctatggcattagcccacaggccaagcaatggttcagcatgtataaacctatcacctacaacacaaacctgctcacagaagagaccgactcctttgtgaataagctagatcccagcaaagtgtttaagagcaagaacaagatcgtaatcccaaaaaagaaagggcctgtgcagcctgcaggtggccagaaagggccctcaggaccctccggtccctccacttcctccacttctaaatcctcctctggctctggaaaccccacccggaagtgagcacccctccctccaactccctaccagctccagagtggtggtttccatgcacagatggccctaggggtgacctccagttttgcgtgtggaccgtaggcctctttctagttgaatgaccaaaattgtaaggcttttagtcccaccgacattagccaggctcgtagtgaggcctccagagcaggttgtgctgtcccctgcctctggaagcaatggggaatttggaatcttgtgtaagtgcccaaataagtctgagtgctttcctcttcttcaacactcaaccctcaatcccttagcactgattgattagagaggtcccccaaagaaaccactggttttgacccatgaagcattagaactgcattgttcattcaggagccactagtcacatatgactatttaaatttaaagtaaattgtatgaaaaattcatttcttcaattgcattagccacattttgagtattcatgtggctggtagattctgtattagcacaaagatatggaacatttccatcaccacagaaagttctgttggacagcactgcattagaatattttcatactgctcttcctcaattaatttttgttgttaatgttgatgtcttcattggatgggtcataatgttccatgaaacctctcaagtacacaattgtatgttctttgtatcccttaccacaaatatctcgctctgctcatttcttttgcagcttcctataaagtttgtcttcctcatcagtttccagtgaa

SEQ ID NO: 379300 - DNA, 1707 bp, Homo sapiens
cccctgtcaggcgggcaaaggatacagtcccggctccagaacgccgcggcactggggcgggaggggcccgccacgtccgccatcttgaaacaaccgccactcggggcgtcgcgcctgggccgccacgcctcggcctgcaggctcggtccccattggccgcaccacgcagaggcccgcccccgcctgcgcggccggcccctgcggggcgagagggtcggggcgaaggggaagctacgtcccggaggtgcggtgtggggcaccgggcggggccgcgggaaccggcgccccacggagctgctgctgtcagaccaaccccgggcccccatcatcactgcgccgcgctttcaggcgccgagaactaccgttcccggcatgccatgaaattggcctcggcgctgaggcggggtccggccctccacccgctcccgccgcgcgcgaatcgcggtcgcgagccatggaggaggaggcatcgtccccggggctgggctgcagcaagccgcacctggagaagctgaccctgggcatcacgcgcatcctagaatcttccccaggtgtgactgaggtgaccatcatagaaaagcctcctgctgaacgtcatatgatttcttcctgggaacaaaagaataactgtgtgatgcctgaagatgtgaagaacttttacctgatgaccaatggcttccacatgacatggagtgtgaagctggatgagcacatcattccactgggaagcatggcaattaacagcatctcaaaactgactcagctcacccagtcttccatgtattcacttcctaatgcacccactctggcagacctggaggacgatacacatgaagccagtgatgatcagccagagaagcctcactttgactctcgcagtgtgatatttgagctggattcatgcaatggcagtgggaaagtttgccttgtctacaaaagtgggaaaccagcattagcagaagacactgagatctggttcctggacagagcgttatactggcattttctcacagacacctttactgcctattaccgcctgctcatcacccacctgggcctgccccagtggcaatatgccttcaccagctatggcattagcccacaggccaagataacttataatatcaaaatgaatagaagaaaatgtgttcactggaaactggctgttgagcccctccaatgggagctgaggagctgtgtctctgcaggcatggggactggccacaagcaaagagtcagcagcatgaagccccggagctgtagcgtgtgcagcaggcgccaatccaacagcatgggaacaacagtgtcgcaatcattcctcagttatggcaagaatgtgctatttttcactgttaggtgttgcttctgagaactacaaataaaactctccaaccaagtgaacagactctctgctggccaaggggactccagagaaccttagaaactgagtttctgaccataacaggatgggaggtcagacacacctcatcataccccctcccttttgtggttttagacacaacaactgatcagcattgatattaaaagagagatcataagactgacggaacaactttgtgacaataagataccaaataataaacaggatctaaagccatgtcagccaagggttaagtcatgcacccctccctacacttaaagaataaaacaattggccaggcgcagtggctcaggcctgtaatcgca

SEQ ID NO: 379301 - DNA, 1610 bp, Homo sapiens
cccctgtcaggcgggcaaaggatacagtcccggctccagaacgccgcggcactggggcgggaggggcccgccacgtccgccatcttgaaacaaccgccactcggggcgtcgcgcctgggccgccacgcctcggcctgcaggctcggtccccattggccgcaccacgcagaggcccgcccccgcctgcgcggccggcccctgcggggcgagagggtcggggcgaaggggaagctacgtcccggaggtgcggtgtggggcaccgggcggggccgcgggaaccggcgccccacggagctgctgctgtcagaccaaccccgggcccccatcatcactgcgccgcgctttcaggcgccgagaactaccgttcccggcatgccatgaaattggcctcggcgctgaggcggggtccggccctccacccgctcccgccgcgcgcgaatcgcggtcgcgagccatggaggaggaggcatcgtccccggggctgggctgcagcaagccgcacctggagaagctgaccctgggcatcacgcgcatcctagaatcttccccaggtgtgactgaggtgaccatcatagaaaagcctcctgctgaacgtcatatgatttcttcctgggaacaaaagaataactgtgtgatgcctgaagatgtgaagaacttttacctgatgaccaatggcttccacatgacatggagtgtgaagctggatgagcacatcattccactgggaagcatggcaattaacagcatctcaaaactgactcagctcacccagtcttccatgtattcacttcctaatgcacccactctggcagacctggaggacgatacacatgaagccagtgatgatcagccagagaagcctcactttgactctcgcagtgtgatatttgagctggattcatgcaatggcagtgggaaagtttgccttgtctacaaaagtgggaaaccagcattagcagaagacactgagatctggttcctggacagagcgttatactggcattttctcacagacacctttactgcctattaccgcctgctcatcacccacctgggcctgccccagtggcaatatgccttcaccagctatggcattagcccacaggccaaggcatggggactggccacaagcaaagagtcagcagcatgaagccccggagctgtagcgtgtgcagcaggcgccaatccaacagcatgggaacaacagtgtcgcaatcattcctcagttatggcaagaatgtgctatttttcactgttaggtgttgcttctgagaactacaaataaaactctccaaccaagtgaacagactctctgctggccaaggggactccagagaaccttagaaactgagtttctgaccataacaggatgggaggtcagacacacctcatcataccccctcccttttgtggttttagacacaacaactgatcagcattgatattaaaagagagatcataagactgacggaacaactttgtgacaataagataccaaataataaacaggatctaaagccatgtcagccaagggttaagtcatgcacccctccctacacttaaagaataaaacaattggccaggcgcagtggctcaggcctgtaatcgca

SEQ ID NO: 379302 - DNA, 1889 bp, Homo sapiens
cccctgtcaggcgggcaaaggatacagtcccggctccagaacgccgcggcactggggcgggaggggcccgccacgtccgccatcttgaaacaaccgccactcggggcgtcgcgcctgggccgccacgcctcggcctgcaggctcggtccccattggccgcaccacgcagaggcccgcccccgcctgcgcggccggcccctgcggggcgagagggtcggggcgaaggggaagctacgtcccggaggtgcggtgtggggcaccgggcggggccgcgggaaccggcgccccacggagctgctgctgtcagaccaaccccgggcccccatcatcactgcgccgcgctttcaggcgccgagaactaccgttcccggcatgccatgaaattggcctcggcgctgaggcggggtccggccctccacccgctcccgccgcgcgcgaatcgcggtcgcgagccatggaggaggaggcatcgtccccggggctgggctgcagcaagccgcacctggagaagctgaccctgggcatcacgcgcatcctagaatcttccccaggtgtgactgaggtgaccatcatagaaaagcctcctgctgaacgtcatatgatttcttcctgggaacaaaagaataactgtgtgatgcctgaagatgtgaagaacttttacctgatgaccaatggcttccacatgacatggagtgtgaagctggatgagcacatcattccactgggaagcatggcaattaacagcatctcaaaactgactcagctcacccagtcttccatgtattcacttcctaatgcacccactctggcagacctggaggacgatacacatgaagccagtgatgatcagccagagaagcctcactttgactctcgcagtgtgatatttgagctggattcatgcaatggcagtgggaaagtttgccttgtctacaaaagtgggaaaccagcattagcagaagacactgagatctggttcctggacagagcgttatactggcattttctcacagacacctttactgcctattaccgcctgctcatcacccacctgggcctgccccagtggcaatatgccttcaccagctatggcattagcccacaggccaaggtaagggaggaacacctgccattgtaaactatggtatattccaaaatctactgaggaaatggttacattgcaggttcccaacttccctatctgattcaggagatctagggtggggcccaggaacctgcattttcaataagcaagacagatgattccaatggacagcctcactttactcatctagttaagtggttcccaaacttgactgattctcagaattaactggggagttttatttttaatgaaattctgttggatagtttatgtcccatgacttgttctgggttggcagtacatgcacccaggaagagtgaaaagtcagattctcactcccctgttctccaagtgtgcatccccagtggcagctgctattacgagtttcctgtacgcccttcccaagatactcattgcacataaagcatgcatgcacacttttggtgttccttttttctaaatctcaagtgtaatgtactgtcaacatgattctgcatcttgttcttttcacataacactccatcttggggcttattccctttcagtacatttagggcacttgtcctcttcagtggctacagagtattccattgtgtgggtgtgcctcatttatattacaggtctggtcaccatttcaggcatacagatgccaggtatacaacctggtttgaaaacaccaagtgtggctggaaaaacttttgactagaatgagctcatctgggctccttcgtggtggtttcttgcagctataaattagcagcaaattaggaactcagctccagct

SEQ ID NO: 379303 - DNA, 2206 bp, Homo sapiens
cccctgtcaggcgggcaaaggatacagtcccggctccagaacgccgcggcactggggcgggaggggcccgccacgtccgccatcttgaaacaaccgccactcggggcgtcgcgcctgggccgccacgcctcggcctgcaggctcggtccccattggccgcaccacgcagaggcccgcccccgcctgcgcggccggcccctgcggggcgagagggtcggggcgaaggggaagctacgtcccggaggtgcggtgtggggcaccgggcggggccgcgggaaccggcgccccacggagctgctgctgtcagaccaaccccgggcccccatcatcactgcgccgcgctttcaggcgccgagaactaccgttcccggcatgccatgaaattggcctcggcgctgaggcggggtccggccctccacccgctcccgccgcgcgcgaatcgcggtcgcgagccatggaggaggaggcatcgtccccggggctgggctgcagcaagccgcacctggagaagctgaccctgggcatcacgcgcatcctagaatcttccccaggtgtgactgaggtgaccatcatagaaaagcctcctgctgaacgtcatatgatttcttcctgggaacaaaagaataactgtgtgatgcctgaagatgtgaagaacttttacctgatgaccaatggcttccacatgacatggagtgtgaagctggatgttttcagcaaataaagaaaacatggagcttcctagtctgtatttacaccctaatcacagaagactagaaccaagcaagaagactgccaaattctcatcactgaagcacatcattccactgggaagcatggcaattaacagcatctcaaaactgactcagctcacccagtcttccatgtattcacttcctaatgcacccactctggcagacctggaggacgatacacatgaagccagtgatgatcagccagagaagcctcactttgactctcgcagtgtgatatttgagctggattcatgcaatggcagtgggaaagtttgccttgtctacaaaagtgggaaaccagcattagcagaagacactgagatctggttcctggacagagcgttatactggcattttctcacagacacctttactgcctattaccgcctgctcatcacccacctgggcctgccccagtggcaatatgccttcaccagctatggcattagcccacaggccaagcaatggttcagcatgtataaacctatcacctacaacacaaacctgctcacagaagagaccgactcctttgtgaataagctagatcccagcaaagtgtttaagagcaagaacaagatcgtaatcccaaaaaagaaagggcctgtgcagcctgcaggtggccagaaagggccctcaggaccctccggtccctccacttcctccacttctaaatcctcctctggctctggaaaccccacccggaagtgagcacccctccctccaactccctaccagctccagagtggtggtttccatgcacagatggccctaggggtgacctccagttttgcgtgtggaccgtaggcctctttctagttgaatgaccaaaattgtaaggcttttagtcccaccgacattagccaggctcgtagtgaggcctccagagcaggttgtgctgtcccctgcctctggaagcaatggggaatttggaatcttgtgtaagtgcccaaataagtctgagtgctttcctcttcttcaacactcaaccctcaatcccttagcactgattgattagagaggtcccccaaagaaaccactggttttgacccatgaagcattagaactgcattgttcattcaggagccactagtcacatatgactatttaaatttaaagtaaattgtatgaaaaattcatttcttcaattgcattagccacattttgagtattcatgtggctggtagattctgtattagcacaaagatatggaacatttccatcaccacagaaagttctgttggacagcactgcattagaatattttcatactgctcttcctcaattaatttttgttgttaatgttgatgtcttcattggatgggtcataatgttccatgaaacctctcaagtacacaattgtatgttctttgtatcccttaccacaaatatctcgctctgctcatttcttttgcagcttcctataaagtttgtcttcctcatcagtttccagtgaa

SEQ ID NO: 379304 - DNA, 1551 bp, Homo sapiens
taatctgtactcatgcgggcggtcgcgagccatggaggaggaggcatcgtccccggggctgggctgcagcaagccgcacctggagaagctgaccctgggcatcacgcgcatcctagaatcttccccaggtgtgactgaggtgaccatcatagaaaagcctcctgctgaacgtcatatgatttcttcctgggaacaaaagaataactgtgtgatgcctgaagatgtgaagaacttttacctgatgaccaatggcttccacatgacatggagtgtgaagctggatgccagtgatgatcagccagagaagcctcactttgactctcgcagtgtgatatttgagctggattcatgcaatggcagtgggaaagtttgccttgtctacaaaagtgggaaaccagcattagcagaagacactgagatctggttcctggacagagcgttatactggcattttctcacagacacctttactgcctattaccgcctgctcatcacccacctgggcctgccccagtggcaatatgccttcaccagctatggcattagcccacaggccaagcaatggttcagcatgtataaacctatcacctacaacacaaacctgctcacagaagagaccgactcctttgtgaataagctagatcccagcaaagtgtttaagagcaagaacaagatcgtaatcccaaaaaagaaagggcctgtgcagcctgcaggtggccagaaagggccctcaggaccctccggtccctccacttcctccacttctaaatcctcctctggctctggaaaccccacccggaagtgagcacccctccctccaactccctaccagctccagagtggtggtttccatgcacagatggccctaggggtgacctccagttttgcgtgtggaccgtaggcctctttctagttgaatgaccaaaattgtaaggcttttagtcccaccgacattagccaggctcgtagtgaggcctccagagcaggttgtgctgtcccctgcctctggaagcaatggggaatttggaatcttgtgtaagtgcccaaataagtctgagtgctttcctcttcttcaacactcaaccctcaatcccttagcactgattgattagagaggtcccccaaagaaaccactggttttgacccatgaagcattagaactgcattgttcattcaggagccactagtcacatatgactatttaaatttaaagtaaattgtatgaaaaattcatttcttcaattgcattagccacattttgagtattcatgtggctggtagattctgtattagcacaaagatatggaacatttccatcaccacagaaagttctgttggacagcactgcattagaatattttcatactgctcttcctcaattaatttttgttgttaatgttgatgtcttcattggatgggtcataatgttccatgaaacctctcaagtacacaattgtatgttctttgtatcccttaccacaaatatctcgctctgctcatttcttttgcagcttcctataaagtttgtcttcctcatcagtttccagtgaa

SEQ ID NO: 379305 - DNA, 1546 bp, Homo sapiens
cccctgtcaggcgggcaaaggatacagtcccggctccagaacgccgcggcactggggcgggaggggcccgccacgtccgccatcttgaaacaaccgccactcggggcgtcgcgcctgggccgccacgcctcggcctgcaggctcggtccccattggccgcaccacgcagaggcccgcccccgcctgcgcggccggcccctgcggggcgagagggtcggggcgaaggggaagctacgtcccggaggtgcggtgtggggcaccgggcggggccgcgggaaccggcgccccacggagctgctgctgtcagaccaaccccgggcccccatcatcactgcgccgcgctttcaggcgccgagaactaccgttcccggcatgccatgaaattggcctcggcgctgaggcggggtccggccctccacccgctcccgccgcgcgcgaatcgcggtcgcgagccatggaggaggaggcatcgtccccggggctgggctgcagcaagccgcacctggagaagctgaccctgggcatcacgcgcatcctagaatcttccccaggtgtgactgaggtgaccatcatagaaaagcctcctgctgaacgtcatatgatttcttcctgggaacaaaagaataactgtgtgatgcctgaagatgtgaagaacttttacctgatgaccaatggcttccacatgacatggagtgtgaagctggatgagcacatcattccactgggaagcatggcaattaacagcatctcaaaactgactcagctcacccagtcttccatgtattcacttcctaatgcacccactctggcagacctggaggacgatacacatgaagccagtgatgatcagccagagaagcctcactttgactctcgcagtgtgatatttgagctggattcatgcaatggcagtgggaaagtttgccttgtctacaaaagtgggaaaccagataacttataatatcaaaatgaatagaagaaaatgtgttcactggaaactggctgttgagcccctccaatgggagctgaggagctgtgtctctgcaggcatggggactggccacaagcaaagagtcagcagcatgaagccccggagctgtagcgtgtgcagcaggcgccaatccaacagcatgggaacaacagtgtcgcaatcattcctcagttatggcaagaatgtgctatttttcactgttaggtgttgcttctgagaactacaaataaaactctccaaccaagtgaacagactctctgctggccaaggggactccagagaaccttagaaactgagtttctgaccataacaggatgggaggtcagacacacctcatcataccccctcccttttgtggttttagacacaacaactgatcagcattgatattaaaagagagatcataagactgacggaacaactttgtgacaataagataccaaataataaacaggatctaaagccatgtcagccaagggttaagtcatgcacccctccctacacttaaagaataaaacaattggccaggcgcagtggctcaggcctgtaatcgca

SEQ ID NO: 379306 - DNA, 1432 bp, Homo sapiens
cccctgtcaggcgggcaaaggatacagtcccggctccagaacgccgcggcactggggcgggaggggcccgccacgtccgccatcttgaaacaaccgccactcggggcgtcgcgcctgggccgccacgcctcggcctgcaggctcggtccccattggccgcaccacgcagaggcccgcccccgcctgcgcggccggcccctgcggggcgagagggtcggggcgaaggggaagctacgtcccggaggtgcggtgtggggcaccgggcggggccgcgggaaccggcgccccacggagctgctgctgtcagaccaaccccgggcccccatcatcactgcgccgcgctttcaggcgccgagaactaccgttcccggcatgccatgaaattggcctcggcgctgaggcggggtccggccctccacccgctcccgccgcgcgcgaatcgcggtcgcgagccatggaggaggaggcatcgtccccggggctgggctgcagcaagccgcacctggagaagctgaccctgggcatcacgcgcatcctagaatcttccccaggtgtgactgaggtgaccatcatagaaaagcctcctgctgaacgtcatatgatttcttcctgggaacaaaagaataactgtgtgatgcctgaagatgtgaagaacttttacctgatgaccaatggcttccacatgacatggagtgtgaagctggatgagcacatcattccactgggaagcatggcaattaacagcatctcaaaactgactcagctcacccagtcttccatgtattcacttcctaatgcacccactctggcagacctggaggacgatacacatgaagataacttataatatcaaaatgaatagaagaaaatgtgttcactggaaactggctgttgagcccctccaatgggagctgaggagctgtgtctctgcaggcatggggactggccacaagcaaagagtcagcagcatgaagccccggagctgtagcgtgtgcagcaggcgccaatccaacagcatgggaacaacagtgtcgcaatcattcctcagttatggcaagaatgtgctatttttcactgttaggtgttgcttctgagaactacaaataaaactctccaaccaagtgaacagactctctgctggccaaggggactccagagaaccttagaaactgagtttctgaccataacaggatgggaggtcagacacacctcatcataccccctcccttttgtggttttagacacaacaactgatcagcattgatattaaaagagagatcataagactgacggaacaactttgtgacaataagataccaaataataaacaggatctaaagccatgtcagccaagggttaagtcatgcacccctccctacacttaaagaataaaacaattggccaggcgcagtggctcaggcctgtaatcgca

SEQ ID NO: 379307 - DNA, 562 bp, Homo sapiens
ttttttttttaacagaacaaagtagcttcttcctttatcattcctctacccctgaaccactacacagattgctttgtctttgtatttaacattccaggtcttattattgatgctttcggagagctaagagaccagcaggaacaagtacgagaagatatggaggtaatgttactctaactactaatcccagctctattttaatatccccagaagcaaatagattttttaaacaataggttttactattacttagggccagtactaagcaagaacgcagtttgttttccatgccctgttctctgcaccctgccatacccctgccaggccggccactctgctgcctcctccactgtcccacaataggagggagcagtatcctcagctaatcaggagctaagtgtatggcactactgagtgaatgactaatagccaatgtatggcactactgagtgaatgactaatagccaaaagcattagaaagaaagttttcattatccttcaattcgatagaatcatgacagttttctctcctgcctatattatgccaacaaatgccttttct

SEQ ID NO: 379308 - DNA, 527 bp, Homo sapiens
ttttttttttaacagaacaaagtagcttcttcctttatcattcctctacccctgaaccactacacagattgctttgtctttgtatttaacattccaggtcttattattgatgctttcggagagctaagagaccagcaggaacaagtacgagaagatatggaggtaatgttactctaactactaatcccagctctattttaatatccccagaagcaaatagattttttaaacaataggttttactattacttagggccagtactaagcaagaacgcagtttgttttccatgccctgttctctgcaccctgccatacccctgccaggccggccactctgctgcctcctccactgtcccacaataggagggagcagtatcctcagctaatcaggagctaagtgtatggcactactgagtgaatgactaatagccaaaagcattagaaagaaagttttcattatccttcaattcgatagaatcatgacagttttctctcctgcctatattatgccaacaaatgccttttct

SEQ ID NO: 379309 - DNA, 2027 bp, Homo sapiens
tagagcctgtgatgactctgaacttcaatcagatcttaaaattctttggtgagcaggacacaaaccagaaagatcccagatccaggcactcaaactgaaacgtttcttgatgtgttttccttgatgttaagaatgaagaaccaacctttttcgttttgtttttcagatcttttcctaataactactgggacaagtttgtaaagagaaaggtgatcaacaagtatggagatctctacggagcagaacgcattgctgaacttctgggtttggacaaaaatgctcttgactttagcccagtagaagagaccaaagcagaagcggcttctctggtgtcatggctaagttccatagacatgaagtaccatatctggaagcttggagttgtttttactgacaactcctttctctaccttgcctggtatacaaccatgtcagtcctgggccactacaataacttcttctttgctgctcacctattggacatcgcaatgggcttcaagacactgaggaccattctgtcatctgtaactcacaatggcaaacagttggttctgactgtcggtctcctggccgtggtggtttatctctatactgtggtggctttcaacttcttccgcaagttctacaacaaaagcgaagacgatgacgagcccgatatgaagtgcgacgacatgatgacgtgttaccttttccacatgtacgtgggagtgagagcaggaggtggcattggtgatgaaattgaagaccctgctggtgatccttatgaaatgtatcgcattgtctttgacattacctttttcttcttcgtcattgtcatcttgctggccatcattcaaggtcttattattgatgctttcggagagctaagagaccagcaggaacaagtacgagaagatatggagactaaatgtttcatctgtgggattggcaatgactactttgacacaacccctcatggttttgaaacacatacattacaagagcacaacttagccaactacttgttctttctgatgtatttgattaataaagatgaaacagagcacacgggtcaggaatcttatgtctggaagatgtaccaagaaaggtgttgggatttcttcccagccggtgactgctttcgtaaacaatatgaagatcagcttggataaatctgaatcaaagaagcgcgacaattctggacagtcaacttcccatgaaataaagtcccctttttacagttctgcaacatatctgaaatgtgacattttctaaatgcctcccttaaaaaaaaaactgctgaaaatctgtgctattttgaaattgatttggctttttgtgcctaatggacatacactgtgggagagaacctgtcaaaatgtcgaagaaggaaggcgaagaatcaagtaatctctaggcaaatgccttcaagttttccagttctgaggtaactagttcagtttgttgggatggaagcatgaaggaaagggctagagaagtatgaaatctcgaatgtgtaatacctgaaaatttaaacacttgaatgtcatcatggtatccaacttgtgactcatagggtctgaactccaaaagataataactgcagtctaatttttcccatggtacttgctagtgactgtatccagaaaagctttaagcagttaaagaaacagaaaaaaaccgacactttgtcgacactgaaatatcgattaagtgccttaaaacctctttagacatagctatgcaagttttttatgtttgtgttccagaaggacagttccattcattagttgtgatcttccgtcttactttatgaaactgcacttgaaggttattcatacaagtttttttagtaacagctgtcagtcaactgctgttattagaagaaaagtactgtactgaaaattcagaaaaaaaatctcaaccttatgccaaaatggagtaatgctttatggtcccttgtaagtagtggagctgctctgtttaggtgaatctcctcaaatacagtgaagtgcccactgcaataaagtaatacgtaccaataaaaa

SEQ ID NO: 379310 - DNA, 1881 bp, Homo sapiens
  misc_feature (1)..(1): n is a, c, g, or t
nggtgattgataggcactgtggcaatttcctggcacaactgggtcgagtttgtaaagagaaaggtgatcaacaagtatggagatctctacggagcagaacgcattgctgaacttctgggtttggacaaaaatgctcttgactttagcccagtagaagagaccaaagcagaagcggcttctctggtgtcatggctaagttccatagacatgaagtaccatatctggaagcttggagttgtttttactgacaactcctttctctaccttgcctggtatacaaccatgtcagtcctgggccactacaataacttcttctttgctgctcacctattggacatcgcaatgggcttcaagacactgaggaccattctgtcatctgtaactcacaatggcaaacagttggttctgactgtcggtctcctggccgtggtggtttatctctatactgtggtggctttcaacttcttccgcaagttctacaacaaaagcgaagacgatgacgagcccgatatgaagtgcgacgacatgatgacgtgttaccttttccacatgtacgtgggagtgagagcaggaggtggcattggtgatgaaattgaagaccctgctggtgatccttatgaaatgtatcgcattgtctttgacattacctttttcttcttcgtcattgtcatcttgctggccatcattcaaggtcttattattgatgctttcggagagctaagagaccagcaggaacaagtacgagaagatatggagactaaatgtttcatctgtgggattggcaatgactactttgacacaacccctcatggttttgaaacacatacattacaagagcacaacttagccaactacttgttctttctgatgtatttgattaataaagatgaaacagagcacacgggtcaggaatcttatgtctggaagatgtaccaagaaaggtgttgggatttcttcccagccggtgactgctttcgtaaacaatatgaagatcagcttggataaatctgaatcaaagaagcgcgacaattctggacagtcaacttcccatgaaataaagtcccctttttacagttctgcaacatatctgaaatgtgacattttctaaatgcctcccttaaaaaaaaaactgctgaaaatctgtgctattttgaaattgatttggctttttgtgcctaatggacatacactgtgggagagaacctgtcaaaatgtcgaagaaggaaggcgaagaatcaagtaatctctaggcaaatgccttcaagttttccagttctgaggtaactagttcagtttgttgggatggaagcatgaaggaaagggctagagaagtatgaaatctcgaatgtgtaatacctgaaaatttaaacacttgaatgtcatcatggtatccaacttgtgactcatagggtctgaactccaaaagataataactgcagtctaatttttcccatggtacttgctagtgactgtatccagaaaagctttaagcagttaaagaaacagaaaaaaaccgacactttgtcgacactgaaatatcgattaagtgccttaaaacctctttagacatagctatgcaagttttttatgtttgtgttccagaaggacagttccattcattagttgtgatcttccgtcttactttatgaaactgcacttgaaggttattcatacaagtttttttagtaacagctgtcagtcaactgctgttattagaagaaaagtactgtactgaaaattcagaaaaaaaatctcaaccttatgccaaaatggagtaatgctttatggtcccttgtaagtagtggagctgctctgtttaggtgaatctcctcaaatacagtgaagtgcccactgcaataaagtaatacgtaccaataaaaa

SEQ ID NO: 379311 - DNA, 422 bp, Homo sapiens
cttggttcaactccagccgaggagccttaggagtcctaactcattcaaccctggggctcatctaggcgtggcctgcacactagcatgggtcaaggagtctagtttgtattaatattagccatctaactgaaaacttaaagggtgacccaaatcagatcagctttaaagaggtaggtaggtatttagccaaagagattcatttggctttgatcccacaactaggcactctaagaattccactataaggagattgctgctctgaagttggaaggttaatttgtgacaaatacctgggagcaggagctttaatcacaaagcctgctctgagtaaccatcctcctcccactcctaggtgcctttggtggttttcaaaagggaaaaagaaatcgccaggaagctggagtttgatggcctatatatca

SEQ ID NO: 379312 - DNA, 725 bp, Homo sapiens
acagaacaaagtagcttcttcctttatcattcctctacccctgaaccactacacagattgctttgtctttgtatttaacattccaggtcttattattgatgctttcggagagctaagagaccagcaggaacaagtacgagaagatatggaggtaatgttactctaactactaatcccagctctattttaatatccccagaagcaaatagattttttaaacaataggttttactattacttagggccagtactaagcaagaacgcagtttgttttccatgccctgttctctgcaccctgccatacccctgccaggccggccactctgctgcctcctccactgtcccacaataggagggagcagtatcctcagctaatcaggagctaagtgtatggcactactgagtgaatgactaatagccaatgtatggcactactgagtgaatgactaatagccaaaagcattagaaagaaagttttcattatccttcaattcgatagaatcatgacagttttctctcctgcctatattatgccaacaaatgccttttctgcctgttatttttcttagactaaatgtttcatctgtgggattggcaatgactactttgacacaacccctcatggttttgaaacacatacattacaagagcacaacttagccaactacttgtgagtattcttggttaacaaaagtaatggcagctgtagcgtaaataaagccaat

SEQ ID NO: 379313 - DNA, 15575 bp, Homo sapiens
  misc_feature (2)..(2): n is a, c, g, or t
  misc_feature (869)..(869): n is a, c, g, or t
  misc_feature (1566)..(1566): n is a, c, g, or t
  misc_feature (2164)..(2164): n is a, c, g, or t
  misc_feature (2277)..(2277): n is a, c, g, or t
  misc_feature (7238)..(7238): n is a, c, g, or t
  misc_feature (7841)..(7841): n is a, c, g, or t
  misc_feature (10967)..(10967): n is a, c, g, or t
gngcagcagcagtcagcgcacgccgagcggctgccgggggaagcagaggcgccggaggctggggcaccgccgacgcctcgggagccatggccgaagggggagaaggaggcgaggacgagatccagtttctgaggactgaggatgaagtggtactccagtgcatcgccaccattcataaggagcagaggaagttctgcctggcagccgagggacttgggaatcgcctgtgcttcttggaacccacttcagaagccaagtacattcctccagatctctgcgtctgcaattttgtgctggaacagtccctatctgtcagagccctgcaggaaatgcttgccaacacaggtgaaaatggcggcgaaggggcagcacaaggaggtggccacaggaccctgttatacggccatgcagttctcctgaggcactctttcagcggaatgtatctaacatgcttgactacatcaagatcccagacagacaaacttgcctttgatgtaggtctacgggaacatgccacaggagaagcctgttggtggactatacatcctgcttccaaacagaggtccgaaggagagaaagttcgaattggcgatgacctcatcctcgtcagcgtgtcctctgaaagataccttcatctctcagtatcaaatggtaacatacaagtggatgcctcctttatgcaaacactctggaatgtacatcctacgtgctcaggaagtagcatcgaagaaggatacctacttggtgggcatgtagtacgtcttttccatggtcatgatgaatgtttgacgataccatctacagaccagaatgattcccagcacaggaggatattctacgaagctgggggagctgggactcgagccagntctctttggagagtggaaccccttcggataagctggagtggcagtaacatcagatggggccaggctttccgactccggcatctcaccacaggccactacctggccttgacagaagaccaaggccttatactgcaagaccgggcaaagtcagacaccaagtccacagctttctctttccgggcatcaaaggaactcaaggagaaattagactccagtcacaagcgagacatagaaggcatgggagttccagaaatcaagtatggagattctgtctgctttgtgcagcatatagccagtggtctgtgggtgacctacaaagcacaagacgccaaaacttcccgcctgggacctctaaaaagaaaggtcatactccatcaggaaggccacatggatgatggattaacactgcagagatgccagcgtgaggagtcccaggctgctcggatcatccggaacactacagccttattcagccagtttgtcagtggaaacaatcgcacagctgcccccatcaccctgcctatagaagaagtcctgcagaccctacaggacttgatcgcctacttccagcccccagaggaggagatgcgacatgaagacaagcagaacaagctccgctcactcaaaaacagacaaaatcttttcaaggaagagggaatgttggcccttgtcttaaattgcattgaccgcttaaatntctacaatagcgtagcacactttgcagggattgcaagggaagagagtggcatggcctggaaagaaattctgaacctcctctacaaattgctggctgctctcattcgcggaaacagaaacaattgcgctcaattctccaataaccttgattggctcatcagtaaattggacagactagaatcttcctcaggtatcttggaagttttgcactgcatcttaactgaaagcccagaagccttaaatctgatagcggagggccacatcaagtcgatcatctccctgttggataagcacgggcggaatcacaaggttctggatatcctgtgctccctctgtctctgcaatggggttgcagtgagagccaaccagaatctgatctgtgacaacttgctgccccggagaaacctactcctgcagacacgactgattaacgatgtaaccagtatccggccaaacatcttcctgggagtcgcggagggctcagcccagtacaagaagtggtacttcgagctgattatcgaccaggtggaccccttcctaacagcagagcccacacatctgcgggtgggctgggcctcttcttcaggctatgccccatncccaggaggtggagaaggatggggaggcaatggtgttggtgacgacctgtactcctatggctttgatggacttcacctttggtcaggccggatacccagagctgtggcttccntcaaccagcacctcctgagatcggatgacgtggtaagctgctgcctggacctcggggtgcccagcatctcattccgcatcaatgggcagcccgtgcaggggatgtttgagaacttcaacacagacgggctcttcttccctgtgatgagcttttcagcaggtgtcaaagtacgtttcctgatgggtggacgtcatggagagtttaagttcctgcctccctctggctatgccccttgctatgaagccttacttccaaaagagaagatgagattggagcctgtcaaagaatataaacgtgatgctgatggcattagagatctcttgggtaccacccagttcctctcccaagcctctttcatcccatgccccgtagacaccagtcaggttattttgccacctcacctagaaaagatccgagacagactagctgaaaacatccatgagctttggggaatgaataaaatagaacttggctggactttcggcaagatacgagatgacaataaaagacaacacccttgccttgtggagttttcaaagctcccagaaactgagaagaactataacctgcaaatgtcaactgaaaccttaaaaaccctcttggccctggggtgccacattgctcatgttaacccagctgctgaggaggatctcaagaaggtcaaactgcccaaaaactatatgatgtccaacggctataagccagcccctttggatttgtctgatgtgaagctgttacctcctcaagaaattttagtggataagcttgcagaaaatgcacacaatgtttgggcaaaagacagaataaaacaaggatggacctatggcatccaacaggatttgaagaacaaaagaaatccccgtctggtgccatatgcattactggatgagcgtaccaagaagtcaaacagggacagcctgcgggaagctgtgcgcacttttgttggttacgggtataacattgagccatcagaccaagaactagctgactcggctgtggagaaggtcagcatagacaagatccgatttttccgggtagagcgatcttatgcagtgagatctggaaagtggtattttgagtttgaagtggtgactggaggagacatgcgagtcggctgggcgaggccaggctgtcgacctgatgtcgagctgggggccgatgaccaagcctttgtgtttgaaggcaacaggggccagcgttggcatcaaggaagtgggtattttgggcgtacctggcagccaggggatgtggtcggatgtatgattaacctggatgatgcttcaatgatcttcacactgaatggggagctgctgatcaccaacaaaggctctgaacttgccttcgctgactacgagattgagaatggcttcgtgcccatctgctgtctgggtctatctcagatcggccgcatgaatctcgggacagatgccagtaccttcaagttttataccatgtgcggtctccaagagggctttgagccttttgctgtcaacatgaacagagatgttgctatgtggttcagcaagcgcctcccgacgtttgtcaacgtgccaaaggatcatccacacatagaggtcatgaggattgatggcaccatggacagccctccgtgtctcaaggtgacgcataagacatttggcacacagaatagcaatgccgacatgatctattgccgcttgagcatgcctgtcgagtgccactcctccttcagccacagcccctgtctggacagtgaagctttccagaaaaggaaacagatgcaagaaatactctctcatacaacaacacagtgctactacgccatccgcatctttgctggacaggatccatcctgtgtctgggtcggatgggtgactccagactatcacttgtacagtgaaaagtttgacctgaataaaaactgcacagtgactgtcaccctaggggatgaaagaggccgggtccatgaaagtgtgaaacgcagcaactgctacatggtctggggtggagacattgtagccagttcccagagatcaaatcggagcaacgtggacctggagatcggctgtctcgtggatctggccatgggcatgttgtccttctcagccaatggaaaggaactgggcacctgctaccaggtggagcctaataccaaagtgtttccagcagtcttcctgcagcctacaagtacttctttgtttcagtttgaacttggaaagctgaagaacgcaatgcccctgtcagcggccatattcaggagtgaagagaagaacccagtcccacagtgtccacctcggctggacgtccaaaccatccagcccgtgctctggagccgcatgcccaacagcttcctgaaggtggagaccgagcgtgtgagcgagcgccacggctgggtggtgcagtgcctggagcccctgcagatgatggcgctccacatccccgaggagaacaggtgtgtggatatcctggagctctgtgagcaggaggacctgatgcggttccattaccacacgctgaggctctacagcgcggtgtgcgccctgggaaacagccgcgtggcctacgccctgtgcagccacgtggacctctcccagctcttctatgccattgacaacaagtacctccccggcctccttcgatctggtttctatgacctgctcatcagcatccacctggccagcgccaaggagaggaagctgatgatgaagaacgagtacatcatccccattaccagcaccaccaggaatatctgcctcttcccggacgagtccaagaggcatggactgcctggggtgggcctgagaacatgtctcaagcccgggttcaggttctccaccccttgctttgttgtgactggtgaggatcaccaaaagcagagccccgagattcccttggagagtctcaggacgaaggctctgagtatgctgacagaggcagtgcagtgcagcggggcccacatccgagaccctgtaggggggtctgtggagttccagtttgtgcctgtgctgaaactcattggaaccctgctggtcatgggcgtgtttgatgatgatgatgttcggcagatcctcctcctgattgatccctctgtgtttggggagcatagtgcggggacagaggagggagcagaaaaggaggaagtgacccaggtggaggagaaggctgtggaggctggggagaaggccggcaaggaggctcctgtcaaaggcttgttgcagactcgattacccgaatccgtcaagctgcagatgtgtgagctcctcagctatctctgcgactgtgagctgcagcaccgagtggaggccattgtggcatttggtgacatttatgtctccaagctgcaggcaaatcagaagttccgctacaatgagctcatgcaggccctgaacatgtctgcggccctgactgcccggaagaccaaggagttccgctcacccccacaggagcagatcaacatgctgcttaactttcaactgggagagaactgcccctgcccagaggagattcgggaggagctgtatgatttccatgaggaccttctccttcactgtggggttcctttggaagaagaggaagaggaggaggaggacacctcctggacaggaaaactctgtgccttggtttacaaaatcaaaggcccacccaagccagagaaggagcagccgacggaggaggaggagagatgccccacaacattgaaggaactcatctcacagacgatgatctgctgggcccaggaggaccagatccaggattcagagctggtccgaatgatgttcaacctcctccggaggcagtatgacagcattggggagctgctgcaggcgctgcggaagacctacaccatcagccacacctctgtaagcgacaccatcaacctgctggctgccctgggccaaatccgctccctcctcagtgtcaggatgggcaaggaagaggagttgctcatgatcaatgggctgggagacataatgaacaacaaggtgttttaccagcatcccaacctcatgagagtcctgggcatgcacgagacggtgatggaggtgatggtgaacgtgttgggtacagagaaatctcagattgcatttccaaagatggttgctagctgctgccgtttcctttgctatttctgtcgaattagccggcaaaatcagaaggccatgtttgagcatctgagttatcttctggagaatagcagtgttggcctagcctccccgtcgatgaggggatccaccccgctggatgtggcagcttcctctgtgatggacaacaatgagttagcgctgagcttagaggaaccagacctcgagaaggtggtgacctacttggcaggctgtggcctacagagctgccccatgcttctggccaaaggataccctgatgtcggctggaaccccattgaaggggaacgctacctgtccttcctgaggtttgctgtcttcgtgaacagtgagagtgtggaagaaaacgccagcgttgtggtcaagctgctcatcagacgcccagagtgcttcggcccggccctgcggggtgaggggggaaacgggctcttggcagccatgcagggtgccattaagatctctgagaacccagcgctcgacctcccctctcaaggatacaaaagagaagtcagcacggaggacgatgaagaggaagaagaaatcgtgcatatgggcaatgcaattatgtcattttattcggcccttatagatctactgggccgctgtgctcctgaaatgcacctcatccagacaggaaagggggaagccatccgcatcaggtccatcctgcgctccctggtccccacagaagacctggttgggatcatcagcatccccttgaaactgccctccctcaacaaagatgggtcggtcagtgagccagatatggcggccaatttctgccctgaccacaaggcacctatggtgctgttcttggaccgcgtttatggcattaaggatcaaacttttctgctccacttnctggaggttggatttttacctgacctaagagcttctgcctctctagatacagtttccctaagcaccacagaggctgcgcttgcactaaataggtatatatgttctgctgtgctcccgctcctcacaagatgtgcccctctctttgccggaacagaacactgcacctctctgattgattccacactgcagacaatatacaggctatccaagggacgttccctcaccaaagcacaaagggacactatagaagaatgtttgcttgccatttgcaatcacttgaggccttccatgttacagcaactcctgcgacgcctcgtttttgatgtgccgcaactcaatgaatactgcaaaatgcctctcaagcttctgacgaatcactatgaacagtgttggaagtattactgcctgccttcaggatgggggagctacgggctagctgtggaagaagagctgcacctaacggagaagcttttctgggggatttttgactcgctctcccataagaaatatgacccagatcttttccgaatggccctgccttgtctcagtgctatagctggggccttgccaccagattatttagataccagaatcacagccacnttggagaaacagatctcagtggatgcggatggcaactttgacccaaaacctattaacaccatgaatttttccttgcctgaaaaattggaatacatcgtcaccaagtatgctgagcattcacatgataaatgggcctgtgacaagagtcagagtggatggaaatatgggatttccctggatgaaaatgtgaagacccacccactgataaggcctttcaagacattaacggagaaggagaaggaaatttatcgctggcctgcgcgagagtccctgaaaaccatgctggctgtgggctggactgtggagaggaccaaagagggagaagctttggttcaacagcgggaaaatgagaagcttcgaagtgtgtcccaggccaaccagggcaacagctacagtcctgctcccctcgacctctcaaacgttgtgctctccagagagctccagggaatggtggaggtcgtggctgagaactatcacaatatctgggccaagaagaagaagctggagctggagagcaaaggtggtggcagccaccctcttctggtaccatatgacaccttgactgccaaggaaaagttcaaggaccgggagaaggcacaggacctgtttaagttcctccaagtgaatggcatcatagtttccaggggtatgaaggatatggagctggatgcctcctccatggagaagaggtttgcctataagttcttgaagaagatcctgaaatacgttgattctgctcaagaatttattgcccatttagaagccattgtcagcagtgggaaaactgaaaagtctccccgtgaccaggagatcaaattctttgccaaagttctcctcccgctggttgaccagtacttcaccagtcattgcctctacttcttgtcatcccctctgaagccccttagcagcagcggatatgcctcccataaggagaaagaaatggtggccggcctgttctgcaaacttgccgctctcgttagacacagaatttccctctttggtagtgattctactacaatggtgagctgtcttcacatcttagctcagacacttgacacaaggactgtcatgaagtcaggctcagagctggtgaaggctgggttacgagcattctttgaaaatgctgcagaagatttggagaagacttcagaaaacctgaaacttgggaagttcacccattcccgaacgcagattaaaggcgtttctcagaatattaactacactacagtggctctgctccccatcctgacgtccatctttgagcacgtcactcagcatcagtttggaatggatctactcttgggtgatgtgcagatttcatgctaccacatactgtgcagcctctactcccttgggacgggaaagaacatttatgttgaaaggcaacgccctgcccttggagaatgtctggcctcgctggcagctgccataccagtggcattcctggagcccacccttaatcgctacaatccactctcggtcttcaacaccaaaacccccagggagaggtctattctggggatgccagacacggtagaagacatgtgtcctgacatcccccagctggaaggcctgatgaaggaaatcaacgacctggccgagtcaggggcccggtacacagagatgccccatgtcatcgaggtgatcttacccatgctctgcaactacttgtcctactggtgggagcggggtcctgagaacctgccccccagcacagggccatgctgcaccaaggtcacctctgaacacctcagtctcatcctgggcaacattctgaaaatcatcaacaacaacctgggcatcgatgaggcctcctggatgaagcgcattgcagtgtatgcacagcccatcatcagcaaagccaggcccgacctgctgagaagccacttcatcccaactctggagaagctgaagaaaaaggctgtcaagacggtgcaggaggaggagcagttgaaagccgatggcaaaggggacacccaggaggcagaactcctcatcctggacgagttcgcggtcctctgcagagatctctatgccttctaccccatgctgatccgctacgtggacaacaacagatctaactggctgaaaagtcctgatgctgattctgaccagctcttccgcatggtggcagaagtcttcattctgtggtgtaaatctcataacttcaagagagaagagcaaaattttgtgattcagaatgaaattaataatttggcatttttaactggagacagcaaaagcaagatgtcaaaagccatgcaagtaaagtctggaggacaagaccaggagcggaagaagacaaagcggcggggagacttgtattccatccagacctccctcatcgtggctgcactcaagaaaatgctgcccattggtttgaatatgtgtactccaggcgaccaggagctgatctccctcgcaaaatcgcgatacagccatagggacacagatgaagaggtcagagaacatctgcggaacaacttgcacttgcaggaaaagtctgatgacccagctgtaaaatggcaactgaacctctacaaggatgttctgaagagtgaagaacctttcaatccggaaaagacagtggagcgtgtgcagagaatttcagcagctgtcttccacctggaacaggtggaacagcctttgaggtccaagaaggccgtctggcacaaactgttatcaaagcaacggaaacgggcagtggtggcctgtttcaggatggcccctctctacaacctgcccaggcaccgctctattaacctcttcctccatggctatcagagattttggatagaaacagaggagtattcctttgaagagaaactagtacaggatttggctaaatctccaaaggtggaagaggaggaggaggaagagacagaaaaacaacctgacccactacatcagatcattctctattttagccgcaacgctctcacggagaggagcaaattggaagacgaccctttgtacacctcctattccagcatgatggccaagagttgtcaaagtggtgaggatgaagaagaagatgaagacaaggaaaaaacattcgaagagaaagagatggagaagcaaaaaaccctctatcagcaagctcggctgcatgagcgtggtgctgcngagatggtccttcagatgataagcgctagcaaaggtgagatgagccccatggtggttgagacgctgaagctggggatcgccattctgaacggaggcaatgctggtgtgcaacagaaaatgctagattacctaaaggagaaaaaggatgctggattctttcaaagcctttctggtcttatgcagtcttgcagtgtccttgatttgaatgcatttgagaggcagaataaagctgaaggcctggggatggtgactgaagaaggaacactcattgttcgggaacgtggtgaaaaagtactccagaatgacgagttcacgcgtgatctctttagattcctacagttactttgtgagggacataacagtgactttcagaacttcctgcggactcagatgggcaacaccaccaccgtgaatgtcatcatcagcactgtggactaccttctgcgtctgcaggaatcaatcagtgatttctactggtattattcagggaaggacatcattgatgaatctggacagcacaatttttccaaagctctggcagtcaccaagcagattttcaattctcttacagaatacatccagggcccttgcattggtaatcaacagagcctggctcacagcaggctgtgggacgcagtggttggcttcctccatgtctttgctaatatgcagatgaaactctctcaggattccagtcagatcgagctgctgaaggaactcttggatctccttcaggacatggtggtgatgcttctgtccctcctggaagggaatgtggtaaatggcaccattggcaagcagatggttgacacactggtagaatcatctaccaatgtagaaatgatcttgaaattctttgacatgttcttgaaacttaaagacttaaccagctcagacaccttcaaagaatatgacccagatggtaaaggaattatctccaaaaaagaattccagaaggccatggaagggcaaaaacagtacacgcagtcagagattgactttctcctgtcgtgtgcagaagctgatgagaatgacatgtttaattacgttgattttgtagaccggttccatgagccagccaaggacatagggtttaatgtggctgtgttattgacaaatctttctgaacacatgccaaacgattcccgcctgaagtgtctgttggacccagcagaaagtgtgctaaattacttcgaaccctacctaggacgcatcgagatcatgggtggggccaagaagattgagcgtgtttattttgagatcagtgaatccagtcgcactcagtgggagaagccccaggtgaaggaatctaagcgacagttcatttttgatgttgtcaatgaaggtggggagcaggaaaagatggagctgtttgtgaacttctgtgaggacaccatctttgaaatgcagttagcatctcagatctctgaatccgattcagctgacaggccagaagaggaggaagaagatgaagattcttcttacgtgttagaaattgcgggtgaagaggaagaagacgggtctcttgagccggcctctgcatttgctatggcctgtgcctctgtgaagaggaatgtcaccgacttcctgaagagagcaaccctgaagaacctcaggaagcagtacaggaacgtgaaaaagatgactgcgaaggagctggtgaaggtgctcttctcctttttctggatgctgttcgtggggctattccagttgctcttcaccatcctgggaggaatctttcagatcctctggagcacagtgtttggagggggcctggtagaaggggcaaagaacatcagagtgaccaagatcctgggtgacatgcctgacccaacccaatttggtatccatgatgacactatggaggctgagagggcagaggtgatggagccaggtatcaccactgaactagtacacttcataaagggggagaagggagatacagatatcatgtcagacctctttggactccacccaaagaaagagggcagcttaaagcatgggcctgaagtgggtttgggtgacctctcagaaattattggcaaggatgaaccccctacattagagagtactgtacagaagaagaggaaagctcaggcagcagaaatgaaagcagcaaatgaagcagaaggaaaagtagaatccgagaaggcagacatggaagatggagagaaggaagacaaagacaaagaagaggagcaagctgagtacctgtggacagaagtgacaaaaaagaagaagcggcggtgtggtcagaaggttgagaagccggaagctttcacagccaatttctttaaagggctggaaatctatcagaccaagttactgcattacctggccaggaatttctacaacctgaggttccttgctctgtttgtagccttcgctatcaacttcatcctgcttttttataaggtcactgaagaacctttagaagaagagacagaggatgttgcaaacctatggaattcctttaatgacgaggaagaggaagaagcgatggtattctttgtccttcaggagagcaccgggtatatggcaccaaccctgcgtgccctggccatcatccataccatcatctctctagtctgtgtggtgggctactactgcctgaaggtgcctttggtggttttcaaaagggaaaaagaaatcgccaggaagctggagtttgatggcctatatatcaccgaacagccatctgaagatgacatcaaggggcagtgggaccgcttggtgatcaacacaccatcttttcctaataactactgggacaagtttgtaaagagaaaggtgatcaacaagtatggagatctctacggagcagaacgcattgctgaacttctgggtttggacaaaaatgctcttgactttagcccagtagaagagaccaaagcagaagcggcttctctggtgtcatggctaagttccatagacatgaagtaccatatctggaagcttggagttgtttttactgacaactcctttctctaccttgcctggtatacaaccatgtcagtcctgggccactacaataacttcttctttgctgctcacctattggacatcgcaatgggcttcaagacactgaggaccattctgtcatctgtaactcacaatggcaaacagttggttctgactgtcggtctcctggccgtggtggtttatctctatactgtggtggctttcaacttcttccgcaagttctacaacaaaagcgaagacgatgacgagcccgatatgaagtgcgacgacatgatgacgtgttaccttttccacatgtacgtgggagtgagagcaggaggtggcattggtgatgaaattgaagaccctgctggtgatccttatgaaatgtatcgcattgtctttgacattacctttttcttcttcgtcattgtcatcttgctggccatcattcaaggtcttattattgatgctttcggagagctaagagaccagcaggaacaagtacgagaagatatggagactaaatgtttcatctgtgggattggcaatgactactttgacacaacccctcatggttttgaaacacatacattacaagagcacaacttagccaactacttgttctttctgatgtatttgattaataaagatgaaacagagcacacgggtcaggaatcttatgtctggaagatgtaccaagaaaggtgttgggatttcttcccagccggtgactgctttcgtaaacaatatgaagatcagcttggataaatctgaatcaaagaagcgcgacaattctggacagtcaacttcccatgaaataaagtcccctttttacagttctgcaacatatctgaaatgtgacattttctaaatgcctcccttaaaaaaaaaactgctgaaaatctgtgctattttgaaattgatttggctttttgtgcctaatggacatacactgtgggagagaacctgtcaaaatgtcgaagaaggaaggcgaagaatcaagtaatctctaggcaaatgccttcaagttttccagttctgaggtaactagttcagtttgttgggatggaagcatgaaggaaagggctagagaagtatgaaatctcgaatgtgtaatacctgaaaatttaaacacttgaatgtcatcatggtatccaacttgtgactcatagggtctgaactccaaaagataataactgcagtctaatttttcccatggtacttgctagtgactgtatccagaaaagctttaagcagttaaagaaacagaaaaaaaccgacactttgtcgacactgaaatatcgattaagtgccttaaaacctctttagacatagctatgcaagttttttatgtttgtgttccagaaggacagttccattcattagttgtgatcttccgtcttactttatgaaactgcacttgaaggttattcatacaagtttttttagtaacagctgtcagtcaactgctgttattagaagaaaagtactgtactgaaaattcagaaaaaaaatctcaaccttatgccaaaatggagtaatgctttatggtcccttgtaagtagtggagctgctctgtttaggtgaatctcctcaaatacagtgaagtgcccactgcaataaagtaatacgtaccaataaaaa

SEQ ID NO: 379314 - DNA, 4779 bp, Homo sapiens
  misc_feature (171)..(171): n is a, c, g, or t
tttaatttgattgtctgtcttctcccttccctgctccatgaaatccagagttgtcaaagtggtgaggatgaagaagaagatgaagacaaggaaaaaacattcgaagagaaagagatggagaagcaaaaaaccctctatcagcaagctcggctgcatgagcgtggtgctgcngagatggtccttcagatgataagcgctagcaaaggtgagatgagccccatggtggttgagacgctgaagctggggatcgccattctgaacggaggcaatgctggtgtgcaacagaaaatgctagattacctaaaggagaaaaaggatgctggattctttcaaagcctttctggtcttatgcagtcttgcagtgtccttgatttgaatgcatttgagaggcagaataaagctgaaggcctggggatggtgactgaagaaggaacactcattgttcgggaacgtggtgaaaaagtactccagaatgacgagttcacgcgtgatctctttagattcctacagttactttgtgagggacataacagtgactttcagaacttcctgcggactcagatgggcaacaccaccaccgtgaatgtcatcatcagcactgtggactaccttctgcgtctgcaggaatcaatcagtgatttctactggtattattcagggaaggacatcattgatgaatctggacagcacaatttttccaaagctctggcagtcaccaagcagattttcaattctcttacagaatacatccagggcccttgcattggtaatcaacagagcctggctcacagcaggctgtgggacgcagtggttggcttcctccatgtctttgctaatatgcagatgaaactctctcaggattccagtcagatcgagctgctgaaggaactcttggatctccttcaggacatggtggtgatgcttctgtccctcctggaagggaatgtggtaaatggcaccattggcaagcagatggttgacacactggtagaatcatctaccaatgtagaaatgatcttgaaattctttgacatgttcttgaaacttaaagacttaaccagctcagacaccttcaaagaatatgacccagatggtaaaggaattatctccaaaaaagaattccagaaggccatggaagggcaaaaacagtacacgcagtcagagattgactttctcctgtcgtgtgcagaagctgatgagaatgacatgtttaattacgttgattttgtagaccggttccatgagccagccaaggacatagggtttaatgtggctgtgttattgacaaatctttctgaacacatgccaaacgattcccgcctgaagtgtctgttggacccagcagaaagtgtgctaaattacttcgaaccctacctaggacgcatcgagatcatgggtggggccaagaagattgagcgtgtttattttgagatcagtgaatccagtcgcactcagtgggagaagccccaggtgaaggaatctaagcgacagttcatttttgatgttgtcaatgaaggtggggagcaggaaaagatggagctgtttgtgaacttctgtgaggacaccatctttgaaatgcagttagcatctcagatctctgaatccgattcagctgacaggccagaagaggaggaagaagatgaagattcttcttacgtgttagaaattgcgggtgaagaggaagaagacgggtctcttgagccggcctctgcatttgctatggcctgtgcctctgtgaagaggaatgtcaccgacttcctgaagagagcaaccctgaagaacctcaggaagcagtacaggaacgtgaaaaagatgactgcgaaggagctggtgaaggtgctcttctcctttttctggatgctgttcgtggggctattccagttgctcttcaccatcctgggaggaatctttcagatcctctggagcacagtgtttggagggggcctggtagaaggggcaaagaacatcagagtgaccaagatcctgggtgacatgcctgacccaacccaatttggtatccatgatgacactatggaggctgagagggcagaggtgatggagccaggtatcaccactgaactagtacacttcataaagggggagaagggagatacagatatcatgtcagacctctttggactccacccaaagaaagagggcagcttaaagcatgggcctgaagtgggtttgggtgacctctcagaaattattggcaaggatgaaccccctacattagagagtactgtacagaagaagaggaaagctcaggcagcagaaatgaaagcagcaaatgaagcagaaggaaaagtagaatccgagaaggcagacatggaagatggagagaaggaagacaaagacaaagaagaggagcaagctgagtacctgtggacagaagtgacaaaaaagaagaagcggcggtgtggtcagaaggttgagaagccggaagctttcacagccaatttctttaaagggctggaaatctatcagaccaagttactgcattacctggccaggaatttctacaacctgaggttccttgctctgtttgtagccttcgctatcaacttcatcctgcttttttataaggtcactgaagaacctttagaagaagagacagaggatgttgcaaacctatggaattcctttaatgacgaggaagaggaagaagcgatggtattctttgtccttcaggagagcaccgggtatatggcaccaaccctgcgtgccctggccatcatccataccatcatctctctagtctgtgtggtgggctactactgcctgaaggtgcctttggtggttttcaaaagggaaaaagaaatcgccaggaagctggagtttgatggcctatatatcaccgaacagccatctgaagatgacatcaaggggcagtgggaccgcttggtgatcaacacaccatcttttcctaataactactgggacaagtttgtaaagagaaaggtgatcaacaagtatggagatctctacggagcagaacgcattgctgaacttctgggtttggacaaaaatgctcttgactttagcccagtagaagagaccaaagcagaagcggcttctctggtgtcatggctaagttccatagacatgaagtaccatatctggaagcttggagttgtttttactgacaactcctttctctaccttgcctggtatacaaccatgtcagtcctgggccactacaataacttcttctttgctgctcacctattggacatcgcaatgggcttcaagacactgaggaccattctgtcatctgtaactcacaatggcaaacagttggttctgactgtcggtctcctggccgtggtggtttatctctatactgtggtggctttcaacttcttccgcaagttctacaacaaaagcgaagacgatgacgagcccgatatgaagtgcgacgacatgatgacgtgttaccttttccacatgtacgtgggagtgagagcaggaggtggcattggtgatgaaattgaagaccctgctggtgatccttatgaaatgtatcgcattgtctttgacattacctttttcttcttcgtcattgtcatcttgctggccatcattcaaggtcttattattgatgctttcggagagctaagagaccagcaggaacaagtacgagaagatatggagactaaatgtttcatctgtgggattggcaatgactactttgacacaacccctcatggttttgaaacacatacattacaagagcacaacttagccaactacttgttctttctgatgtatttgattaataaagatgaaacagagcacacgggtcaggaatcttatgtctggaagatgtaccaagaaaggtgttgggatttcttcccagccggtgactgctttcgtaaacaatatgaagatcagcttggataaatctgaatcaaagaagcgcgacaattctggacagtcaacttcccatgaaataaagtcccctttttacagttctgcaacatatctgaaatgtgacattttctaaatgcctcccttaaaaaaaaaactgctgaaaatctgtgctattttgaaattgatttggctttttgtgcctaatggacatacactgtgggagagaacctgtcaaaatgtcgaagaaggaaggcgaagaatcaagtaatctctaggcaaatgccttcaagttttccagttctgaggtaactagttcagtttgttgggatggaagcatgaaggaaagggctagagaagtatgaaatctcgaatgtgtaatacctgaaaatttaaacacttgaatgtcatcatggtatccaacttgtgactcatagggtctgaactccaaaagataataactgcagtctaatttttcccatggtacttgctagtgactgtatccagaaaagctttaagcagttaaagaaacagaaaaaaaccgacactttgtcgacactgaaatatcgattaagtgccttaaaacctctttagacatagctatgcaagttttttatgtttgtgttccagaaggacagttccattcattagttgtgatcttccgtcttactttatgaaactgcacttgaaggttattcatacaagtttttttagtaacagctgtcagtcaactgctgttattagaagaaaagtactgtactgaaaattcagaaaaaaaatctcaaccttatgccaaaatggagtaatgctttatggtcccttgtaagtagtggagctgctctgtttaggtgaatctcctcaaatacagtgaagtgcccactgcaataaagtaatacgtaccaataaaaa

SEQ ID NO: 379315 - DNA, 2325 bp, Homo sapiens
ggttggggccattcagggctgtgggcccatgtggactggatgcccagcgtgagtgtataccgtgagggcctttgagctctcggacagcgtggagtggtcaaggaaggcctccaggaggaagaggtggccaaccgccccaggcagcacagtggtcttgaagcggcggccctgctcctggccgtgaccatggaccctctggagacccctatcaaggatggcatcctctaccagcagcatgtcaagtttggcaagaagtgctggcggaaggtgtgggctctgctgtatgcaggaggcccatcaggcgtggcacggctggagagctgggaggtccgggatggtggcctgggagcagcgggtgacaggtcggcagggcctggccggcgaggggagcgacgggtcatccgcctggctgactgtgtgtccgtgctgccggctgacggcgagagctgcccccgggacaccggtgccttcctgctcaccaccaccgagcgaagccatctactggctgctcagcaccgccaggcctggatgggccccatctgccagctggccttcccggggacaggggaggcctcctcaggatccacagatgcccagtctcccaagaggggcctggtccccatggaggaaaactccatctactcctcctggcaggaagtgggcgagtttcccgtggtggtgcagaggactgaggccgccacccgctgccagctgaaggggccggccctgctggtgctgggcccagacgccatccagctgagggaggccaagggcacccaggccctctacagctggccctaccacttcctgcgcaagttcggctccgacaagatacttctgggaaccccaggcgtcagtctcctcatctgtaaaggagagagaaccgatgacgtatcaggcataatccttgatgagagtttgctgcgtgcctactcagtgccaggcgctgggggacacagccgtgttcaggacagccttggtcctgttctccgggagccgacattccagggggagagaagtttcctgaagacttccatgctgcgttccctctgctcctgctcctggcgccatcctaggagccagccatgcacgcaagcgtcatgcctccagggctctgactgcccagcccctcaccgcaactccacctcagctgcacacacccttggcacatcctgaacctcattttcatgacggacacacaatttttgctctctcctgtccaagcctcatcctctggccgccacctccttccagctcacttcctttagtgcggccagtaccgcccctgcctaggcatgtcgacctgcagggacccttttctggctcttcgaggcctctgcccaccatcccctctttgttctccatagtcccttccccctgttctctctcgtttcatcttactggtctggcaaagtccccggccttgggcgagcccagacctcctcagtgcctgcacacagctgcccacagccagagaaatccatttaagcagactgcctgcatccttcttaacagtgcaaggcaggcactccctgccacaagagaccctgttccctagtagggcagcttttctcctccccagaacctcctgtctatccccacccaatgtctcctcacaggcatattggggaaacaggtcaggctctcccaccgtatctgcaagtgtactggcatccatctgtcttcttcctacccctacagtagaaacagtgtctgtccccagctgtgctctgatcccggctcctttcacctcagagcttggaaaattgagctgtccccactctctcctgcgcccattcatcctaccagcagcttttccagccacacgcaaacatgctctgtaatttcacattttaaaccttcccttgacctcacattcctcttcggccacctctgtttctctgttcctcttcacagcaaaaactgttcaaaagagttgttgattactttcatttccactttctcacccccattctcccctcaattaactctccttcatccccatgatgccattatgtggcttttattagagtcacgaaccttattctccaaaacaaaagcaacaaggactttgacttctcagcagcactcagctctggttcttgaaacacccccgttacttgctattcctcctacctcataacaatctccttcccagcctctactgctgccttctctgagttcttcccagggtcctaggctcagatgtagtgtagctcaaccctgctacacaaagaatctcctgaaagcctgtaaaaatgtccatgcatgttctgtgagtgatctaccaagaaaataaaaaatttaaaaatcaaaaacccatgc

SEQ ID NO: 379316 - DNA, 2478 bp, Homo sapiens
tgaggcagaggcctccctcccaccccagctcttggcctgtggcccaagtgcccctttttgggggtgagagggaaccaatataatggcagtgtctggtggtctgcccggccactggatgctttacaaacatgacccagtagcagtcccagctcgagttctcatggccttttgagagacgacattgatgcttgtggaggtcacagttaggaaagagcgggctgggatttgaacccagggctgaccaatcccaagcatagccaaggcctccttacctggctccctgagaaactggggagcagaggcccgctcctggctgggagcgtttgccgagcagcttgtgctgagccaagtggcacggacaatctgccacccaagggtcttcaccctcccgctcccctcccgcagaagtgctggcggaaggtgtgggctctgctgtatgcaggaggcccatcaggcgtggcacggctggagagctgggaggtccgggatggtggcctgggagcagcgggtgacaggtcggcagggcctggccggcgaggggagcgacgggtcatccgcctggctgactgtgtgtccgtgctgccggctgacggcgagagctgcccccgggacaccggtgccttcctgctcaccaccaccgagcgaagccatctactggctgctcagcaccgccaggcctggatgggccccatctgccagctggccttcccggggacaggggaggcctcctcaggatccacagatgcccagtctcccaagaggggcctggtccccatggaggaaaactccatctactcctcctggcaggaagtgggcgagtttcccgtggtggtgcagaggactgaggccgccacccgctgccagctgaaggggccggccctgctggtgctgggcccagacgccatccagctgagggaggccaagggcacccaggccctctacagctggccctaccacttcctgcgcaagttcggctccgacaagatacttctgggaaccccaggcgtcagtctcctcatctgtaaaggagagagaaccgatgacgtatcaggcataatccttgatgagagtttgctgcgtgcctactcagtgccaggcgctgggggacacagccgtgttcaggacagccttggtcctgttctccgggagccgacattccagggggagagaagtttcctgaagacttccatgctgcgttccctctgctcctgctcctggcgccatcctaggagccagccatgcacgcaagcgtcatgcctccagggctctgactgcccagcccctcaccgcaactccacctcagctgcacacacccttggcacatcctgaacctcattttcatgacggacacacaatttttgctctctcctgtccaagcctcatcctctggccgccacctccttccagctcacttcctttagtgcggccagtaccgcccctgcctaggcatgtcgacctgcagggacccttttctggctcttcgaggcctctgcccaccatcccctctttgttctccatagtcccttccccctgttctctctcgtttcatcttactggtctggcaaagtccccggccttgggcgagcccagacctcctcagtgcctgcacacagctgcccacagccagagaaatccatttaagcagactgcctgcatccttcttaacagtgcaaggcaggcactccctgccacaagagaccctgttccctagtagggcagcttttctcctccccagaacctcctgtctatccccacccaatgtctcctcacaggcatattggggaaacaggtcaggctctcccaccgtatctgcaagtgtactggcatccatctgtcttcttcctacccctacagtagaaacagtgtctgtccccagctgtgctctgatcccggctcctttcacctcagagcttggaaaattgagctgtccccactctctcctgcgcccattcatcctaccagcagcttttccagccacacgcaaacatgctctgtaatttcacattttaaaccttcccttgacctcacattcctcttcggccacctctgtttctctgttcctcttcacagcaaaaactgttcaaaagagttgttgattactttcatttccactttctcacccccattctcccctcaattaactctccttcatccccatgatgccattatgtggcttttattagagtcacgaaccttattctccaaaacaaaagcaacaaggactttgacttctcagcagcactcagctctggttcttgaaacacccccgttacttgctattcctcctacctcataacaatctccttcccagcctctactgctgccttctctgagttcttcccagggtcctaggctcagatgtagtgtagctcaaccctgctacacaaagaatctcctgaaagcctgtaaaaatgtccatgcatgttctgtgagtgatctaccaagaaaataaaaaatttaaaaatcaaaaacccatgc

SEQ ID NO: 379317 - DNA, 193 bp, Homo sapiens
ctggaacctctctgattggtgtatacatcgccatgtggtatgaggaagcggctcccagcggtcctaggctcagatgtagtgtagctcaaccctgctacacaaagaatctcctgaaagcctgtaaaaatgtccatgcatgttctgtgagtgatctaccaagaaaataaaaaatttaaaaatcaaaaacccatgc

SEQ ID NO: 379318 - DNA, 3619 bp, Homo sapiens
atgactcggggagccagactgcgatcagacgcgcgtgcccagctgaaccaggtgcgtgagaaggctgccttcaggtggccgggggctccctccagctgtctctggacggagggacgggaagtggccagaaggggaagtgtgaggagttcccgtccagcctgtcatcagtctccccaggtcttgaagcggcggccctgctcctggccgtgaccatggaccctctggagacccctatcaaggatggcatcctctaccagcagcatgtcaagtttggcaagaagtgctggcggaaggtgtgggctctgctgtatgcaggaggcccatcaggcgtggcacggctggagagctgggaggtccgggatggtggcctgggagcagcgggtgacaggtcggcagggcctggccggcgaggggagcgacgggtcatccgcctggctgactgtgtgtccgtgctgccggctgacggcgagagctgcccccgggacaccggtgccttcctgctcaccaccaccgagcgaagccatctactggctgctcagcaccgccaggcctggatgggccccatctgccagctggccttcccggggacaggggaggcctcctcaggatccacagatgcccagtctcccaagaggggcctggtccccatggaggaaaactccatctactcctcctggcaggaagtgggcgagtttcccgtggtggtgcagaggactgaggccgccacccgctgccagctgaaggggccggccctgctggtgctgggcccagacgccatccagctgagggaggccaagggcacccaggccctctacagctggccctaccacttcctgcgcaagttcggctccgacaagggcgtgttctcctttgaggccggccgtcgctgccactcgggtgagggcctctttgccttcagcaccccctgtgcccctgacctgtgcagggctgtggccggggccatcgcccgccagcgggagcggctgccagagctgaccaggccccagccctgccccctgccacgggccacctctctgccctccctggacacccccggagagcttcgggagatgccaccaggacctgagccacccacgtccaggaaaatgcacctggccgagcccggaccccagagcctgccgctactgctaggcccggagcccaacgatctggcgtccgggctctacgcttcagtgtgcaagcgtgccagtgggcccccaggcaatgagcacctctatgagaacctgtgtgtgctggaggccagccccacgctgcacggtggggaacctgagccgcacgagggccccggcagccgcagccccacaaccagtcccatctaccacaacggccaggacttgagctggcccggcccggccaacgacagtaccctggaggcccagtaccggcggctgctggagctggatcaggtggagggcacaggccgccctgaccctcaggcaggtttcaaggccaagctggtgaccctgctgagtcgtgagcggaggaagggcccagccccttgtgaccggccctgaacgcccagcagagtggtggccagaggggagaggtgctccccctgggacaggagggtgggctggtgggcaaacattgggcccatgcagacacacgcctgtgtccaccctggcctgcaggaacaaggcaggccgcctgtggaggacctcagccctgccctgccctcctcatgaatagtgtgcagactcacagataataaagctcagagcagctcccggcaggggcactcacggcacacgcccctgcccacgttcattgcggccaacacaagcaccctgtgccggttccaggggcacaggtgacctgggccttacctgccacccgtgggctcaaatccactgcagcagacagacgggatggaaatcattaggactccatgttgctctgcacggccgagtgacacgaagaggcaggcggagggagctgtgaggcttacttgtcagactcaggaaggagcaacatgagggcccaactggagacccggaggcccgagctgggaggaggcagtgggggcggggtgcaggtggaagggatttcagagacaccctcgtccaaaacacttgttccctgctgaaactccaacaatttgcagatacttctgggaaccccaggcgtcagtctcctcatctgtaaaggagagagaaccgatgacgtatcaggcataatccttgatgagagtttgctgcgtgcctactcagtgccaggcgctgggggacacagccgtgttcaggacagccttggtcctgttctccgggagccgacattccagggggagagaagtttcctgaagacttccatgctgcgttccctctgctcctgctcctggcgccatcctaggagccagccatgcacgcaagcgtcatgcctccagggctctgactgcccagcccctcaccgcaactccacctcagctgcacacacccttggcacatcctgaacctcattttcatgacggacacacaatttttgctctctcctgtccaagcctcatcctctggccgccacctccttccagctcacttcctttagtgcggccagtaccgcccctgcctaggcatgtcgacctgcagggacccttttctggctcttcgaggcctctgcccaccatcccctctttgttctccatagtcccttccccctgttctctctcgtttcatcttactggtctggcaaagtccccggccttgggcgagcccagacctcctcagtgcctgcacacagctgcccacagccagagaaatccatttaagcagactgcctgcatccttcttaacagtgcaaggcaggcactccctgccacaagagaccctgttccctagtagggcagcttttctcctccccagaacctcctgtctatccccacccaatgtctcctcacaggcatattggggaaacaggtcaggctctcccaccgtatctgcaagtgtactggcatccatctgtcttcttcctacccctacagtagaaacagtgtctgtccccagctgtgctctgatcccggctcctttcacctcagagcttggaaaattgagctgtccccactctctcctgcgcccattcatcctaccagcagcttttccagccacacgcaaacatgctctgtaatttcacattttaaaccttcccttgacctcacattcctcttcggccacctctgtttctctgttcctcttcacagcaaaaactgttcaaaagagttgttgattactttcatttccactttctcacccccattctcccctcaattaactctccttcatccccatgatgccattatgtggcttttattagagtcacgaaccttattctccaaaacaaaagcaacaaggactttgacttctcagcagcactcagctctggttcttgaaacacccccgttacttgctattcctcctacctcataacaatctccttcccagcctctactgctgccttctctgagttcttcccagggtcctaggctcagatgtagtgtagctcaaccctgctacacaaagaatctcctgaaagcctgtaaaaatgtccatgcatgttctgtgagtgatctaccaagaaaataaaaaatttaaaaatcaaaaacccatgc

SEQ ID NO: 379319 - DNA, 3675 bp, Homo sapiens
ggttggggccattcagggctgtgggcccatgtggactggatgcccagcgtgagtgtataccgtgagggcctttgagctctcggacagcgtggagtggtcaaggaaggcctccaggaggaagaggtggccaaccgccccaggcagcacagtgctgtctctggacggagggacgggaagtggccagaaggggaagtgtgaggagttcccgtccagcctgtcatcagtctccccaggtcttgaagcggcggccctgctcctggccgtgaccatggaccctctggagacccctatcaaggatggcatcctctaccagcagcatgtcaagtttggcaagaagtgctggcggaaggtgtgggctctgctgtatgcaggaggcccatcaggcgtggcacggctggagagctgggaggtccgggatggtggcctgggagcagcgggtgacaggtcggcagggcctggccggcgaggggagcgacgggtcatccgcctggctgactgtgtgtccgtgctgccggctgacggcgagagctgcccccgggacaccggtgccttcctgctcaccaccaccgagcgaagccatctactggctgctcagcaccgccaggcctggatgggccccatctgccagctggccttcccggggacaggggaggcctcctcaggatccacagatgcccagtctcccaagaggggcctggtccccatggaggaaaactccatctactcctcctggcaggaagtgggcgagtttcccgtggtggtgcagaggactgaggccgccacccgctgccagctgaaggggccggccctgctggtgctgggcccagacgccatccagctgagggaggccaagggcacccaggccctctacagctggccctaccacttcctgcgcaagttcggctccgacaagggcgtgttctcctttgaggccggccgtcgctgccactcgggtgagggcctctttgccttcagcaccccctgtgcccctgacctgtgcagggctgtggccggggccatcgcccgccagcgggagcggctgccagagctgaccaggccccagccctgccccctgccacgggccacctctctgccctccctggacacccccggagagcttcgggagatgccaccaggacctgagccacccacgtccaggaaaatgcacctggccgagcccggaccccagagcctgccgctactgctaggcccggagcccaacgatctggcgtccgggctctacgcttcagtgtgcaagcgtgccagtgggcccccaggcaatgagcacctctatgagaacctgtgtgtgctggaggccagccccacgctgcacggtggggaacctgagccgcacgagggccccggcagccgcagccccacaaccagtcccatctaccacaacggccaggacttgagctggcccggcccggccaacgacagtaccctggaggcccagtaccggcggctgctggagctggatcaggtggagggcacaggccgccctgaccctcaggcaggtttcaaggccaagctggtgaccctgctgagtcgtgagcggaggaagggcccagccccttgtgaccggccctgaacgcccagcagagtggtggccagaggggagaggtgctccccctgggacaggagggtgggctggtgggcaaacattgggcccatgcagacacacgcctgtgtccaccctggcctgcaggaacaaggcaggccgcctgtggaggacctcagccctgccctgccctcctcatgaatagtgtgcagactcacagataataaagctcagagcagctcccggcaggggcactcacggcacacgcccctgcccacgttcattgcggccaacacaagcaccctgtgccggttccaggggcacaggtgacctgggccttacctgccacccgtgggctcaaatccactgcagcagacagacgggatggaaatcattaggactccatgttgctctgcacggccgagtgacacgaagaggcaggcggagggagctgtgaggcttacttgtcagactcaggaaggagcaacatgagggcccaactggagacccggaggcccgagctgggaggaggcagtgggggcggggtgcaggtggaagggatttcagagacaccctcgtccaaaacacttgttccctgctgaaactccaacaatttgcagatacttctgggaaccccaggcgtcagtctcctcatctgtaaaggagagagaaccgatgacgtatcaggcataatccttgatgagagtttgctgcgtgcctactcagtgccaggcgctgggggacacagccgtgttcaggacagccttggtcctgttctccgggagccgacattccagggggagagaagtttcctgaagacttccatgctgcgttccctctgctcctgctcctggcgccatcctaggagccagccatgcacgcaagcgtcatgcctccagggctctgactgcccagcccctcaccgcaactccacctcagctgcacacacccttggcacatcctgaacctcattttcatgacggacacacaatttttgctctctcctgtccaagcctcatcctctggccgccacctccttccagctcacttcctttagtgcggccagtaccgcccctgcctaggcatgtcgacctgcagggacccttttctggctcttcgaggcctctgcccaccatcccctctttgttctccatagtcccttccccctgttctctctcgtttcatcttactggtctggcaaagtccccggccttgggcgagcccagacctcctcagtgcctgcacacagctgcccacagccagagaaatccatttaagcagactgcctgcatccttcttaacagtgcaaggcaggcactccctgccacaagagaccctgttccctagtagggcagcttttctcctccccagaacctcctgtctatccccacccaatgtctcctcacaggcatattggggaaacaggtcaggctctcccaccgtatctgcaagtgtactggcatccatctgtcttcttcctacccctacagtagaaacagtgtctgtccccagctgtgctctgatcccggctcctttcacctcagagcttggaaaattgagctgtccccactctctcctgcgcccattcatcctaccagcagcttttccagccacacgcaaacatgctctgtaatttcacattttaaaccttcccttgacctcacattcctcttcggccacctctgtttctctgttcctcttcacagcaaaaactgttcaaaagagttgttgattactttcatttccactttctcacccccattctcccctcaattaactctccttcatccccatgatgccattatgtggcttttattagagtcacgaaccttattctccaaaacaaaagcaacaaggactttgacttctcagcagcactcagctctggttcttgaaacacccccgttacttgctattcctcctacctcataacaatctccttcccagcctctactgctgccttctctgagttcttcccagggtcctaggctcagatgtagtgtagctcaaccctgctacacaaagaatctcctgaaagcctgtaaaaatgtccatgcatgttctgtgagtgatctaccaagaaaataaaaaatttaaaaatcaaaaacccatgc

SEQ ID NO: 379320 - DNA, 3675 bp, Homo sapiens
ggttggggccattcagggctgtgggcccatgtggactggatgcccagcgtgagtgtataccgtgagggcctttgagctctcggacagcgtggagtggtcaaggaaggcctccaggaggaagaggtggccaaccgccccaggcagcacagtggtcttgaagcggcggccctgctcctggccgtgaccatggaccctctggagacccctatcaaggatggcatcctctaccagcagcatgtcaagtttggcaagaagtgctggcggaaggtgtgggctctgctgtatgcaggaggcccatcaggcgtggcacggctggagagctgggaggtccgggatggtggcctgggagcagcgggtgacaggtcggcagggcctggccggcgaggggagcgacgggtcatccgcctggctgactgtgtgtccgtgctgccggctgacggcgagagctgcccccgggacaccggtgccttcctgctcaccaccaccgagcgaagccatctactggctgctcagcaccgccaggcctggatgggccccatctgccagctggccttcccggggacaggggaggcctcctcaggatccacagatgcccagtctcccaagaggggcctggtccccatggaggaaaactccatctactcctcctggcaggaagtgggcgagtttcccgtggtggtgcagaggactgaggccgccacccgctgccagctgaaggggccggccctgctggtgctgggcccagacgccatccagctgagggaggccaagggcacccaggccctctacagctggccctaccacttcctgcgcaagttcggctccgacaaggtgaggtgcaggggtgggaaagggtgaggggctgacaccctggaccctcctgctaatccccacccgtgtgccctgtgcccagggcgtgttctcctttgaggccggccgtcgctgccactcgggtgagggcctctttgccttcagcaccccctgtgcccctgacctgtgcagggctgtggccggggccatcgcccgccagcgggagcggctgccagagctgaccaggccccagccctgccccctgccacgggccacctctctgccctccctggacacccccggagagcttcgggagatgccaccaggacctgagccacccacgtccaggaaaatgcacctggccgagcccggaccccagagcctgccgctactgctaggcccggagcccaacgatctggcgtccgggctctacgcttcagtgtgcaagcgtgccagtgggcccccaggcaatgagcacctctatgagaacctgtgtgtgctggaggccagccccacgctgcacggtggggaacctgagccgcacgagggccccggcagccgcagccccacaaccagtcccatctaccacaacggccaggacttgagctggcccggcccggccaacgacagtaccctggaggcccagtaccggcggctgctggagctggatcaggtggagggcacaggccgccctgaccctcaggcaggtttcaaggccaagctggtgaccctgctgagtcgtgagcggaggaagggcccagccccttgtgaccggccctgaacgcccagcagagtggtggccagaggggagaggtgctccccctgggacaggagggtgggctggtgggcaaacattgggcccatgcagacacacgcctgtgtccaccctggcctgcaggaacaaggcaggccgcctgtggaggacctcagccctgccctgccctcctcatgaatagtgtgcagactcacagataataaagctcagagcagctcccggcaggggcactcacggcacacgcccctgcccacgttcattgcggccaacacaagcaccctgtgccggttccaggggcacaggtgacctgggccttacctgccacccgtgggctcaaatccactgcagcagacagacgggatggaaatcattaggactccatgttgctctgcacggccgagtgacacgaagaggcaggcggagggagctgtgaggcttacttgtcagactcaggaaggagcaacatgagggcccaactggagacccggaggcccgagctgggaggaggcagtgggggcggggtgcaggtggaagggatttcagagacaccctcgtccaaaacacttgttccctgctgaaactccaacaatttgcagatacttctgggaaccccaggcgtcagtctcctcatctgtaaaggagagagaaccgatgacgtatcaggcataatccttgatgagagtttgctgcgtgcctactcagtgccaggcgctgggggacacagccgtgttcaggacagccttggtcctgttctccgggagccgacattccagggggagagaagtttcctgaagacttccatgctgcgttccctctgctcctgctcctggcgccatcctaggagccagccatgcacgcaagcgtcatgcctccagggctctgactgcccagcccctcaccgcaactccacctcagctgcacacacccttggcacatcctgaacctcattttcatgacggacacacaatttttgctctctcctgtccaagcctcatcctctggccgccacctccttccagctcacttcctttagtgcggccagtaccgcccctgcctaggcatgtcgacctgcagggacccttttctggctcttcgaggcctctgcccaccatcccctctttgttctccatagtcccttccccctgttctctctcgtttcatcttactggtctggcaaagtccccggccttgggcgagcccagacctcctcagtgcctgcacacagctgcccacagccagagaaatccatttaagcagactgcctgcatccttcttaacagtgcaaggcaggcactccctgccacaagagaccctgttccctagtagggcagcttttctcctccccagaacctcctgtctatccccacccaatgtctcctcacaggcatattggggaaacaggtcaggctctcccaccgtatctgcaagtgtactggcatccatctgtcttcttcctacccctacagtagaaacagtgtctgtccccagctgtgctctgatcccggctcctttcacctcagagcttggaaaattgagctgtccccactctctcctgcgcccattcatcctaccagcagcttttccagccacacgcaaacatgctctgtaatttcacattttaaaccttcccttgacctcacattcctcttcggccacctctgtttctctgttcctcttcacagcaaaaactgttcaaaagagttgttgattactttcatttccactttctcacccccattctcccctcaattaactctccttcatccccatgatgccattatgtggcttttattagagtcacgaaccttattctccaaaacaaaagcaacaaggactttgacttctcagcagcactcagctctggttcttgaaacacccccgttacttgctattcctcctacctcataacaatctccttcccagcctctactgctgccttctctgagttcttcccagggtcctaggctcagatgtagtgtagctcaaccctgctacacaaagaatctcctgaaagcctgtaaaaatgtccatgcatgttctgtgagtgatctaccaagaaaataaaaaatttaaaaatcaaaaacccatgc

SEQ ID NO: 379321 - DNA, 2407 bp, Homo sapiens
ggttggggccattcagggctgtgggcccatgtggactggatgcccagcgtgagtgtataccgtgagggcctttgagctctcggacagcgtggagtggtcaaggaaggcctccaggaggaagaggtggccaaccgccccaggcagcacagtgctgtctctggacggagggacgggaagtggccagaaggggaagtgtgaggagttcccgtccagcctgtcatcagtctccccaggtcttgaagcggcggccctgctcctggccgtgaccatggaccctctggagacccctatcaaggatggcatcctctaccagcagcatgtcaagtttggcaagaagtgctggcggaaggtgtgggctctgctgtatgcaggaggcccatcaggcgtggcacggctggagagctgggaggtccgggatggtggcctgggagcagcgggtgacaggtcggcagggcctggccggcgaggggagcgacgggtcatccgcctggctgactgtgtgtccgtgctgccggctgacggcgagagctgcccccgggacaccggtgccttcctgctcaccaccaccgagcgaagccatctactggctgctcagcaccgccaggcctggatgggccccatctgccagctggccttcccggggacaggggaggcctcctcaggatccacagatgcccagtctcccaagaggggcctggtccccatggaggaaaactccatctactcctcctggcaggaagtgggcgagtttcccgtggtggtgcagaggactgaggccgccacccgctgccagctgaaggggccggccctgctggtgctgggcccagacgccatccagctgagggaggccaagggcacccaggccctctacagctggccctaccacttcctgcgcaagttcggctccgacaagatacttctgggaaccccaggcgtcagtctcctcatctgtaaaggagagagaaccgatgacgtatcaggcataatccttgatgagagtttgctgcgtgcctactcagtgccaggcgctgggggacacagccgtgttcaggacagccttggtcctgttctccgggagccgacattccagggggagagaagtttcctgaagacttccatgctgcgttccctctgctcctgctcctggcgccatcctaggagccagccatgcacgcaagcgtcatgcctccagggctctgactgcccagcccctcaccgcaactccacctcagctgcacacacccttggcacatcctgaacctcattttcatgacggacacacaatttttgctctctcctgtccaagcctcatcctctggccgccacctccttccagctcacttcctttagtgcggccagtaccgcccctgcctaggcatgtcgacctgcagggacccttttctggctcttcgaggcctctgcccaccatcccctctttgttctccatagtcccttccccctgttctctctcgtttcatcttactggtctggcaaagtccccggccttgggcgagcccagacctcctcagtgcctgcacacagctgcccacagccagagaaatccatttaagcagactgcctgcatccttcttaacagtgcaaggcaggcactccctgccacaagagaccctgttccctagtagggcagcttttctcctccccagaacctcctgtctatccccacccaatgtctcctcacaggcatattggggaaacaggtcaggctctcccaccgtatctgcaagtgtactggcatccatctgtcttcttcctacccctacagtagaaacagtgtctgtccccagctgtgctctgatcccggctcctttcacctcagagcttggaaaattgagctgtccccactctctcctgcgcccattcatcctaccagcagcttttccagccacacgcaaacatgctctgtaatttcacattttaaaccttcccttgacctcacattcctcttcggccacctctgtttctctgttcctcttcacagcaaaaactgttcaaaagagttgttgattactttcatttccactttctcacccccattctcccctcaattaactctccttcatccccatgatgccattatgtggcttttattagagtcacgaaccttattctccaaaacaaaagcaacaaggactttgacttctcagcagcactcagctctggttcttgaaacacccccgttacttgctattcctcctacctcataacaatctccttcccagcctctactgctgccttctctgagttcttcccagggtcctaggctcagatgtagtgtagctcaaccctgctacacaaagaatctcctgaaagcctgtaaaaatgtccatgcatgttctgtgagtgatctaccaagaaaataaaaaatttaaaaatcaaaaacccatgc

SEQ ID NO: 379322 - DNA, 1142 bp, Homo sapiens
atgactcggggagccagactgcgatcagacgcgcgtgcccagctgaaccaggtgcgtgagaaggctgccttcaggtggccgggggctccctccagctgtctctggacggagggacgggaagtggccagaaggggaagtgtgaggagttcccgtccagcctgtcatcagtctccccaggtcttgaagcggcggccctgctcctggccgtgaccatggaccctctggagacccctatcaaggatggcatcctctaccagcagcatgtcaagtttggcaagaagtgctggcggaaggtgtgggctctgctgtatgcaggaggcccatcaggcgtggcacggctggagagctgggaggtccgggatggtggcctgggagcagcgggtgacaggtcggcagggcctggccggcgaggggagcgacgggtcatccgcctggctgactgtgtgtccgtgctgccggctgacggcgagagctgcccccgggacaccggtgccttcctgctcaccaccaccgagcgaagccatctactggctgctcagcaccgccaggcctggatgggccccatctgccagctggccttcccggggacaggggaggcctcctcaggatccacagatgcccagtctcccaagaggggcctggtccccatggaggaaaactccatctactcctcctggcaggaagtgggcgagtttcccgtggtggtgcagaggactgaggccgccacccgctgccagctgaaggggccggccctgctggtgctgggcccagacgccatccagctgagggaggccaagggcacccaggccctctacagctggccctaccacttcctgcgcaagttcggctccgacaagggcgtgttctcctttgaggccggccgtcgctgccactcgggtgagggcctctttgccttcagcaccccctgtgcccctgacctgtgcagggctgtggccggggccatcgcccgccagcgggagcggctgccagatgcttgagcccatggggcactccccaatgacccccattgacccaccaccctttgtccccaaacctggggggaccccaaaacccctttcgttcctttgccacttccccttgtggacagcccgcctgtgaaggaaggcttccgagagagatcg

SEQ ID NO: 379323 - DNA, 3575 bp, Homo sapiens
atgactcggggagccagactgcgatcagacgcgcgtgcccagctgaaccagctgtctctggacggagggacgggaagtggccagaaggggaagtgtgaggagttcccgtccagcctgtcatcagtctccccaggtcttgaagcggcggccctgctcctggccgtgaccatggaccctctggagacccctatcaaggatggcatcctctaccagcagcatgtcaagtttggcaagaagtgctggcggaaggtgtgggctctgctgtatgcaggaggcccatcaggcgtggcacggctggagagctgggaggtccgggatggtggcctgggagcagcgggtgacaggtcggcagggcctggccggcgaggggagcgacgggtcatccgcctggctgactgtgtgtccgtgctgccggctgacggcgagagctgcccccgggacaccggtgccttcctgctcaccaccaccgagcgaagccatctactggctgctcagcaccgccaggcctggatgggccccatctgccagctggccttcccggggacaggggaggcctcctcaggatccacagatgcccagtctcccaagaggggcctggtccccatggaggaaaactccatctactcctcctggcaggaagtgggcgagtttcccgtggtggtgcagaggactgaggccgccacccgctgccagctgaaggggccggccctgctggtgctgggcccagacgccatccagctgagggaggccaagggcacccaggccctctacagctggccctaccacttcctgcgcaagttcggctccgacaagggcgtgttctcctttgaggccggccgtcgctgccactcgggtgagggcctctttgccttcagcaccccctgtgcccctgacctgtgcagggctgtggccggggccatcgcccgccagcgggagcggctgccagagctgaccaggccccagccctgccccctgccacgggccacctctctgccctccctggacacccccggagagcttcgggagatgccaccaggacctgagccacccacgtccaggaaaatgcacctggccgagcccggaccccagagcctgccgctactgctaggcccggagcccaacgatctggcgtccgggctctacgcttcagtgtgcaagcgtgccagtgggcccccaggcaatgagcacctctatgagaacctgtgtgtgctggaggccagccccacgctgcacggtggggaacctgagccgcacgagggccccggcagccgcagccccacaaccagtcccatctaccacaacggccaggacttgagctggcccggcccggccaacgacagtaccctggaggcccagtaccggcggctgctggagctggatcaggtggagggcacaggccgccctgaccctcaggcaggtttcaaggccaagctggtgaccctgctgagtcgtgagcggaggaagggcccagccccttgtgaccggccctgaacgcccagcagagtggtggccagaggggagaggtgctccccctgggacaggagggtgggctggtgggcaaacattgggcccatgcagacacacgcctgtgtccaccctggcctgcaggaacaaggcaggccgcctgtggaggacctcagccctgccctgccctcctcatgaatagtgtgcagactcacagataataaagctcagagcagctcccggcaggggcactcacggcacacgcccctgcccacgttcattgcggccaacacaagcaccctgtgccggttccaggggcacaggtgacctgggccttacctgccacccgtgggctcaaatccactgcagcagacagacgggatggaaatcattaggactccatgttgctctgcacggccgagtgacacgaagaggcaggcggagggagctgtgaggcttacttgtcagactcaggaaggagcaacatgagggcccaactggagacccggaggcccgagctgggaggaggcagtgggggcggggtgcaggtggaagggatttcagagacaccctcgtccaaaacacttgttccctgctgaaactccaacaatttgcagatacttctgggaaccccaggcgtcagtctcctcatctgtaaaggagagagaaccgatgacgtatcaggcataatccttgatgagagtttgctgcgtgcctactcagtgccaggcgctgggggacacagccgtgttcaggacagccttggtcctgttctccgggagccgacattccagggggagagaagtttcctgaagacttccatgctgcgttccctctgctcctgctcctggcgccatcctaggagccagccatgcacgcaagcgtcatgcctccagggctctgactgcccagcccctcaccgcaactccacctcagctgcacacacccttggcacatcctgaacctcattttcatgacggacacacaatttttgctctctcctgtccaagcctcatcctctggccgccacctccttccagctcacttcctttagtgcggccagtaccgcccctgcctaggcatgtcgacctgcagggacccttttctggctcttcgaggcctctgcccaccatcccctctttgttctccatagtcccttccccctgttctctctcgtttcatcttactggtctggcaaagtccccggccttgggcgagcccagacctcctcagtgcctgcacacagctgcccacagccagagaaatccatttaagcagactgcctgcatccttcttaacagtgcaaggcaggcactccctgccacaagagaccctgttccctagtagggcagcttttctcctccccagaacctcctgtctatccccacccaatgtctcctcacaggcatattggggaaacaggtcaggctctcccaccgtatctgcaagtgtactggcatccatctgtcttcttcctacccctacagtagaaacagtgtctgtccccagctgtgctctgatcccggctcctttcacctcagagcttggaaaattgagctgtccccactctctcctgcgcccattcatcctaccagcagcttttccagccacacgcaaacatgctctgtaatttcacattttaaaccttcccttgacctcacattcctcttcggccacctctgtttctctgttcctcttcacagcaaaaactgttcaaaagagttgttgattactttcatttccactttctcacccccattctcccctcaattaactctccttcatccccatgatgccattatgtggcttttattagagtcacgaaccttattctccaaaacaaaagcaacaaggactttgacttctcagcagcactcagctctggttcttgaaacacccccgttacttgctattcctcctacctcataacaatctccttcccagcctctactgctgccttctctgagttcttcccagggtcctaggctcagatgtagtgtagctcaaccctgctacacaaagaatctcctgaaagcctgtaaaaatgtccatgcatgttctgtgagtgatctaccaagaaaataaaaaatttaaaaatcaaaaacccatgc

SEQ ID NO: 379324 - DNA, 3785 bp, Homo sapiens
ggttggggccattcagggctgtgggcccatgtggactggatgcccagcgtgagtgtataccgtgagggcctttgagctctcggacagcgtggagtggtcaaggaaggcctccaggaggaagaggtggccaaccgccccaggcagcacagtggtgagggggccctggaggggctggcctgggggagatgcaggccagaacacacaggtccctgagtgttgggctgaggagcctgggctgcaccccaggaaggggagagacagctgtctctggacggagggacgggaagtggccagaaggggaagtgtgaggagttcccgtccagcctgtcatcagtctccccaggtcttgaagcggcggccctgctcctggccgtgaccatggaccctctggagacccctatcaaggatggcatcctctaccagcagcatgtcaagtttggcaagaagtgctggcggaaggtgtgggctctgctgtatgcaggaggcccatcaggcgtggcacggctggagagctgggaggtccgggatggtggcctgggagcagcgggtgacaggtcggcagggcctggccggcgaggggagcgacgggtcatccgcctggctgactgtgtgtccgtgctgccggctgacggcgagagctgcccccgggacaccggtgccttcctgctcaccaccaccgagcgaagccatctactggctgctcagcaccgccaggcctggatgggccccatctgccagctggccttcccggggacaggggaggcctcctcaggatccacagatgcccagtctcccaagaggggcctggtccccatggaggaaaactccatctactcctcctggcaggaagtgggcgagtttcccgtggtggtgcagaggactgaggccgccacccgctgccagctgaaggggccggccctgctggtgctgggcccagacgccatccagctgagggaggccaagggcacccaggccctctacagctggccctaccacttcctgcgcaagttcggctccgacaagggcgtgttctcctttgaggccggccgtcgctgccactcgggtgagggcctctttgccttcagcaccccctgtgcccctgacctgtgcagggctgtggccggggccatcgcccgccagcgggagcggctgccagagctgaccaggccccagccctgccccctgccacgggccacctctctgccctccctggacacccccggagagcttcgggagatgccaccaggacctgagccacccacgtccaggaaaatgcacctggccgagcccggaccccagagcctgccgctactgctaggcccggagcccaacgatctggcgtccgggctctacgcttcagtgtgcaagcgtgccagtgggcccccaggcaatgagcacctctatgagaacctgtgtgtgctggaggccagccccacgctgcacggtggggaacctgagccgcacgagggccccggcagccgcagccccacaaccagtcccatctaccacaacggccaggacttgagctggcccggcccggccaacgacagtaccctggaggcccagtaccggcggctgctggagctggatcaggtggagggcacaggccgccctgaccctcaggcaggtttcaaggccaagctggtgaccctgctgagtcgtgagcggaggaagggcccagccccttgtgaccggccctgaacgcccagcagagtggtggccagaggggagaggtgctccccctgggacaggagggtgggctggtgggcaaacattgggcccatgcagacacacgcctgtgtccaccctggcctgcaggaacaaggcaggccgcctgtggaggacctcagccctgccctgccctcctcatgaatagtgtgcagactcacagataataaagctcagagcagctcccggcaggggcactcacggcacacgcccctgcccacgttcattgcggccaacacaagcaccctgtgccggttccaggggcacaggtgacctgggccttacctgccacccgtgggctcaaatccactgcagcagacagacgggatggaaatcattaggactccatgttgctctgcacggccgagtgacacgaagaggcaggcggagggagctgtgaggcttacttgtcagactcaggaaggagcaacatgagggcccaactggagacccggaggcccgagctgggaggaggcagtgggggcggggtgcaggtggaagggatttcagagacaccctcgtccaaaacacttgttccctgctgaaactccaacaatttgcagatacttctgggaaccccaggcgtcagtctcctcatctgtaaaggagagagaaccgatgacgtatcaggcataatccttgatgagagtttgctgcgtgcctactcagtgccaggcgctgggggacacagccgtgttcaggacagccttggtcctgttctccgggagccgacattccagggggagagaagtttcctgaagacttccatgctgcgttccctctgctcctgctcctggcgccatcctaggagccagccatgcacgcaagcgtcatgcctccagggctctgactgcccagcccctcaccgcaactccacctcagctgcacacacccttggcacatcctgaacctcattttcatgacggacacacaatttttgctctctcctgtccaagcctcatcctctggccgccacctccttccagctcacttcctttagtgcggccagtaccgcccctgcctaggcatgtcgacctgcagggacccttttctggctcttcgaggcctctgcccaccatcccctctttgttctccatagtcccttccccctgttctctctcgtttcatcttactggtctggcaaagtccccggccttgggcgagcccagacctcctcagtgcctgcacacagctgcccacagccagagaaatccatttaagcagactgcctgcatccttcttaacagtgcaaggcaggcactccctgccacaagagaccctgttccctagtagggcagcttttctcctccccagaacctcctgtctatccccacccaatgtctcctcacaggcatattggggaaacaggtcaggctctcccaccgtatctgcaagtgtactggcatccatctgtcttcttcctacccctacagtagaaacagtgtctgtccccagctgtgctctgatcccggctcctttcacctcagagcttggaaaattgagctgtccccactctctcctgcgcccattcatcctaccagcagcttttccagccacacgcaaacatgctctgtaatttcacattttaaaccttcccttgacctcacattcctcttcggccacctctgtttctctgttcctcttcacagcaaaaactgttcaaaagagttgttgattactttcatttccactttctcacccccattctcccctcaattaactctccttcatccccatgatgccattatgtggcttttattagagtcacgaaccttattctccaaaacaaaagcaacaaggactttgacttctcagcagcactcagctctggttcttgaaacacccccgttacttgctattcctcctacctcataacaatctccttcccagcctctactgctgccttctctgagttcttcccagggtcctaggctcagatgtagtgtagctcaaccctgctacacaaagaatctcctgaaagcctgtaaaaatgtccatgcatgttctgtgagtgatctaccaagaaaataaaaaatttaaaaatcaaaaacccatgc

SEQ ID NO: 379325 - DNA, 3575 bp, Homo sapiens
atgactcggggagccagactgcgatcagacgcgcgtgcccagctgaaccaggtcttgaagcggcggccctgctcctggccgtgaccatggaccctctggagacccctatcaaggatggcatcctctaccagcagcatgtcaagtttggcaagaagtgctggcggaaggtgtgggctctgctgtatgcaggaggcccatcaggcgtggcacggctggagagctgggaggtccgggatggtggcctgggagcagcgggtgacaggtcggcagggcctggccggcgaggggagcgacgggtcatccgcctggctgactgtgtgtccgtgctgccggctgacggcgagagctgcccccgggacaccggtgccttcctgctcaccaccaccgagcgaagccatctactggctgctcagcaccgccaggcctggatgggccccatctgccagctggccttcccggggacaggggaggcctcctcaggatccacagatgcccagtctcccaagaggggcctggtccccatggaggaaaactccatctactcctcctggcaggaagtgggcgagtttcccgtggtggtgcagaggactgaggccgccacccgctgccagctgaaggggccggccctgctggtgctgggcccagacgccatccagctgagggaggccaagggcacccaggccctctacagctggccctaccacttcctgcgcaagttcggctccgacaaggtgaggtgcaggggtgggaaagggtgaggggctgacaccctggaccctcctgctaatccccacccgtgtgccctgtgcccagggcgtgttctcctttgaggccggccgtcgctgccactcgggtgagggcctctttgccttcagcaccccctgtgcccctgacctgtgcagggctgtggccggggccatcgcccgccagcgggagcggctgccagagctgaccaggccccagccctgccccctgccacgggccacctctctgccctccctggacacccccggagagcttcgggagatgccaccaggacctgagccacccacgtccaggaaaatgcacctggccgagcccggaccccagagcctgccgctactgctaggcccggagcccaacgatctggcgtccgggctctacgcttcagtgtgcaagcgtgccagtgggcccccaggcaatgagcacctctatgagaacctgtgtgtgctggaggccagccccacgctgcacggtggggaacctgagccgcacgagggccccggcagccgcagccccacaaccagtcccatctaccacaacggccaggacttgagctggcccggcccggccaacgacagtaccctggaggcccagtaccggcggctgctggagctggatcaggtggagggcacaggccgccctgaccctcaggcaggtttcaaggccaagctggtgaccctgctgagtcgtgagcggaggaagggcccagccccttgtgaccggccctgaacgcccagcagagtggtggccagaggggagaggtgctccccctgggacaggagggtgggctggtgggcaaacattgggcccatgcagacacacgcctgtgtccaccctggcctgcaggaacaaggcaggccgcctgtggaggacctcagccctgccctgccctcctcatgaatagtgtgcagactcacagataataaagctcagagcagctcccggcaggggcactcacggcacacgcccctgcccacgttcattgcggccaacacaagcaccctgtgccggttccaggggcacaggtgacctgggccttacctgccacccgtgggctcaaatccactgcagcagacagacgggatggaaatcattaggactccatgttgctctgcacggccgagtgacacgaagaggcaggcggagggagctgtgaggcttacttgtcagactcaggaaggagcaacatgagggcccaactggagacccggaggcccgagctgggaggaggcagtgggggcggggtgcaggtggaagggatttcagagacaccctcgtccaaaacacttgttccctgctgaaactccaacaatttgcagatacttctgggaaccccaggcgtcagtctcctcatctgtaaaggagagagaaccgatgacgtatcaggcataatccttgatgagagtttgctgcgtgcctactcagtgccaggcgctgggggacacagccgtgttcaggacagccttggtcctgttctccgggagccgacattccagggggagagaagtttcctgaagacttccatgctgcgttccctctgctcctgctcctggcgccatcctaggagccagccatgcacgcaagcgtcatgcctccagggctctgactgcccagcccctcaccgcaactccacctcagctgcacacacccttggcacatcctgaacctcattttcatgacggacacacaatttttgctctctcctgtccaagcctcatcctctggccgccacctccttccagctcacttcctttagtgcggccagtaccgcccctgcctaggcatgtcgacctgcagggacccttttctggctcttcgaggcctctgcccaccatcccctctttgttctccatagtcccttccccctgttctctctcgtttcatcttactggtctggcaaagtccccggccttgggcgagcccagacctcctcagtgcctgcacacagctgcccacagccagagaaatccatttaagcagactgcctgcatccttcttaacagtgcaaggcaggcactccctgccacaagagaccctgttccctagtagggcagcttttctcctccccagaacctcctgtctatccccacccaatgtctcctcacaggcatattggggaaacaggtcaggctctcccaccgtatctgcaagtgtactggcatccatctgtcttcttcctacccctacagtagaaacagtgtctgtccccagctgtgctctgatcccggctcctttcacctcagagcttggaaaattgagctgtccccactctctcctgcgcccattcatcctaccagcagcttttccagccacacgcaaacatgctctgtaatttcacattttaaaccttcccttgacctcacattcctcttcggccacctctgtttctctgttcctcttcacagcaaaaactgttcaaaagagttgttgattactttcatttccactttctcacccccattctcccctcaattaactctccttcatccccatgatgccattatgtggcttttattagagtcacgaaccttattctccaaaacaaaagcaacaaggactttgacttctcagcagcactcagctctggttcttgaaacacccccgttacttgctattcctcctacctcataacaatctccttcccagcctctactgctgccttctctgagttcttcccagggtcctaggctcagatgtagtgtagctcaaccctgctacacaaagaatctcctgaaagcctgtaaaaatgtccatgcatgttctgtgagtgatctaccaagaaaataaaaaatttaaaaatcaaaaacccatgc

SEQ ID NO: 379326 - DNA, 2101 bp, Homo sapiens
ggttggggccattcagggctgtgggcccatgtggactggatgcccagcgtgagtgtataccgtgagggcctttgagctctcggacagcgtggagtggtcaaggaaggcctccaggaggaagaggtggccaaccgccccaggcagcacagtgctgtctctggacggagggacgggaagtggccagaaggggaagtgtgaggagttcccgtccagcctgtcatcagtctccccaggtcttgaagcggcggccctgctcctggccgtgaccatggaccctctggagacccctatcaaggatggcatcctctaccagcagcatgtcaagtttggcaaggggacaggggaggcctcctcaggatccacagatgcccagtctcccaagaggggcctggtccccatggaggaaaactccatctactcctcctggcaggaagtgggcgagtttcccgtggtggtgcagaggactgaggccgccacccgctgccagctgaaggggccggccctgctggtgctgggcccagacgccatccagctgagggaggccaagggcacccaggccctctacagctggccctaccacttcctgcgcaagttcggctccgacaagatacttctgggaaccccaggcgtcagtctcctcatctgtaaaggagagagaaccgatgacgtatcaggcataatccttgatgagagtttgctgcgtgcctactcagtgccaggcgctgggggacacagccgtgttcaggacagccttggtcctgttctccgggagccgacattccagggggagagaagtttcctgaagacttccatgctgcgttccctctgctcctgctcctggcgccatcctaggagccagccatgcacgcaagcgtcatgcctccagggctctgactgcccagcccctcaccgcaactccacctcagctgcacacacccttggcacatcctgaacctcattttcatgacggacacacaatttttgctctctcctgtccaagcctcatcctctggccgccacctccttccagctcacttcctttagtgcggccagtaccgcccctgcctaggcatgtcgacctgcagggacccttttctggctcttcgaggcctctgcccaccatcccctctttgttctccatagtcccttccccctgttctctctcgtttcatcttactggtctggcaaagtccccggccttgggcgagcccagacctcctcagtgcctgcacacagctgcccacagccagagaaatccatttaagcagactgcctgcatccttcttaacagtgcaaggcaggcactccctgccacaagagaccctgttccctagtagggcagcttttctcctccccagaacctcctgtctatccccacccaatgtctcctcacaggcatattggggaaacaggtcaggctctcccaccgtatctgcaagtgtactggcatccatctgtcttcttcctacccctacagtagaaacagtgtctgtccccagctgtgctctgatcccggctcctttcacctcagagcttggaaaattgagctgtccccactctctcctgcgcccattcatcctaccagcagcttttccagccacacgcaaacatgctctgtaatttcacattttaaaccttcccttgacctcacattcctcttcggccacctctgtttctctgttcctcttcacagcaaaaactgttcaaaagagttgttgattactttcatttccactttctcacccccattctcccctcaattaactctccttcatccccatgatgccattatgtggcttttattagagtcacgaaccttattctccaaaacaaaagcaacaaggactttgacttctcagcagcactcagctctggttcttgaaacacccccgttacttgctattcctcctacctcataacaatctccttcccagcctctactgctgccttctctgagttcttcccagggtcctaggctcagatgtagtgtagctcaaccctgctacacaaagaatctcctgaaagcctgtaaaaatgtccatgcatgttctgtgagtgatctaccaagaaaataaaaaatttaaaaatcaaaaacccatgc

SEQ ID NO: 379327 - DNA, 530 bp, Homo sapiens
ctcttttttctttctcattaggattactctgcccctcagcggttccagtgccctcaaagcaatctgtctctgaagtactggctatcttctgagcgtgtgccagaagatccagctttgttgaaaagcgaagccgttagtcccttaatacaaaggagacaaattgatttatgcctggggcaccatcaccaaaagaagaggaaatggatgcaagccttcccagaacaacaggtgcagtaaagaagctggccaaaacccaccaaaaccaagatggtgaagagagtgacctttggttgttttcactgctacactccgaccagcaccatgacagtttacaaatgctacagcaatgtcaggaagctaccccatacagtctaaaaaggggaggaatgaataatcgaccccttgtttagcaaatcatcaagaaataaccataaaaatgggcaaccagcagccctcagggctgctctgcctatggagtagccattcctcttattcttttactttcttaataaacatgctttcactttaaa

SEQ ID NO: 379328 - DNA, 1931 bp, Homo sapiens
tggccggctcgggattccgggctttcttcccgagaccgcgtcccccagctgggccgaaggtggacgctcaggggctggaggctcagcggaatcccctgcgttcagtagccccgctctcccctgtcccgaaggattactctgcccctcagcggttccagtgccctcaaagcaatctgtctctgaagtactggctatcttctgagcgtgtgccagaagatccagctttgttgaaaagcgaagccgttagtcccttaatacaaaggatcagggatagcagaaatgaaagtataatggaagcagctggaggattccaggtccactttcacccaagtaatggagacggaaggttcatcgaaacttcttcagctgcagatctagaagtcattagctattctagcaaagtatctgtcacagaaaggtgcttcataaaggtctgcactgtgctcttttgacctgtgtcttcaagcatgtgctgtcataacagattaaagatgactgaaaattatctgccactcattgcgtgaaaggtgggatctgtagacctccctcttgaatttgggagggttctgtgactgctgtgaccaatgaatatggcagaagtgacgctttgccaacttctgggtccaggctatacgagacaggcagttccactcactgtctcttagatccatgtaaaaagttcatctaccctgctggaaaaaccatgtagagaggccctgagactacattgggtgggagaggggctcagctgcaccatcttccaactgtccccatcaagatgacagaaatataaatgaagccttcttgaactccagaccatccatgctacaagctaaatgccaccaagcgaccccagttaataccatgtggagcaaaaatatcacttaaccaagcactgcctgagtttctgaccccacagaattctgaccccatacaaataaaataatttttgtaattttttataattcgtcatgtaatagataaatggaacagccttcttccagtcttttaaatagctgcaagaaatcttattcaagcagaaggaagtttctactttgttcatacagtctcaagacatccctggagcctttcaagggaaatttgggcagaagtaggtagagaggtaaagctattatgtaacattacttaacatgattaaaaccaccttaatgtctcccatcctcaaaggctgccagtgaattggaaattaatggattaaatgaggacagagaaactagtatttgtgcatatgcactgtgccaggtatttaacgtatcttagctcatgtggtcttcgaaacaaccccatattgtagtatcaggctcacacgggtaactaactagtgcaaagacacaaggctcacaaactgctacttgaccctagagctctttgactccgattcccatgtacgtgccccaataccatgttgactcccaaggtgtaaatcttcaggtatacaaactattaaaatgtgaattttcatttatacgcaatttttgcttatgatatgttttttgtcacttgcataataatagatatgtaactttaaatcagcaatattatactggctatcaaccagtttcatgtaaatttttctaacagaaagaatgtagcattgaaatgtgtacatttttgtccaagtacacctggcaattgaaagaaaaaatccaagccacttggatgcttgattttgtgatttttttttatacacttccttataagaattttttttaggtattgaatttgcaactacaaaacctgattttcctcccggttctgtccctttctagtaatgagacattggacaagtcacttcacttcccagagctttagtttcctcactagttagtggaggccaagagttagctctaagagtgtgagaattattaataaatgagataatgtattttaaaatatttttaaactacaaa

SEQ ID NO: 379329 - DNA, 415 bp, Homo sapiens
ccctatggctgctctctggaatctttttcaccctctgggttcctcatctccccctttcggctccccagcttcaaaggtgccccgccaggaattgtacgtgcagacccccagcttaaaggcaggcggccacacccggccagcgagtgtcgcccaggcacctgcttctgtcgggcggacccacccttccaggcggttccggcgcgctgtgcctccgcaggctgctcactaagagcgcggcggcctggaacccagtagcgcgcgggtgtggtgagcgctacgcttctcggcgtctgccaggacagggtcggggatctagagatgccgcccaggaggtgttgggcgccaggggaaagagaagagcctggcacggaagagacaaggtcttctctgttgcagctgcagcagctaggtagcc

SEQ ID NO: 379330 - DNA, 3502 bp, Homo sapiens
cggccggtcaggaacccaacaattagtcccttctcgtccgagaggaaactctgtgagaagatgggaccgtgagcactctctttaacaaggacatttccttttcagcgaaagcagcgctctgatttaccaagtctggcggaccgcagcgctttaaaggaatgaggttccagcggtcgcgccaagcagcgtacgcagcctattttaagttatgctaccttcgccacagaaaccaagaacgttgtaatggtccggcaagtgcccacgtgtaattgttctccatcacttacccactctagttcgggaacacccttgtcgccgccgttccggtaacacctctccaacgctttcgatgcttctacttcttcgggaacaagacaagatggcgcccgatttgtctcacccggaagtaaagaataataacatccgtttgtcatctgaagccataccatctctcatccaggtttgtgaacacgtgattgtgcggattgacatgtttcggcgccattttttttgtgggcaaaaccatctctactctggtcaacaccgggcaactgaaccattcctgcacgttactttttaacgtagctggcgccattcccgacccatctttatagtggccagaaagccaagaacgtaagtgttctacacatagggcgccttcaaattttttactttagcaacgtgatcttcctttaaggggaagtatgttccctcctagaaacactcccgccttggagaaggggttgagttcgcaactccacttacagactacggaggaaccccagggtcaaaccaaaccaaaccaattctggccagttgcttagcgcagttcaagttacttagtgcgctggaagcggcatttcaggcaatccaacttctggctcgaaccttctcggagtattccaaggatggaatactctcacttgagcgctgccgagggtgccgcttgaggaaaacgtgagtttgtgaaggtgagcagtctgggtcggtagcgaaagcggagaccttagctgaccccgcagctgtctttctctttgttaacctcaacacatcgcgcccccttccgggaacacttgctcttctctccttggcttaactagtcccggtttttcattctttatccgtgacctttagggaaccgtgggggggaagtctggtttccgtcctgctgctttccttcaactacaagatggcttctcaaaaggacgcatgcaatgccattcctcaaagacagtatgttgatttcacagtgtttttatatgaacaacgttcaagtgtcaaaagtatcaatttccaggctaggagctacaagttaaaaggaaaacaaaaatgttccaaagatacagtgtttattagctacatcttgggaagtgcctttccagagagtaacatgaaaacttctgcgtgacaaagtgcacgaagtatctgaattatttcattgggcaattgtcgtgcaaaagaaatagcaaattaccgtagaaacaaaatagtaagagcacagctagatggataaagatacagatgtgaaaatatagatgccctttgcatgaaaattcagttttcctcagcactagagacccagatactcctgaattagcattataataaagtcgtcactagctaaccatctgcctttcctccaatccacggacgtggtcctcaaaataacattttatcttgtgagaaaccttcattaattacacctaacaacaccatgacgcaggttcatgaggatactactgaaggcaaaaggaaatccctatttctctgaccctttccctaatttccacttagcacaaataagactactggacagtctgattttaaaaaatcactgtatgggccgggcttggtggctcccgcctgtaatcccagcactttgggaggccgaggcgggcagatcacttgaggtcaggagttcaagaccagcctggccaacatggtgaaaccccgtctctactaaaaatacaaaaattacctgggcgtggtggcaggcgcctgtaatcctagctactaggggggctgaggcaggagaattgcttgaactcagggtcagaggtcgcagtgagccgagatccctccactgcactccagcctgggcaacagagtgagtctctgtctcaaaagaataaaataaataaaaaccactgtatggagcaaaaactagaaggacatataccacatgttatcagtaatctctaattttgctctgtgattttgtgcattttccaagttttttgcatcaggtctgattttcaagtttaattctctgagaaacattctcatcagaggaatgttctatcttcttagagaaacctgattggcctagtgaaactgtcatgttcctactctctataatcatattgtaattctttgcttgtttccctagtaaaggtgaggcaattttcgggtaagggatttccccctcacctctgccctccaagtggccagcatctgctttgcacacagaaatttttacatctgctatatgtttgcattaatatgttcaacaatgatcctaatgtaggccagtcattttggaaatgcattgtgaagtggagaggattattaaatacctcacattttgttccttgtgccagtttaatgagacaccctcagcaattgctatttaccagaccagaaaatgaattttacagttccaattccagttccctttctctaaccactctgttctaagagttccccgtaacattatgatcttatggacacatcaggtaagtgtatgtatttcaacacagaattttctaagaatgtgtgttgtggtgttaaatttctatgtaagcagctgtcacgtgcatgatctgctgcagtttgatcatcctgcgcctggatcatcaaatgcttagcagccatcattttaccagtcttatctgacaatctgctgttaatgactaacaaccaggggactttataggttaaaatttttattaacttcctctgttttcagtgtttaaagtagaaaatttggccaatgtggctcacgcctgtaatgccaatactttgggaggccaaggagggtggatcacctgaggccaggagtctgagactagcctggccaccatggggaaactgcctacaaaaaaatacaaaaattagctgggtgtggtggcccagctactcaggaggctgatgcatgagaatcacttgaacccgggaggtggaagttgtagtgagccgagatcgtgccactgcattccagcctgtgctacacagcgagactctgtctcaatgaatgaatgaatgaatgaatgaatgaatggagtgaagtagaaaattctaggggaggacatgtcaccttccattattacagaaacaaattatccttaaagcaaaatggaaataagctaagtaagatgatatgtggaaaatatatcgaaataggaactattgctgtttcttgagatttgaacctttatagtgttattaggtgccatatcacatccatcttaaaacctaataaaaatttaaagctgtggtatat

SEQ ID NO: 379331 - DNA, 1832 bp, Homo sapiens
aatttcgggagggaaaatcgaggcacacagaggtaaatcacttgcccagggtcacaaagtagagtaaaactaaggggtagggatgcccgcgggagtcatttaagaacttaaacttaggaactaaaacattttcaaatgtggggaaatttcactttcaagaaagctagaaatgaaccacctcacagtatcaaagactagaatatttatgtttttaaaagtaatctgaattctcgttttttttgtttgtttgttttaaatgagggactcattctgtcacccaggctggagtgcagtggcgtgatcacagctcattgcagtcttgacctcctgggctcaagcatcttccccactcagcctcccaacagcatgagccaccatgcctggctaacaaattgataccaactatcactcttctcagctacctaaaaaggtggtcttcacaagttttaagaacattaaatgacaatattggcacataatcaatattttatcattttatatttggaaaaaaacgggaagctggggtaaaccagtttctaaataaagctaatgaaactttaattcattcaaacactatggtagttatgttgatgataagtaaacattattatttatttatactgtttcctgaggtgatccagaaactactgttattatagtagacttgctactatatacatttactatccctgcaaatgtgctttggaaataataacaaaaattttaaggtagacccatgtgtaatttaacatgctttctctgttacaaaagctatctttaggaaattcttaagtatcaaaaatccaatttattccattttcagaagacaaggaaaaagcactcataaactctaggccataaaaaaataggtttcataagtagctcctttaacatgaagaaaatgacaataaaaatatcttacttgcatgttacttctggaataatgtcaaaaatctatgtagatctttccattttaaatgatgttaaaatagtgtcagcactgtgactgactcatagcaagtatgggtatctatccaaatatttgtctttgaaacaagaaacaagtgaccatccgatgaaaagtgcatgcctcttaacagtatctttctgtaagaaaaattaggtgatctatatttacatttgggcagtggggggatgaaaactgctcttaccaagatggctgacttgaataaagacagtcaatatttttcaaaaaattcactgctctggtactgagatctccatgataacagattacagttaaacagaaaatgctgtgaaataccttttacagaacacagcctgactttgcagattaacttaaagatatatttcttgattatttcactgttaaaaatcaagaaaaacactactaacatttcaacatcttaaaaatagaatttatgcaatgacatttttaagctctgcattttgtatactattaccgtctttaattacagttatgttcatccatatatcaaaaggcagcactggtaaccttgataacattatatatgcttatgtgtttaagacagtcttgattaaatatttccataccttatctgcagccactattcttatcctttcttcccaggaggagaatgaagtgggactaggcatttacctggcacttgcctgcactatcattcattggcactaatgattaggatgcttgaaccatgcagttttgtttctatttcaacaatatgacactgaagtagccattatcttttgatatttaagcctaagtaatagtatattcttcatgccaagttttgacagctcaataatttgtattctagaggggaaaaatgatatttttgctattattt

SEQ ID NO: 379332 - DNA, 4339 bp, Homo sapiens
cggccggtcaggaacccaacaattagtcccttctcgtccgagaggaaactctgtgagaagatgggaccgtgagcactctctttaacaaggacatttccttttcagcgaaagcagcgctctgatttaccaagtctggcggaccgcagcgctttaaaggaatgaggttccagcggtcgcgccaagcagcgtacgcagcctattttaagttatgctaccttcgccacagaaaccaagaacgttgtaatggtccggcaagtgcccacgtgtaattgttctccatcacttacccactctagttcgggaacacccttgtcgccgccgttccggtaacacctctccaacgctttcgatgcttctacttcttcgggaacaagacaagatggcgcccgatttgtctcacccggaagtaaagaataataacatccgtttgtcatctgaagccataccatctctcatccagaatgtttgttgcagatacagttccaccactctacattaagtatgtggaaaacagaagatatccttttggttcctgggtctccagaacagtaggagcaaacatccaaatctgatatagcacttccagagagcctggtcttggaggataaaactttaccttgatgggacttttggccccggtcccttaagagttgggatttggggttgtactgcagcacaactcagcctatcctaatacatatgggaatgcaaacatctcagatatttcttcttgggtgcaatttaaaatacgtatgaaatggcttcagaagtgtccatgaaccttcaaaattacatacaagaattagggagatacatttttctgggaacatacagatgttaagacttcccttctccgtctctatattgccagaagagagggccccagaattaaaaccccatccttcctacaacactcagctttctctttcaggaatatcagtactaatatcaccatgccttttatctctaggatatcttcatcccctgtaccttaatttctgcatgacttcatagggagtccatattgcttgatttttctccatatcattaccattgacataaattttccttacattcttagaatgtgtatttcctcacctttttagatttcctggctcttatgttgactgctgtatccctagtacctaccacacaacaggtattcaacaaatacttttttttttttgagacagtctctgtcacccaggctggagtgcagtggtactatcttggctcagtgcaacctctgcctcccgggttcaagcgattctcctgcctcagcctcccaagtagcagggattacaggcctgtgccaccatgcccagctaatttttgtatttttagtagagatgggtttttgtcatgttggccaggctggtctcgaactcctggtctcaggtgatttgcccactttggccacccaaagtgctgggattacaggcatgagccactgtgcctggcctaaaaaatacttactaaatgactaaacaaataaaagatagtctctaactttcatcataatctcaaagagcttcatgatctggaagaagtttagacacaaatgggtaggcaaagtatttcttaattgctggtgcaagaccttacccttgtcttaataattatcctgtctaagtaatacaccttttaagaaacccctgaaaggaagatgatcgtccttggtagatactgaaatctgaggtaaagtggcccataaactgttttgaaatagagaatttctaaaatatgtagggtattttgaatatagctgagaaagctgctatgaactgaaggtttacgtcccctacaacattcacaaatcccaaatgtgatggtatttggagatagggcctttgagaagtgattaggtcatgaggatggaaccctcatgaatgggctgcatggaaaaggacccacagagatgccttgtacttttcccatgtgaggacacagcaagaaagcactgtctttatgaacagaagtgggccctcaccagaccccaagtctactggcaccttgatcttgaagttcccagctcccagaactgtgagaaataaatttttgttaatacaccacaaagttgatggtattttattatagcagcctgagtggactaagacataagcaaatgcattgttgataaaacattctgtcaataacgtaaactgtgaaaattccaggaccaatcttgtaacatgagataaataagaatatttattatgcatgttttatacagtaacaccaaaataacgctcaataagttacacagctgttttctagaaacatggcaaaagaaaaaaaacagtaggaataatatgtattactcaaaattgaaaatatggtcatcttttaaacagatttgaattcatgatttctacgtaaacaaaaacatcataaatatctagaaataatcttttttaacaatgcactagatactatctaaaggctcaattttattgcacatatttggtttaggcttatttgatcaatacatgcagaaaaataaattacaaacgtgaatttttaaaaggaatcaggatgtcattttgtactacaaaaattagatgagggttgatacatttcacagcttaatcttcagaaaattttcttcagctattgcataaaatcactgattaaaatcatcacacatggaagctaagaactattaaatacagtaaaatagctctgttggtacatttaaaataagagaacaggcatcaactattctttgaattgataccaactgtcttctttttatttatttttgagacagggtctcactccgtcactctgcaggaatgcagtggtgtgatcatggttcactgcaccttgacctcctgggctcaagcatcttccccactcagcctcccaacagcatgagccaccatgcctggctaacaaattgataccaactatcactcttctcagctacctaaaaaggtggtcttcacaagttttaagaacattaaatgacaatattggcacataatcaatattttatcattttatatttggaaaaaaacgggaagctggggtaaaccagtttctaaataaagctaatgaaactttaattcattcaaacactatggtagttatgttgatgataagtaaacattattatttatttatactgtttcctgaggtgatccagaaactactgttattatagtagacttgctactatatacatttactatccctgcaaatgtgctttggaaataataacaaaaattttaaggtagacccatgtgtaatttaacatgctttctctgttacaaaagctatctttaggaaattcttaagtatcaaaaatccaatttattccattttcagaagacaaggaaaaagcactcataaactctaggccataaaaaaataggtttcataagtagctcctttaacatgaagaaaatgacaataaaaatatcttacttgcatgttacttctggaataatgtcaaaaatctatgtagatctttccattttaaatgatgttaaaatagtgtcagcactgtgactgactcatagcaagtatgggtatctatccaaatatttgtctttgaaacaagaaacaagtgaccatccgatgaaaagtgcatgcctcttaacagtatctttctgtaagaaaaattaggtgatctatatttacatttgggcagtggggggatgaaaactgctcttaccaagatggctgacttgaataaagacagtcaatatttttcaaaaaattcactgctctggtactgagatctccatgataacagattacagttaaacagaaaatgctgtgaaataccttttacagaacacagcctgactttgcagattaacttaaagatatatttcttgattatttcactgttaaaaatcaagaaaaacactactaacatttcaacatcttaaaaatagaatttatgcaatgacatttttaagctctgcattttgtatactattaccgtctttaattacagttatgttcatccatatatcaaaaggcagcactggtaaccttgataacattatatatgcttatgtgtttaagacagtcttgattaaatatttccataccttatctgcagccactattcttatcctttcttcccaggaggagaatgaagtgggactaggcatttacctggcacttgcctgcactatcattcattggcactaatgattaggatgcttgaaccatgcagttttgtttctatttcaacaatatgacactgaagtagccattatcttttgatatttaagcctaagtaatagtatattcttcatgccaagttttgacagctcaataatttgtattctagaggggaaaaatgatatttttgctattattt

SEQ ID NO: 379333 - DNA, 2804 bp, Homo sapiens
cggccggtcaggaacccaacaattagtcccttctcgtccgagaggaaactctgtgagaagatgggaccgtgagcactctctttaacaaggacatttccttttcagcgaaagcagcgctctgatttaccaagtctggcggaccgcagcgctttaaaggaatgaggttccagcggtcgcgccaagcagcgtacgcagcctattttaagttatgctaccttcgccacagaaaccaagaacgttgtaatggtccggcaagtgcccacgtgtaattgttctccatcacttacccactctagttcgggaacacccttgtcgccgccgttccggtaacacctctccaacgctttcgatgcttctacttcttcgggaacaagacaagatggcgcccgatttgtctcacccggaagtaaagaataataacatccgtttgtcatctgaagccataccatctctcatccaggtttgtgaacacgtgattgtgcggattgacatgtttcggcgccattttttttgtgggcaaaaccatctctactctggtcaacaccgggcaactgaaccattcctgcacgttactttttaacgtagctggcgccattcccgacccatctttatagtggccagaaagccaagaacgtaagtgttctacacatagggcgccttcaaattttttactttagcaacgtgatcttcctttaaggggaagtatgttccctcctagaaacactcccgccttggagaaggggttgagttcgcaactccacttacagactacggaggaaccccagggtcaaaccaaaccaaaccaattctggccagttgcttagcgcagttcaagttacttagtgcgctggaagcggcatttcaggcaatccaacttctggctcgaaccttctcggagtattccaaggatggaatactctcacttgagcgctgccgagggtgccgcttgaggaaaacgtgagtttgtgaaggtgagcagtctgggtcggtagcgaaagcggagaccttagctgaccccgcagctgtctttctctttgttaacctcaacacatcgcgcccccttccgggaacacttgctcttctctccttggcttaactagtcccggtttttcattctttatccgtgacctttagggaaccgtgggggggaagtctggtttccgtcctgctgctttccttcaactacaagatggcttctcaaaaggacgcatgcaatgccattcctcaaagacaagggtctcactccgtcactctgcaggaatgcagtggtgtgatcatggttcactgcaccttgacctcctgggctcaagcatcttccccactcagcctcccaacagcatgagccaccatgcctggctaacaaattgataccaactatcactcttctcagctacctaaaaaggtggtcttcacaagttttaagaacattaaatgacaatattggcacataatcaatattttatcattttatatttggaaaaaaacgggaagctggggtaaaccagtttctaaataaagctaatgaaactttaattcattcaaacactatggtagttatgttgatgataagtaaacattattatttatttatactgtttcctgaggtgatccagaaactactgttattatagtagacttgctactatatacatttactatccctgcaaatgtgctttggaaataataacaaaaattttaaggtagacccatgtgtaatttaacatgctttctctgttacaaaagctatctttaggaaattcttaagtatcaaaaatccaatttattccattttcagaagacaaggaaaaagcactcataaactctaggccataaaaaaataggtttcataagtagctcctttaacatgaagaaaatgacaataaaaatatcttacttgcatgttacttctggaataatgtcaaaaatctatgtagatctttccattttaaatgatgttaaaatagtgtcagcactgtgactgactcatagcaagtatgggtatctatccaaatatttgtctttgaaacaagaaacaagtgaccatccgatgaaaagtgcatgcctcttaacagtatctttctgtaagaaaaattaggtgatctatatttacatttgggcagtggggggatgaaaactgctcttaccaagatggctgacttgaataaagacagtcaatatttttcaaaaaattcactgctctggtactgagatctccatgataacagattacagttaaacagaaaatgctgtgaaataccttttacagaacacagcctgactttgcagattaacttaaagatatatttcttgattatttcactgttaaaaatcaagaaaaacactactaacatttcaacatcttaaaaatagaatttatgcaatgacatttttaagctctgcattttgtatactattaccgtctttaattacagttatgttcatccatatatcaaaaggcagcactggtaaccttgataacattatatatgcttatgtgtttaagacagtcttgattaaatatttccataccttatctgcagccactattcttatcctttcttcccaggaggagaatgaagtgggactaggcatttacctggcacttgcctgcactatcattcattggcactaatgattaggatgcttgaaccatgcagttttgtttctatttcaacaatatgacactgaagtagccattatcttttgatatttaagcctaagtaatagtatattcttcatgccaagttttgacagctcaataatttgtattctagaggggaaaaatgatatttttgctattattt

SEQ ID NO: 379334 - DNA, 3710 bp, Homo sapiens
cggccggtcaggaacccaacaattagtcccttctcgtccgagaggaaactctgtgagaagatgggaccgtgagcactctctttaacaaggacatttccttttcagcgaaagcagcgctctgatttaccaagtctggcggaccgcagcgctttaaaggaatgaggttccagcggtcgcgccaagcagcgtacgcagcctattttaagttatgctaccttcgccacagaaaccaagaacgttgtaatggtccggcaagtgcccacgtgtaattgttctccatcacttacccactctagttcgggaacacccttgtcgccgccgttccggtaacacctctccaacgctttcgatgcttctacttcttcgggaacaagacaagatggcgcccgatttgtctcacccggaagtaaagaataataacatccgtttgtcatctgaagccataccatctctcatccaggtttgtgaacacgtgattgtgcggattgacatgtttcggcgccattttttttgtgggcaaaaccatctctactctggtcaacaccgggcaactgaaccattcctgcacgttactttttaacgtagctggcgccattcccgacccatctttatagtggccagaaagccaagaacgtaagtgttctacacatagggcgccttcaaattttttactttagcaacgtgatcttcctttaaggggaagtatgttccctcctagaaacactcccgccttggagaaggggttgagttcgcaactccacttacagactacggaggaaccccagggtcaaaccaaaccaaaccaattctggccagttgcttagcgcagttcaagttacttagtgcgctggaagcggcatttcaggcaatccaacttctggctcgaaccttctcggagtattccaaggatggaatactctcacttgagcgctgccgagggtgccgcttgaggaaaacgtgagtttgtgaaggtgagcagtctgggtcggtagcgaaagcggagaccttagctgaccccgcagctgtctttctctttgttaacctcaacacatcgcgcccccttccgggaacacttgctcttctctccttggcttaactagtcccggtttttcattctttatccgtgacctttagggaaccgtgggggggaagtctggtttccgtcctgctgctttccttcaactacaagatggcttctcaaaaggacgcatgcaatgccattcctcaaagacagtatgttgatttcacagtgtttttatatgaacaacgttcaagtgtcaaaagtatcaatttccaggctaggagctacaagttaaaaggaaaacaaaaatgttccaaagatacagtgtttattagctacatcttgggaagtgcctttccagagagtaacatgaaaacttctgcgtgacaaagtgcacgaagtatctgaattatttcattgggcaattgtcgtgcaaaagaaatagcaaattaccgtagaaacaaaatagtaagagcacagctagatggataaagatacagatgtgaaaatatagatgccctttgcatgaaaattcagttttcctcagcactagagacccagatactcctgaattagcattataataaagtcgtcactagctaaccatctgcctttcctccaatccacggacgtggtcctcaaaataacattttatcttgtgagaaaccttcattaattacacctaacaacaccatgacgcaggttcatgaggatactactgaaggcaaaaggaaatccctatttctctgaccctttccctaatttccacttagcacaaataagactactggacagtctgattttaaaaaatcactgtatgggccgggcttggtggctcccgcctgtaatcccagcactttgggaggccgaggcgggcagatcacttgaggtcaggagttcaagaccagcctggccaacatggtgaaaccccgtctctactaaaaatacaaaaattacctgggcgtggtggcaggcgcctgtaatcctagctactaggggggctgaggcaggagaattgcttgaactcagggtcagaggtcgcagtgagccgagatccctccactgcactccagcctgggcaacagagtgagtctctgtctcaaaagaataaaataaataaaaaccactgtatggagcaaaaactagaaggacatataccacatgttatcagtaatctctaattttgctctgtgattttgtgcattttccaagttttttgcatcaggtctgattttcaagtttaattctctgagaaacattctcatcagaggaatgttctatcttcttagagaaacctgattggcctagtgaaactgtcatgttcctactctctataatcatattgtaattctttgcttgtttccctagtaaaggtgaggcaattttcgggtaagggatttccccctcacctctgccctccaagtggccagcatctgctttgcacacagaaatttttacatctgctatatgtttgcattaatatgttcaacaatgatcctaatgtaggccagtcattttggaaatgcattgtgaagtggagaggattattaaatacctcacattttgttccttgtgccagtttaatgagacaccctcagcaattgctatttaccagaccagaaaatgaattttacagttccaattccagttccctttctctaaccactctgttctaagagttccccgtaacattatgatcttatggacacatcaggtaagtgtatgtatttcaacacagaattttctaagaatgtgtgttgtggtgttaaatttctatgtaagcagctgtcacgtgcatgatctgctgcagtttgatcatcctgcgcctggatcatcaaatgcttagcagccatcattttaccagtcttatctgacaatctgctgttaatgactaacaaccaggggactttataggttaaaatttttattaacttcctctgttttcagtgtttaaagtagaaaatttggccaatgtggctcacgcctgtaatgccaatactttgggaggccaaggagggtggatcacctgaggccaggagtctgagactagcctggccaccatggggaaactgcctacaaaaaaatacaaaaattagctgggtgtggtggcccagctactcaggaggctgatgcatgagaatcacttgaacccgggaggtggaagttgtagtgagccgagatcgtgccactgcattccagcctgtgctacacagcgagactctgtctcaatgaatgaatgaatgaatgaatgaatgaatggagtgaagtagaaaattctaggggaggacatgtcaccttccattattacagaaacaaattatccttaaagcaaaatggaaataagctaagtaagatgatatgtggaaaatatatcgaaataggaactattgctgtttcttgagatttgaacctttatagtgttattaggtgccatatcacatccatcttaaaacctaataaaaatttaaagctgtggtatatatatacaattgaatattattcagccttaaaagggaatgaaattctgatacatgctacaatatggataaaccttgaaaacatgcaagatgaaataaaccagacacaaaaggacatatattgtacaatttcacttatatgaagcgcctagaatgggcaaattcacacagatggagagtagaatagaggttcccaggagttgggagaaggc

SEQ ID NO: 379335 - DNA, 4850 bp, Homo sapiens
cggccggtcaggaacccaacaattagtcccttctcgtccgagaggaaactctgtgagaagatgggaccgtgagcactctctttaacaaggacatttccttttcagcgaaagcagcgctctgatttaccaagtctggcggaccgcagcgctttaaaggaatgaggttccagcggtcgcgccaagcagcgtacgcagcctattttaagttatgctaccttcgccacagaaaccaagaacgttgtaatggtccggcaagtgcccacgtgtaattgttctccatcacttacccactctagttcgggaacacccttgtcgccgccgttccggtaacacctctccaacgctttcgatgcttctacttcttcgggaacaagacaagatggcgcccgatttgtctcacccggaagtaaagaataataacatccgtttgtcatctgaagccataccatctctcatccaggtttgtgaacacgtgattgtgcggattgacatgtttcggcgccattttttttgtgggcaaaaccatctctactctggtcaacaccgggcaactgaaccattcctgcacgttactttttaacgtagctggcgccattcccgacccatctttatagtggccagaaagccaagaacgtaagtgttctacacatagggcgccttcaaattttttactttagcaacgtgatcttcctttaaggggaagtatgttccctcctagaaacactcccgccttggagaaggggttgagttcgcaactccacttacagactacggaggaaccccagggtcaaaccaaaccaaaccaattctggccagttgcttagcgcagttcaagttacttagtgcgctggaagcggcatttcaggcaatccaacttctggctcgaaccttctcggagtattccaaggatggaatactctcacttgagcgctgccgagggtgccgcttgaggaaaacgtgagtttgtgaagaatgtttgttgcagatacagttccaccactctacattaagtatgtggaaaacagaagatatccttttggttcctgggtctccagaacagtaggagcaaacatccaaatctgatatagcacttccagagagcctggtcttggaggataaaactttaccttgatgggacttttggccccggtcccttaagagttgggatttggggttgtactgcagcacaactcagcctatcctaatacatatgggaatgcaaacatctcagatatttcttcttgggtgcaatttaaaatacgtatgaaatggcttcagaagtgtccatgaaccttcaaaattacatacaagaattagggagatacatttttctgggaacatacagatgttaagacttcccttctccgtctctatattgccagaagagagggccccagaattaaaaccccatccttcctacaacactcagctttctctttcaggaatatcagtactaatatcaccatgccttttatctctaggatatcttcatcccctgtaccttaatttctgcatgacttcatagggagtccatattgcttgatttttctccatatcattaccattgacataaattttccttacattcttagaatgtgtatttcctcacctttttagatttcctggctcttatgttgactgctgtatccctagtacctaccacacaacaggtattcaacaaatacttttttttttttgagacagtctctgtcacccaggctggagtgcagtggtactatcttggctcagtgcaacctctgcctcccgggttcaagcgattctcctgcctcagcctcccaagtagcagggattacaggcctgtgccaccatgcccagctaatttttgtatttttagtagagatgggtttttgtcatgttggccaggctggtctcgaactcctggtctcaggtgatttgcccactttggccacccaaagtgctgggattacaggcatgagccactgtgcctggcctaaaaaatacttactaaatgactaaacaaataaaagatagtctctaactttcatcataatctcaaagagcttcatgatctggaagaagtttagacacaaatgggtaggcaaagtatttcttaattgctggtgcaagaccttacccttgtcttaataattatcctgtctaagtaatacaccttttaagaaacccctgaaaggaagatgatcgtccttggtagatactgaaatctgaggtaaagtggcccataaactgttttgaaatagagaatttctaaaatatgtagggtattttgaatatagctgagaaagctgctatgaactgaaggtttacgtcccctacaacattcacaaatcccaaatgtgatggtatttggagatagggcctttgagaagtgattaggtcatgaggatggaaccctcatgaatgggctgcatggaaaaggacccacagagatgccttgtacttttcccatgtgaggacacagcaagaaagcactgtctttatgaacagaagtgggccctcaccagaccccaagtctactggcaccttgatcttgaagttcccagctcccagaactgtgagaaataaatttttgttaatacaccacaaagttgatggtattttattatagcagcctgagtggactaagacataagcaaatgcattgttgataaaacattctgtcaataacgtaaactgtgaaaattccaggaccaatcttgtaacatgagataaataagaatatttattatgcatgttttatacagtaacaccaaaataacgctcaataagttacacagctgttttctagaaacatggcaaaagaaaaaaaacagtaggaataatatgtattactcaaaattgaaaatatggtcatcttttaaacagatttgaattcatgatttctacgtaaacaaaaacatcataaatatctagaaataatcttttttaacaatgcactagatactatctaaaggctcaattttattgcacatatttggtttaggcttatttgatcaatacatgcagaaaaataaattacaaacgtgaatttttaaaaggaatcaggatgtcattttgtactacaaaaattagatgagggttgatacatttcacagcttaatcttcagaaaattttcttcagctattgcataaaatcactgattaaaatcatcacacatggaagctaagaactattaaatacagtaaaatagctctgttggtacatttaaaataagagaacaggcatcaactattctttgaattgataccaactgtcttctttttatttatttttgagacagggtctcactccgtcactctgcaggaatgcagtggtgtgatcatggttcactgcaccttgacctcctgggctcaagcatcttccccactcagcctcccaacagcatgagccaccatgcctggctaacaaattgataccaactatcactcttctcagctacctaaaaaggtggtcttcacaagttttaagaacattaaatgacaatattggcacataatcaatattttatcattttatatttggaaaaaaacgggaagctggggtaaaccagtttctaaataaagctaatgaaactttaattcattcaaacactatggtagttatgttgatgataagtaaacattattatttatttatactgtttcctgaggtgatccagaaactactgttattatagtagacttgctactatatacatttactatccctgcaaatgtgctttggaaataataacaaaaattttaaggtagacccatgtgtaatttaacatgctttctctgttacaaaagctatctttaggaaattcttaagtatcaaaaatccaatttattccattttcagaagacaaggaaaaagcactcataaactctaggccataaaaaaataggtttcataagtagctcctttaacatgaagaaaatgacaataaaaatatcttacttgcatgttacttctggaataatgtcaaaaatctatgtagatctttccattttaaatgatgttaaaatagtgtcagcactgtgactgactcatagcaagtatgggtatctatccaaatatttgtctttgaaacaagaaacaagtgaccatccgatgaaaagtgcatgcctcttaacagtatctttctgtaagaaaaattaggtgatctatatttacatttgggcagtggggggatgaaaactgctcttaccaagatggctgacttgaataaagacagtcaatatttttcaaaaaattcactgctctggtactgagatctccatgataacagattacagttaaacagaaaatgctgtgaaataccttttacagaacacagcctgactttgcagattaacttaaagatatatttcttgattatttcactgttaaaaatcaagaaaaacactactaacatttcaacatcttaaaaatagaatttatgcaatgacatttttaagctctgcattttgtatactattaccgtctttaattacagttatgttcatccatatatcaaaaggcagcactggtaaccttgataacattatatatgcttatgtgtttaagacagtcttgattaaatatttccataccttatctgcagccactattcttatcctttcttcccaggaggagaatgaagtgggactaggcatttacctggcacttgcctgcactatcattcattggcactaatgattaggatgcttgaaccatgcagttttgtttctatttcaacaatatgacactgaagtagccattatcttttgatatttaagcctaagtaatagtatattcttcatgccaagttttgacagctcaataatttgtattctagaggggaaaaatgatatttttgctattattt

SEQ ID NO: 379336 - DNA, 1185 bp, Homo sapiens
cggccggtcaggaacccaacaattagtcccttctcgtccgagaggaaactctgtgagaagatgggaccgtgagcactctctttaacaaggacatttccttttcagcgaaagcagcgctctgatttaccaagtctggcggaccgcagcgctttaaaggaatgaggttccagcggtcgcgccaagcagcgtacgcagcctattttaagttatgctaccttcgccacagaaaccaagaacgttgtaatggtccggcaagtgcccacgtgtaattgttctccatcacttacccactctagttcgggaacacccttgtcgccgccgttccggtaacacctctccaacgctttcgatgcttctacttcttcgggaacaagacaagatggcgcccgatttgtctcacccggaagtaaagaataataacatccgtttgtcatctgaagccataccatctctcatccaggtttgtgaacacgtgattgtgcggattgacatgtttcggcgccattttttttgtgggcaaaaccatctctactctggtcaacaccgggcaactgaaccattcctgcacgttactttttaacgtagctggcgccattcccgacccatctttatagtggccagaaagccaagaacgtaagtgttctacacatagggcgccttcaaattttttactttagcaacgtgatcttcctttaaggggaagtatgttccctcctagaaacactcccgccttggagaaggggttgagttcgcaactccacttacagactacggaggaaccccagggtcaaaccaaaccaaaccaattctggccagttgcttagcgcagttcaagttacttagtgcgctggaagcggcatttcaggcaatccaacttctggctcgaaccttctcggagtattccaaggatggaatactctcacttgagcgctgccgagggtgccgcttgaggaaaacgtgagtttgtgaagagggtctcactccgtcactctgcaggaatgcagtggtgtgatcatggttcactgcaccttgacctcctgggctcaagcatcttccccactcagcctcccaacagcatgagccaccatgcctggctaacaaattgataccaactatcactcttctcagctacctaaaaaggtggtcttcacaagttttaagaacattaaatgacaatattggcac

SEQ ID NO: 379337 - DNA, 678 bp, Homo sapiens
ctcctccctgaccggtcctcctgccctaagtctcctccctgacccgtcctccagccctaactcctccctgaccggtcctcctgccctaagtctcctccctgaccggtcctcctgccctaagtctcctccctgaccggtcctcctgccctaagtctcctccctgaccagtcctcctgccctaagtctcctccctgaccggtcctcctgccctaagtctcctccctgactggtcctcctgccctaagtctcctccctgactggtcctcctgccctaactcctccctgactggcctccatccaagcagagcttgagtattgctggttccctgctcaaacccaccactggcactggcttcccatcacatacagaataaaggctaaatgtctatgcttggcacagaaagtcatcaacaggccccagagcacgtttctggtgttatcttctgctaatgccctgccctcactcctatgctgcagctgaatggaacgagccattatcccctcaggaacgctggcttctcagtaaacgattatagcccagaagctctgtcatcacagaacctagctattggctaatgggtcagctttggcttcatttctctgaataatttatttcaaaacataatcccaaggaacaaggttaggaatccggccctgctgtggctggttggtgcttca

SEQ ID NO: 379338 - DNA, 709 bp, Homo sapiens
ctcctccctgaccggtcctcctgccctaagtctcctccctgacccgtcctccagccctaactcctccctgaccggtcctcctgccctaagtctcctccctgaccggtcctcctgccctaagtctcctccctgaccggtcctcctgccctaagtctcctccctgaccagtcctcctgccctaagtctcctccctgaccggtcctcctgccctaagtctcctccctgactggtcctcctgccctaagtctcctccctgactggtcctcctgccctaactcctccctgactggcctccatccaagcagagcttgagtattgctggttccctgctcaaacccaccactggttgctggttccctgctcaaacccaccactggcactggcttcccatcacatacagaataaaggctaaatgtctatgcttggcacagaaagtcatcaacaggccccagagcacgtttctggtgttatcttctgctaatgccctgccctcactcctatgctgcagctgaatggaacgagccattatcccctcaggaacgctggcttctcagtaaacgattatagcccagaagctctgtcatcacagaacctagctattggctaatgggtcagctttggcttcatttctctgaataatttatttcaaaacataatcccaaggaacaaggttaggaatccggccctgctgtggctggttggtgcttca

SEQ ID NO: 379339 - DNA, 463 bp, Homo sapiens
gccacactgttgactatacacttagtatttatatgtgtattttatttctctaaaaaaagtcaggaccagtttatagcattgcagctatctgttctttgaagatttggcagaatttttctatgaaaccacctgggattggtacttttttgtggtgtagttcctggataagtttttctttttttcttctagggaaatcagtcttttttaaaccttttatctaacagggtcaattttggtaaacccttttttcttataaaattatcaatttcatctaacttttcaatttatttgcacagaggtctggaaagtaagatctgggcacagagccatgtgcctgtagtcccagctactcagaaggctgaggcaggaggataactggggcccaggagtgcagggctgcagtgagctgtgattgtaccactgcactccagcctgagcaacagagcaagaccatgtctcttaa

SEQ ID NO: 379340 - DNA, 2258 bp, Homo sapiens
ttttttttttgttttttttgagacatggcccgggcagtggctcctggaagaggaacaagtgtgggaaaagggagaggaagccggagctaaatgacaggatgcaggcgacttgagacacaaaaagagaagcgttcctctcggatccaggcattgcctcgctgctttcttttctccaagacgggctgaggattgtacagctctaggcggagttggggctcttcggatcgcttagattctcctctttgctgcatttccccccacgtcctcgttctcccgcgtctgcctgcggacccggagaagggagaatggagagggggctgccgctcctctgcgccgtgctcgccctcgtcctcgccccggccggcgcttttcgcaacgataaatgtggcgatactataaaaattgaaagccccgggtaccttacatctcctggttatcctcattcttatcacccaagtgaaaaatgcgaatggctgattcaggctccggacccataccagagaattatgatcaacttcaaccctcacttcgatttggaggacagagactgcaagtatgactacgtggaagtcttcgatggagaaaatgaaaatggacattttaggggaaagttctgtggaaagatagcccctcctcctgttgtgtcttcagggccatttctttttatcaaatttgtctctgactacgaaacacatggtgcaggattttccatacgttatgaaattttcaagagaggtcctgaatgttcccagaactacacaacacctagtggagtgataaagtcccccggattccctgaaaaatatcccaacagccttgaatgcacttatattgtctttgcgccaaagatgtcagagattatcctggaatttgaaagctttgacctggagcctgactcaaatcctccaggggggatgttctgtcgctacgaccggctagaaatctgggatggattccctgatgttggccctcacattgggcgttactgtggacagaaaacaccaggtcgaatccgatcctcatcgggcattctctccatggttttttacaccgacagcgcgatagcaaaagaaggtttctcagcaaactacagtgtcttgcagagcagtgtctcagaagatttcaaatgtatggaagctctgggcatggaatcaggagaaattcattctgaccagatcacagcttcttcccagtatagcaccaactggtctgcagagcgctcccgcctgaactaccctgagaatgggtggactcccggagaggattcctaccgagagtggatacaggtagacttgggccttctgcgctttgtcacggctgtcgggacacagggcgccatttcaaaagaaaccaagaagaaatattatgtcaagacttacaagatcgacgttagctccaacggggaagactggatcaccataaaagaaggaaacaaacctgttctctttcagggaaacaccaaccccacagatgttgtggttgcagtattccccaaaccactgataactcgatttgtccgaatcaagcctgcaacttgggaaactggcatatctatgagatttgaagtatacggttgcaagataacagattatccttgctctggaatgttgggtatggtgtctggacttatttctgactcccagatcacatcatccaaccaaggggacagaaactggatgcctgaaaacatccgcctggtaaccagtcgctctggctgggcacttccacccgcacctcattcctacatcaatgagtggctccaaatagacctgggggaggagaagatcgtgaggggcatcatcattcagggtgggaagcaccgagagaacaaggtgttcatgaggaagttcaagatcgggtacagcaacaacggctcggactggaagatgatcatggatgacagcaaacgcaaggcgaagtcttttgagggcaacaacaactatgatacacctgagctgcggacttttccagctctctccacgcgattcatcaggatctaccccgagagagccactcatggcggactggggctcagaatggagctgctgggctgtgaagtggaagcccctacagctggaccgaccactcccaacgggaacttggtggatgaatgtgatgacgaccaggccaactgccacagtggaacaggtgatgacttccagctcacaggtggcaccactgtgctggccacagaaaagcccacggtcatagacagcaccatacaatcaggtatcaaataaaatacgaaatgtgacaga

SEQ ID NO: 379341 - DNA, 2153 bp, Homo sapiens
ttttttttttgttttttttgagacatggcccgggcagtggctcctggaagaggaacaagtgtgggaaaagggagaggaagccggagctaaatgacaggatgcaggcgacttgagacacaaaaagagaagcgttcctctcggatccaggcattgcctcgctgctttcttttctccaagacgggctgaggattgtacagctctaggcggagttggggctcttcggatcgcttagattctcctctttgctgcatttccccccacgtcctcgttctcccgcgtctgcctgcggacccggagaagggagaatggagagggggctgccgctcctctgcgccgtgctcgccctcgtcctcgccccggccggcgcttttcgcaacgataaatgtggcgatactataaaaattgaaagccccgggtaccttacatctcctggttatcctcattcttatcacccaagtgaaaaatgcgaatggctgattcaggctccggacccataccagagaattatgatcaacttcaaccctcacttcgatttggaggacagagactgcaagtatgactacgtggaagtcttcgatggagaaaatgaaaatggacattttaggggaaagttctgtggaaagatagcccctcctcctgttgtgtcttcagggccatttctttttatcaaatttgtctctgactacgaaacacatggtgcaggattttccatacgttatgaaattttcaagagaggtcctgaatgttcccagaactacacaacacctagtggagtgataaagtcccccggattccctgaaaaatatcccaacagccttgaatgcacttatattgtctttgcgccaaagatgtcagagattatcctggaatttgaaagctttgacctggagcctgactcaaatcctccaggggggatgttctgtcgctacgaccggctagaaatctgggatggattccctgatgttggccctcacattgggcgttactgtggacagaaaacaccaggtcgaatccgatcctcatcgggcattctctccatggttttttacaccgacagcgcgatagcaaaagaaggtttctcagcaaactacagtgtcttgcagagcagtgtctcagaagatttcaaatgtatggaagctctgggcatggaatcaggagaaattcattctgaccagatcacagcttcttcccagtatagcaccaactggtctgcagagcgctcccgcctgaactaccctgagaatgggtggactcccggagaggattcctaccgagagtggatacaggtagacttgggccttctgcgctttgtcacggctgtcgggacacagggcgccatttcaaaagaaaccaagaagaaatattatgtcaagacttacaagatcgacgttagctccaacggggaagactggatcaccataaaagaaggaaacaaacctgttctctttcagggaaacaccaaccccacagatgttgtggttgcagtattccccaaaccactgataactcgatttgtccgaatcaagcctgcaacttgggaaactggcatatctatgagatttgaagtatacggttgcaagataacagattatccttgctctggaatgttgggtatggtgtctggacttatttctgactcccagatcacatcatccaaccaaggggacagaaactggatgcctgaaaacatccgcctggtaaccagtcgctctggctgggcacttccacccgcacctcattcctacatcaatgagtggctccaaatagacctgggggaggagaagatcgtgaggggcatcatcattcagggtgggaagcaccgagagaacaaggtgttcatgaggaagttcaagatcgggtacagcaacaacggctcggactggaagatgatcatggatgacagcaaacgcaaggcgaagtcttttgagggcaacaacaactatgatacacctgagctgcggacttttccagctctctccacgcgattcatcaggatctaccccgagagagccactcatggcggactggggctcagaatggagctgctgggctgtgaagtggaaggtggcaccactgtgctggccacagaaaagcccacggtcatagacagcaccatacaatcaggtatcaaataaaatacgaaatgtgacaga

SEQ ID NO: 379342 - DNA, 539 bp, Homo sapiens
tttgcctgccctgcctttttttccagattattccattctttattctgtgtcccagagctgctgatcttattattaattttacctttttcctttctttgtttctggttaatcattctaggatgcaaaatacagactccgtgtatcagtggtgcgatcaaaatcttcctcttcaagcacatcattagaacccaggccattaagctcattgaaactgagtttcttttcctataaaataaaaataacgtagccttcactccattcaggctctctcaatctgtgatctatgaatctcagagaaatgcagtttcagtttttccttttcatttccgcaaactaagtacacagtgtactgcatcttctagggagacgttctcaaagatcctgaacgtagccattgacacgcaaagcagaatttaattcgttaattatttcaatgttttattaatgatagtgttcaccacactgtaaacagatttatccttccagctttaattaaagctcttgggagtgctttcctcaaaataactgtgacttttctc

SEQ ID NO: 379343 - DNA, 3013 bp, Homo sapiens
  misc_feature (1932)..(1932): n is a, c, g, or t
ttttttttttgttttttttgagacatggcccgggcagtggctcctggaagaggaacaagtgtgggaaaagggagaggaagccggagctaaatgacaggatgcaggcgacttgagacacaaaaagagaagcgttcctctcggatccaggcattgcctcgctgctttcttttctccaagacgggctgaggattgtacagctctaggcggagttggggctcttcggatcgcttagattctcctctttgctgcatttccccccacgtcctcgttctcccgcgtctgcctgcggacccggagaagggagaatggagagggggctgccgctcctctgcgccgtgctcgccctcgtcctcgccccggccggcgcttttcgcaacgataaatgtggcgatactataaaaattgaaagccccgggtaccttacatctcctggttatcctcattcttatcacccaagtgaaaaatgcgaatggctgattcaggctccggacccataccagagaattatgatcaacttcaaccctcacttcgatttggaggacagagactgcaagtatgactacgtggaagtcttcgatggagaaaatgaaaatggacattttaggggaaagttctgtggaaagatagcccctcctcctgttgtgtcttcagggccatttctttttatcaaatttgtctctgactacgaaacacatggtgcaggattttccatacgttatgaaattttcaagagaggtcctgaatgttcccagaactacacaacacctagtggagtgataaagtcccccggattccctgaaaaatatcccaacagccttgaatgcacttatattgtctttgcgccaaagatgtcagagattatcctggaatttgaaagctttgacctggagcctgactcaaatcctccaggggggatgttctgtcgctacgaccggctagaaatctgggatggattccctgatgttggccctcacattgggcgttactgtggacagaaaacaccaggtcgaatccgatcctcatcgggcattctctccatggttttttacaccgacagcgcgatagcaaaagaaggtttctcagcaaactacagtgtcttgcagagcagtgtctcagaagatttcaaatgtatggaagctctgggcatggaatcaggagaaattcattctgaccagatcacagcttcttcccagtatagcaccaactggtctgcagagcgctcccgcctgaactaccctgagaatgggtggactcccggagaggattcctaccgagagtggatacaggtagacttgggccttctgcgctttgtcacggctgtcgggacacagggcgccatttcaaaagaaaccaagaagaaatattatgtcaagacttacaagatcgacgttagctccaacggggaagactggatcaccataaaagaaggaaacaaacctgttgtaagttaggctgccaccgtggcaaccaatttggtcttttaaatggatgatcaatttttacttgtttgtttggtagctttctgtctggcctggtttatttttgaattgatttgaaatgaaaagtgcaattagaggtttaaatctaaccaaggggtctcatgttcccagatccagaagccgggaggaaattatgtgaatgtttccaaaaaaagtcaatacaggccaaattaagtgtcagactcaagaattgctgtaagccccccatggggacacagattctgcgtgggataaacactgtcctcttagaaccttaggaatttggggttttgttgtttttcccccctcgatttcttcatcctttcatagattctttctgtctgtaatcagctagttttagaaaacatcttttcatctatctactgtggctcacaaactaatttacaagtgcatttgactgcttcttgtaagaacgcgtggaaccaaaggtatntcattgtgttccctcagatcacacaaataacacactacctccgtactgctttcaaccaaggaggcagcacagaccataccgtgtccctcggcgctctgccctagctcatttggaacagagatgtttttctcagcctgcctgtttatttgaagttacacttgctctgattttctaatcaaaagatttcggagaattcatactcaccatctcccagaaattaaaagcttgccctggaggctgagcaaaacacaggaaattgatgaggataggagcaaagatccaggtagcttgcaatgatgggcttgggaagaggccaattaacctgtctctcttttgagcattcacgtacttgattttctccttgtggatctggaactgagaaaagccccctgggtgtgaagtgagaaaatctattaattccctttgattagcagtgaaacccccactctcggacagggcaggcaagatggaagcagctacagatagacagctgttctgtaggaggaaaatgctatgggcaggcaagttcaaggccattgtctagtcctggaggacatggaaccagtttgtctggggtacaagaaccttcctagtcaacgctcatggagatgaagtgagtaaattttgaccccaagtttcatgactgattcttgtttgggaataaatttctgaagacatactttaggttcaaggaaataaaaaatcactaactctaatgaggcacctaccagccaaagaacccagagagagccgggagagctgaccttagactgtcaggccatttctttttaaaataagcgctacttcaggaggagaaaaccaaacaacacatgttcttacttataactgggagctgaatgatgagaacacatggatgcattgcagggaacaacacacactgggacttgtcggtagcggggtatgtgggaggacggagagcatcaggaaaaatagctaatggatgctgggcttaataccaaggtgatgggatgatctgtgcagtaaaccaccttggcacacagttacctgtgtaacaaacctatacatcctgcacaggtaccctgaaacttaaaggttgaag

SEQ ID NO: 379344 - DNA, 3212 bp, Homo sapiens
ttttttttttgttttttttgagacatggcccgggcagtggctcctggaagaggaacaagtgtgggaaaagggagaggaagccggagctaaatgacaggatgcaggcgacttgagacacaaaaagagaagcgttcctctcggatccaggcattgcctcgctgctttcttttctccaagacgggctgaggattgtacagctctaggcggagttggggctcttcggatcgcttagattctcctctttgctgcatttccccccacgtcctcgttctcccgcgtctgcctgcggacccggagaagggagaatggagagggggctgccgctcctctgcgccgtgctcgccctcgtcctcgccccggccggcgcttttcgcaacgataaatgtggcgatactataaaaattgaaagccccgggtaccttacatctcctggttatcctcattcttatcacccaagtgaaaaatgcgaatggctgattcaggctccggacccataccagagaattatgatcaacttcaaccctcacttcgatttggaggacagagactgcaagtatgactacgtggaagtcttcgatggagaaaatgaaaatggacattttaggggaaagttctgtggaaagatagcccctcctcctgttgtgtcttcagggccatttctttttatcaaatttgtctctgactacgaaacacatggtgcaggattttccatacgttatgaaattttcaagagaggtcctgaatgttcccagaactacacaacacctagtggagtgataaagtcccccggattccctgaaaaatatcccaacagccttgaatgcacttatattgtctttgcgccaaagatgtcagagattatcctggaatttgaaagctttgacctggagcctgactcaaatcctccaggggggatgttctgtcgctacgaccggctagaaatctgggatggattccctgatgttggccctcacattgggcgttactgtggacagaaaacaccaggtcgaatccgatcctcatcgggcattctctccatggttttttacaccgacagcgcgatagcaaaagaaggtttctcagcaaactacagtgtcttgcagagcagtgtctcagaagatttcaaatgtatggaagctctgggcatggaatcaggagaaattcattctgaccagatcacagcttcttcccagtatagcaccaactggtctgcagagcgctcccgcctgaactaccctgagaatgggtggactcccggagaggattcctaccgagagtggatacaggtagacttgggccttctgcgctttgtcacggctgtcgggacacagggcgccatttcaaaagaaaccaagaagaaatattatgtcaagacttacaagatcgacgttagctccaacggggaagactggatcaccataaaagaaggaaacaaacctgttctctttcagggaaacaccaaccccacagatgttgtggttgcagtattccccaaaccactgataactcgatttgtccgaatcaagcctgcaacttgggaaactggcatatctatgagatttgaagtatacggttgcaagataacagattatccttgctctggaatgttgggtatggtgtctggacttatttctgactcccagatcacatcatccaaccaaggggacagaaactggatgcctgaaaacatccgcctggtaaccagtcgctctggctgggcacttccacccgcacctcattcctacatcaatgagtggctccaaatagacctgggggaggagaagatcgtgaggggcatcatcattcagggtgggaagcaccgagagaacaaggtgttcatgaggaagttcaagatcgggtacagcaacaacggctcggactggaagatgatcatggatgacagcaaacgcaaggcgaagtcttttgagggcaacaacaactatgatacacctgagctgcggacttttccagctctctccacgcgattcatcaggatctaccccgagagagccactcatggcggactggggctcagaatggagctgctgggctgtgaagtggaaggtggcaccactgtgctggccacagaaaagcccacggtcatagacagcaccatacaatcagagtttccaacatatggttttaactgtgaatttggctggggctctcacaagaccttctgccactgggaacatgacaatcacgtgcagctcaagtggagtgtgttgaccagcaagacgggacccattcaggatcacacaggagatggcaacttcatctattcccaagctgacgaaaatcagaagggcaaagtggctcgcctggtgagccctgtggtttattcccagaactctgcccactgcatgaccttctggtatcacatgtctgggtcccacgtcggcacactcagggtcaaactgcgctaccagaagccagaggagtacgatcagctggtctggatggccattggacaccaaggtgaccactggaaggaagggcgtgtcttgctccacaagtctctgaaactttatcaggtgattttcgagggcgaaatcggaaaaggaaaccttggtgggattgctgtggatgacattagtattaataaccacatttcacaagaagattgtgcaaggagcacgccaggatacgaaggtgaaggagaaggtgacaagaacatctccaggaagccaggcaatgtgttgaagaccttagaccccatcctcatcaccatcatagccatgagtgccctgggggtcctcctgggggctgtctgtggggtcgtgctgtactgtgcctgttggcataatgggatgtcagaaagaaacttgtctgccctggagaactataactttgaacttgtggatggtgtgaagttgaaaaaagacaaactgaatacacagagtacttattcggaggcatgaaggcagacagagatgaaaagacagtcaaaggacggaagtggaaggacgggagtgagctggggagctgttgatctttcactatacaggctgggaagtgtgttgatgaccactgagccaggcttttctcaggagcttcaatgagtatggccgacagacatggacaaggagctgtgttcaccatcggactcatgtgcagtcagcttttttcctgttggtttcatttgaataatcagatgctggtgttgagaccaagtatgattgacataatcattcatttcgacccctcctgcc

SEQ ID NO: 379345 - DNA, 2278 bp, Homo sapiens
ttttttttttgttttttttgagacatggcccgggcagtggctcctggaagaggaacaagtgtgggaaaagggagaggaagccggagctaaatgacaggatgcaggcgacttgagacacaaaaagagaagcgttcctctcggatccaggcattgcctcgctgctttcttttctccaagacgggctgaggattgtacagctctaggcggagttggggctcttcggatcgcttagattctcctctttgctgcatttccccccacgtcctcgttctcccgcgtctgcctgcggacccggagaagggagaatggagagggggctgccgctcctctgcgccgtgctcgccctcgtcctcgccccggccggcgcttttcgcaacgataaatgtggcgatactataaaaattgaaagccccgggtaccttacatctcctggttatcctcattcttatcacccaagtgaaaaatgcgaatggctgattcaggctccggacccataccagagaattatgatcaacttcaaccctcacttcgatttggaggacagagactgcaagtatgactacgtggaagtcttcgatggagaaaatgaaaatggacattttaggggaaagttctgtggaaagatagcccctcctcctgttgtgtcttcagggccatttctttttatcaaatttgtctctgactacgaaacacatggtgcaggattttccatacgttatgaaattttcaagagaggtcctgaatgttcccagaactacacaacacctagtggagtgataaagtcccccggattccctgaaaaatatcccaacagccttgaatgcacttatattgtctttgcgccaaagatgtcagagattatcctggaatttgaaagctttgacctggagcctgactcaaatcctccaggggggatgttctgtcgctacgaccggctagaaatctgggatggattccctgatgttggccctcacattgggcgttactgtggacagaaaacaccaggtcgaatccgatcctcatcgggcattctctccatggttttttacaccgacagcgcgatagcaaaagaaggtttctcagcaaactacagtgtcttgcagagcagtgtctcagaagatttcaaatgtatggaagctctgggcatggaatcaggagaaattcattctgaccagatcacagcttcttcccagtatagcaccaactggtctgcagagcgctcccgcctgaactaccctgagaatgggtggactcccggagaggattcctaccgagagtggatacaggtagacttgggccttctgcgctttgtcacggctgtcgggacacagggcgccatttcaaaagaaaccaagaagaaatattatgtcaagacttacaagatcgacgttagctccaacggggaagactggatcaccataaaagaaggaaacaaacctgttctctttcagggaaacaccaaccccacagatgttgtggttgcagtattccccaaaccactgataactcgatttgtccgaatcaagcctgcaacttgggaaactggcatatctatgagatttgaagtatacggttgcaagataacagattatccttgctctggaatgttgggtatggtgtctggacttatttctgactcccagatcacatcatccaaccaaggggacagaaactggatgcctgaaaacatccgcctggtaaccagtcgctctggctgggcacttccacccgcacctcattcctacatcaatgagtggctccaaatagacctgggggaggagaagatcgtgaggggcatcatcattcagggtgggaagcaccgagagaacaaggtgttcatgaggaagttcaagatcgggtacagcaacaacggctcggactggaagatgatcatggatgacagcaaacgcaaggcgaagtcttttgagggcaacaacaactatgatacacctgagctgcggacttttccagctctctccacgcgattcatcaggatctaccccgagagagccactcatggcggactggggctcagaatggagctgctgggctgtgaagtggaagcccctacagctggaccgaccactcccaacgggaacttggtggatgaatgtgatgacgaccaggccaactgccacagtggaacaggtgatgacttccagctcacaggtggcaccactgtgctggccacagaaaagcccacggtcatagacagcaccatacaatcaggtatcaaataaaatacgaaatgtgacagaaaacatgtacctctcttctc

SEQ ID NO: 379346 - DNA, 2549 bp, Homo sapiens
ttttttttttgttttttttgagacatggcccgggcagtggctcctggaagaggaacaagtgtgggaaaagggagaggaagccggagctaaatgacaggatgcaggcgacttgagacacaaaaagagaagcgttcctctcggatccaggcattgcctcgctgctttcttttctccaagacgggctgaggattgtacagctctaggcggagttggggctcttcggatcgcttagattctcctctttgctgcatttccccccacgtcctcgttctcccgcgtctgcctgcggacccggagaagggagaatggagagggggctgccgctcctctgcgccgtgctcgccctcgtcctcgccccggccggcgcttttcgcaacgataaatgtggcgatactataaaaattgaaagccccgggtaccttacatctcctggttatcctcattcttatcacccaagtgaaaaatgcgaatggctgattcaggctccggacccataccagagaattatgatcaacttcaaccctcacttcgatttggaggacagagactgcaagtatgactacgtggaagtcttcgatggagaaaatgaaaatggacattttaggggaaagttctgtggaaagatagcccctcctcctgttgtgtcttcagggccatttctttttatcaaatttgtctctgactacgaaacacatggtgcaggattttccatacgttatgaaattttcaagagaggtcctgaatgttcccagaactacacaacacctagtggagtgataaagtcccccggattccctgaaaaatatcccaacagccttgaatgcacttatattgtctttgcgccaaagatgtcagagattatcctggaatttgaaagctttgacctggagcctgactcaaatcctccaggggggatgttctgtcgctacgaccggctagaaatctgggatggattccctgatgttggccctcacattgggcgttactgtggacagaaaacaccaggtcgaatccgatcctcatcgggcattctctccatggttttttacaccgacagcgcgatagcaaaagaaggtttctcagcaaactacagtgtcttgcagagcagtgtctcagaagatttcaaatgtatggaagctctgggcatggaatcaggagaaattcattctgaccagatcacagcttcttcccagtatagcaccaactggtctgcagagcgctcccgcctgaactaccctgagaatgggtggactcccggagaggattcctaccgagagtggatacaggtagacttgggccttctgcgctttgtcacggctgtcgggacacagggcgccatttcaaaagaaaccaagaagaaatattatgtcaagacttacaagatcgacgttagctccaacggggaagactggatcaccataaaagaaggaaacaaacctgttctctttcagggaaacaccaaccccacagatgttgtggttgcagtattccccaaaccactgataactcgatttgtccgaatcaagcctgcaacttgggaaactggcatatctatgagatttgaagtatacggttgcaagataacagattatccttgctctggaatgttgggtatggtgtctggacttatttctgactcccagatcacatcatccaaccaaggggacagaaactggatgcctgaaaacatccgcctggtaaccagtcgctctggctgggcacttccacccgcacctcattcctacatcaatgagtggctccaaatagacctgggggaggagaagatcgtgaggggcatcatcattcagggtgggaagcaccgagagaacaaggtgttcatgaggaagttcaagatcgggtacagcaacaacggctcggactggaagatgatcatggatgacagcaaacgcaaggcgaagtcttttgagggcaacaacaactatgatacacctgagctgcggacttttccagctctctccacgcgattcatcaggatctaccccgagagagccactcatggcggactggggctcagaatggagctgctgggctgtgaagtggaagcccctacagctggaccgaccactcccaacgggaacttggtggatgaatgtgatgacgaccaggccaactgccacagtggaacaggtgatgacttccagctcacaggtggcaccactgtgctggccacagaaaagcccacggtcatagacagcaccatacaatcagccaggctggaagtttccacattgaacctctcactccataaccctccccaacaaaaggccctggttaaatgtacaggatggggaaggacattggaaggtaaaggcagactgtcattctctgaagcgagaagtgcctgaaacattttttcaggcaaagcggttccatgtcctggtcatttcaaaaatatccaagttcctacattttatggtatcatcagaatatgaagagccaaaagaatggatgatgtcattttctgttctataaacaataaatgtaatgtattaacaaagtaaatacaggcagaactgtgtgtgctgggg

SEQ ID NO: 379347 - DNA, 2381 bp, Homo sapiens
ttttttttttgttttttttgagacatggcccgggcagtggctcctggaagaggaacaagtgtgggaaaagggagaggaagccggagctaaatgacaggatgcaggcgacttgagacacaaaaagagaagcgttcctctcggatccaggcattgcctcgctgctttcttttctccaagacgggctgaggattgtacagctctaggcggagttggggctcttcggatcgcttagattctcctctttgctgcatttccccccacgtcctcgttctcccgcgtctgcctgcggacccggagaagggagaatggagagggggctgccgctcctctgcgccgtgctcgccctcgtcctcgccccggccggcgcttttcgcaacgataaatgtggcgatactataaaaattgaaagccccgggtaccttacatctcctggttatcctcattcttatcacccaagtgaaaaatgcgaatggctgattcaggctccggacccataccagagaattatgatcaacttcaaccctcacttcgatttggaggacagagactgcaagtatgactacgtggaagtcttcgatggagaaaatgaaaatggacattttaggggaaagttctgtggaaagatagcccctcctcctgttgtgtcttcagggccatttctttttatcaaatttgtctctgactacgaaacacatggtgcaggattttccatacgttatgaaattttcaagagaggtcctgaatgttcccagaactacacaacacctagtggagtgataaagtcccccggattccctgaaaaatatcccaacagccttgaatgcacttatattgtctttgcgccaaagatgtcagagattatcctggaatttgaaagctttgacctggagcctgactcaaatcctccaggggggatgttctgtcgctacgaccggctagaaatctgggatggattccctgatgttggccctcacattgggcgttactgtggacagaaaacaccaggtcgaatccgatcctcatcgggcattctctccatggttttttacaccgacagcgcgatagcaaaagaaggtttctcagcaaactacagtgtcttgcagagcagtgtctcagaagatttcaaatgtatggaagctctgggcatggaatcaggagaaattcattctgaccagatcacagcttcttcccagtatagcaccaactggtctgcagagcgctcccgcctgaactaccctgagaatgggtggactcccggagaggattcctaccgagagtggatacaggtagacttgggccttctgcgctttgtcacggctgtcgggacacagggcgccatttcaaaagaaaccaagaagaaatattatgtcaagacttacaagatcgacgttagctccaacggggaagactggatcaccataaaagaaggaaacaaacctgttctctttcagggaaacaccaaccccacagatgttgtggttgcagtattccccaaaccactgataactcgatttgtccgaatcaagcctgcaacttgggaaactggcatatctatgagatttgaagtatacggttgcaagataacagattatccttgctctggaatgttgggtatggtgtctggacttatttctgactcccagatcacatcatccaaccaaggggacagaaactggatgcctgaaaacatccgcctggtaaccagtcgctctggctgggcacttccacccgcacctcattcctacatcaatgagtggctccaaatagacctgggggaggagaagatcgtgaggggcatcatcattcagggtgggaagcaccgagagaacaaggtgttcatgaggaagttcaagatcgggtacagcaacaacggctcggactggaagatgatcatggatgacagcaaacgcaaggcgaagtcttttgagggcaacaacaactatgatacacctgagctgcggacttttccagctctctccacgcgattcatcaggatctaccccgagagagccactcatggcggactggggctcagaatggagctgctgggctgtgaagtggaagcccctacagctggaccgaccactcccaacgggaacttggtggatgaatgtgatgacgaccaggccaactgccacagtggaacaggtgatgacttccagctcacaggtggcaccactgtgctggccacagaaaagcccacggtcatagacagcaccatacaatcaggctccagattcttcaagcatcatcacaagcagcagtcaatgagacctcaaaaccttcatcataattccattttgctattatagactcaactcagagtcttactatttcatcttgctgattctcatcaatataataaactccatgggcatata

SEQ ID NO: 379348 - DNA, 2238 bp, Homo sapiens
ttttttttttgttttttttgagacatggcccgggcagtggctcctggaagaggaacaagtgtgggaaaagggagaggaagccggagctaaatgacaggatgcaggcgacttgagacacaaaaagagaagcgttcctctcggatccaggcattgcctcgctgctttcttttctccaagacgggctgaggattgtacagctctaggcggagttggggctcttcggatcgcttagattctcctctttgctgcatttccccccacgtcctcgttctcccgcgtctgcctgcggacccggagaagggagaatggagagggggctgccgctcctctgcgccgtgctcgccctcgtcctcgccccggccggcgcttttcgcaacgataaatgtggcgatactataaaaattgaaagccccgggtaccttacatctcctggttatcctcattcttatcacccaagtgaaaaatgcgaatggctgattcaggctccggacccataccagagaattatgatcaacttcaaccctcacttcgatttggaggacagagactgcaagtatgactacgtggaagtcttcgatggagaaaatgaaaatggacattttaggggaaagttctgtggaaagatagcccctcctcctgttgtgtcttcagggccatttctttttatcaaatttgtctctgactacgaaacacatggtgcaggattttccatacgttatgaaattttcaagagaggtcctgaatgttcccagaactacacaacacctagtggagtgataaagtcccccggattccctgaaaaatatcccaacagccttgaatgcacttatattgtctttgcgccaaagatgtcagagattatcctggaatttgaaagctttgacctggagcctgactcaaatcctccaggggggatgttctgtcgctacgaccggctagaaatctgggatggattccctgatgttggccctcacattgggcgttactgtggacagaaaacaccaggtcgaatccgatcctcatcgggcattctctccatggttttttacaccgacagcgcgatagcaaaagaaggtttctcagcaaactacagtgtcttgcagagcagtgtctcagaagatttcaaatgtatggaagctctgggcatggaatcaggagaaattcattctgaccagatcacagcttcttcccagtatagcaccaactggtctgcagagcgctcccgcctgaactaccctgagaatgggtggactcccggagaggattcctaccgagagtggatacaggtagacttgggccttctgcgctttgtcacggctgtcgggacacagggcgccatttcaaaagaaaccaagaagaaatattatgtcaagacttacaagatcgacgttagctccaacggggaagactggatcaccataaaagaaggaaacaaacctgttctctttcagggaaacaccaaccccacagatgttgtggttgcagtattccccaaaccactgataactcgatttgtccgaatcaagcctgcaacttgggaaactggcatatctatgagatttgaagtatacggttgcaagataacagattatccttgctctggaatgttgggtatggtgtctggacttatttctgactcccagatcacatcatccaaccaaggggacagaaactggatgcctgaaaacatccgcctggtaaccagtcgctctggctgggcacttccacccgcacctcattcctacatcaatgagtggctccaaatagacctgggggaggagaagatcgtgaggggcatcatcattcagggtgggaagcaccgagagaacaaggtgttcatgaggaagttcaagatcgggtacagcaacaacggctcggactggaagatgatcatggatgacagcaaacgcaaggcgaagtcttttgagggcaacaacaactatgatacacctgagctgcggacttttccagctctctccacgcgattcatcaggatctaccccgagagagccactcatggcggactggggctcagaatggagctgctgggctgtgaagtggaagcccctacagctggaccgaccactcccaacgggaacttggtggatgaatgtgatgacgaccaggccaactgccacagtggaacagggtggcaccactgtgctggccacagaaaagcccacggtcatagacagcaccatacaatcaggtatcaaataaaatacgaaatgtgacaga

SEQ ID NO: 379349 - DNA, 1705 bp, Homo sapiens
ttttttttttgttttttttgagacatggcccgggcagtggctcctggaagaggaacaagtgtgggaaaagggagaggaagccggagctaaatgacaggatgcaggcgacttgagacacaaaaagagaagcgttcctctcggatccaggcattgcctcgctgctttcttttctccaagacgggctgaggattgtacagctctaggcggagttggggctcttcggatcgcttagattctcctctttgctgcatttccccccacgtcctcgttctcccgcgtctgcctgcggacccggagaagggagaatggagagggggctgccgctcctctgcgccgtgctcgccctcgtcctcgccccggccggcgcttttcgcaacgataaatgtggcgatactataaaaattgaaagccccgggtaccttacatctcctggttatcctcattcttatcacccaagtgaaaaatgcgaatggctgattcaggctccggacccataccagagaattatgatcaacttcaaccctcacttcgatttggaggacagagactgcaagtatgactacgtggaagtcttcgatggagaaaatgaaaatggacattttaggggaaagttctgtggaaagatagcccctcctcctgttgtgtcttcagggccatttctttttatcaaatttgtctctgactacgaaacacatggtgcaggattttccatacgttatgaaattttcaagagaggtcctgaatgttcccagaactacacaacacctagtggagtgataaagtcccccggattccctgaaaaatatcccaacagccttgaatgcacttatattgtctttgcgccaaagatgtcagagattatcctggaatttgaaagctttgacctggagcctgactcaaatcctccaggggggatgttctgtcgctacgaccggctagaaatctgggatggattccctgatgttggccctcacattgggcgttactgtggacagaaaacaccaggtcgaatccgatcctcatcgggcattctctccatggttttttacaccgacagcgcgatagcaaaagaaggtttctcagcaaactacagtgtcttgcagagcagtgtctcagaagatttcaaatgtatggaagctctgggcatggaatcaggagaaattcattctgaccagatcacagcttcttcccagtatagcaccaactggtctgcagagcgctcccgcctgaactaccctgagaatgggtggactcccggagaggattcctaccgagagtggatacaggtatgcagcataagatcaagcctatctaggattgaataagtttttgaccatctagagaggttgttgaaagaaagtggtactgtgccaaatggcctccaatgagaagataggttcacggccgtcaggtataaatcactgcaagagaagataggttcacggccatcaggtataaatcactgcaaaatgagcccatcgctacacgatcagagaaaagcaggcccaagatgacatccctgaaaacgcatttatcttctcagatacttattatactactcttccgagaatgtgactacaagtgtctcactttgataacagctccaagatctgatttttcccaactacacactgtctgttaatgggcttcctattttgacatgtttttatttcctggatgaaatatatgaatcctgtttatagac

SEQ ID NO: 379350 - DNA, 2526 bp, Homo sapiens
  misc_feature (1445)..(1445): n is a, c, g, or t
gcggccgcctactactactaaattcgcggccgcgtcgacgaggattcctaccgagagtggatacaggtatgactacgtggaagtcttcgatggagaaaatgaaaatggacattttaggggaaagttctgtggaaagatagcccctcctcctgttgtgtcttcagggccatttctttttatcaaatttgtctctgactacgaaacacatggtgcaggattttccatacgttatgaaattttcaagagaggtcctgaatgttcccagaactacacaacacctagtggagtgataaagtcccccggattccctgaaaaatatcccaacagccttgaatgcacttatattgtctttgcgccaaagatgtcagagattatcctggaatttgaaagctttgacctggagcctgactcaaatcctccaggggggatgttctgtcgctacgaccggctagaaatctgggatggattccctgatgttggccctcacattgggcgttactgtggacagaaaacaccaggtcgaatccgatcctcatcgggcattctctccatggttttttacaccgacagcgcgatagcaaaagaaggtttctcagcaaactacagtgtcttgcagagcagtgtctcagaagatttcaaatgtatggaagctctgggcatggaatcaggagaaattcattctgaccagatcacagcttcttcccagtatagcaccaactggtctgcagagcgctcccgcctgaactaccctgagaatgggtggactcccggagaggattcctaccgagagtggatacaggtagacttgggccttctgcgctttgtcacggctgtcgggacacagggcgccatttcaaaagaaaccaagaagaaatattatgtcaagacttacaagatcgacgttagctccaacggggaagactggatcaccataaaagaaggaaacaaacctgttgtaagttaggctgccaccgtggcaaccaatttggtcttttaaatggatgatcaatttttacttgtttgtttggtagctttctgtctggcctggtttatttttgaattgatttgaaatgaaaagtgcaattagaggtttaaatctaaccaaggggtctcatgttcccagatccagaagccgggaggaaattatgtgaatgtttccaaaaaaagtcaatacaggccaaattaagtgtcagactcaagaattgctgtaagccccccatggggacacagattctgcgtgggataaacactgtcctcttagaaccttaggaatttggggttttgttgtttttcccccctcgatttcttcatcctttcatagattctttctgtctgtaatcagctagttttagaaaacatcttttcatctatctactgtggctcacaaactaatttacaagtgcatttgactgcttcttgtaagaacgcgtggaaccaaaggtatntcattgtgttccctcagatcacacaaataacacactacctccgtactgctttcaaccaaggaggcagcacagaccataccgtgtccctcggcgctctgccctagctcatttggaacagagatgtttttctcagcctgcctgtttatttgaagttacacttgctctgattttctaatcaaaagatttcggagaattcatactcaccatctcccagaaattaaaagcttgccctggaggctgagcaaaacacaggaaattgatgaggataggagcaaagatccaggtagcttgcaatgatgggcttgggaagaggccaattaacctgtctctcttttgagcattcacgtacttgattttctccttgtggatctggaactgagaaaagccccctgggtgtgaagtgagaaaatctattaattccctttgattagcagtgaaacccccactctcggacagggcaggcaagatggaagcagctacagatagacagctgttctgtaggaggaaaatgctatgggcaggcaagttcaaggccattgtctagtcctggaggacatggaaccagtttgtctggggtacaagaaccttcctagtcaacgctcatggagatgaagtgagtaaattttgaccccaagtttcatgactgattcttgtttgggaataaatttctgaagacatactttaggttcaaggaaataaaaaatcactaactctaatgaggcacctaccagccaaagaacccagagagagccgggagagctgaccttagactgtcaggccatttctttttaaaataagcgctacttcaggaggagaaaaccaaacaacacatgttcttacttataactgggagctgaatgatgagaacacatggatgcattgcagggaacaacacacactgggacttgtcggtagcggggtatgtgggaggacggagagcatcaggaaaaatagctaatggatgctgggcttaataccaaggtgatgggatgatctgtgcagtaaaccaccttggcacacagttacctgtgtaacaaacctatacatcctgcacaggtaccctgaaacttaaaggttgaag

SEQ ID NO: 379351 - DNA, 1567 bp, Homo sapiens
ttgcttgttggtgtgagtttttcttctggagactttgtactgaatgtcaataaactctgtgactttgttaggaagtaaaactgggatctatttagccactggtaagcttctgaggcgatcttttgagggcaacaacaactatgatacacctgagctgcggacttttccagctctctccacgcgattcatcaggatctaccccgagagagccactcatggcggactggggctcagaatggagctgctgggctgtgaagtggaagcccctacagctggaccgaccactcccaacgggaacttggtggatgaatgtgatgacgaccaggccaactgccacagtggaacaggtgatgacttccagctcacaggtggcaccactgtgctggccacagaaaagcccacggtcatagacagcaccatacaatcagagtttccaacatatggttttaactgtgaatttggctggggctctcacaagaccttctgccactgggaacatgacaatcacgtgcagctcaagtggagtgtgttgaccagcaagacgggacccattcaggatcacacaggagatggcaacttcatctattcccaagctgacgaaaatcagaagggcaaagtggctcgcctggtgagccctgtggtttattcccagaactctgcccactgcatgaccttctggtatcacatgtctgggtcccacgtcggcacactcagggtcaaactgcgctaccagaagccagaggagtacgatcagctggtctggatggccattggacaccaaggtgaccactggaaggaagggcgtgtcttgctccacaagtctctgaaactttatcaggtgattttcgagggcgaaatcggaaaaggaaaccttggtgggattgctgtggatgacattagtattaataaccacatttcacaagaagattgtgcaaaaccagcagacctggataaaaagaacccagaaattaaaattgatgaaacagggagcacgccaggatacgaaggtgaaggagaaggtgacaagaacatctccaggaagccaggcaatgtgttgaagaccttagaccccatcctcatcaccatcatagccatgagtgccctgggggtcctcctgggggctgtctgtggggtcgtgctgtactgtgcctgttggcataatgggatgtcagaaagaaacttgtctgccctggagaactataactttgaacttgtggatggtgtgaagttgaaaaaagacaaactgaatacacagagtacttattcggaggcatgaaggcagacagagatgaaaagacagtcaaaggacggaagtggaaggacgggagtgagctggggagctgttgatctttcactatacaggctgggaagtgtgttgatgaccactgagccaggcttttctcaggagcttcaatgagtatggccgacagacatggacaaggagctgtgttcaccatcggactcatgtgcagtcagcttttttcctgttggtttcatttgaataatcagatgctggtgttgagaccaagtatgattgacataatcattcatttcgacccctcctgcc

SEQ ID NO: 379352 - DNA, 331 bp, Homo sapiens
taatgatgaacagtgggaaatgggtgagtaaagaggtggaagagagggtaaagctaagtcttaatagataaggttacagcctgtcccctgaccagtgagatgcagtaggcctgcactaattggaagttcacagcactcagggtgttatttgttcagtcttccaattccttgggactatgaaatatttctcctgttccccttttcctgctgcttcctgcagcttctccaaaccacatacagggcagggtatttgtccttgagaaaagtaaacagctccagtagccaaacagaggaggaaccatagcatcttactttaaaccctcagttttct

SEQ ID NO: 379353 - DNA, 387 bp, Homo sapiens
aagtttccacattgaacctctcactccataaccctccccaacaaaaggcattgatctaaaaacatatcctttaaataaccaaattgccacaagttacatgatcaagacaagaagataaaagagcagtaaaatacaaaaacttagagcggttcacctggttaaatgtacaggatggggaaggacattggaaggtaaaggcagactgtcattctctgaagcgagaagtgcctgaaacattttttcaggcaaagcggttccatgtcctggtcatttcaaaaatatccaagttcctacattttatggtatcatcagaatatgaagagccaaaagaatggatgatgtcattttctgttctataaacaataaatgtaatgtattaacaaagta

SEQ ID NO: 379354 - DNA, 3368 bp, Homo sapiens
ttttttttttgttttttttgagacatggcccgggcagtggctcctggaagaggaacaagtgtgggaaaagggagaggaagccggagctaaatgacaggatgcaggcgacttgagacacaaaaagagaagcgttcctctcggatccaggcattgcctcgctgctttcttttctccaagacgggctgaggattgtacagctctaggcggagttggggctcttcggatcgcttagattctcctctttgctgcatttccccccacgtcctcgttctcccgcgtctgcctgcggacccggagaagggagaatggagagggggctgccgctcctctgcgccgtgctcgccctcgtcctcgccccggccggcgcttttcgcaacgataaatgtggcgatactataaaaattgaaagccccgggtaccttacatctcctggttatcctcattcttatcacccaagtgaaaaatgcgaatggctgattcaggctccggacccataccagagaattatgatcaacttcaaccctcacttcgatttggaggacagagactgcaagtatgactacgtggaagtcttcgatggagaaaatgaaaatggacattttaggggaaagttctgtggaaagatagcccctcctcctgttgtgtcttcagggccatttctttttatcaaatttgtctctgactacgaaacacatggtgcaggattttccatacgttatgaaattttcaagagaggtcctgaatgttcccagaactacacaacacctagtggagtgataaagtcccccggattccctgaaaaatatcccaacagccttgaatgcacttatattgtctttgcgccaaagatgtcagagattatcctggaatttgaaagctttgacctggagcctgactcaaatcctccaggggggatgttctgtcgctacgaccggctagaaatctgggatggattccctgatgttggccctcacattgggcgttactgtggacagaaaacaccaggtcgaatccgatcctcatcgggcattctctccatggttttttacaccgacagcgcgatagcaaaagaaggtttctcagcaaactacagtgtcttgcagagcagtgtctcagaagatttcaaatgtatggaagctctgggcatggaatcaggagaaattcattctgaccagatcacagcttcttcccagtatagcaccaactggtctgcagagcgctcccgcctgaactaccctgagaatgggtggactcccggagaggattcctaccgagagtggatacaggtagacttgggccttctgcgctttgtcacggctgtcgggacacagggcgccatttcaaaagaaaccaagaagaaatattatgtcaagacttacaagatcgacgttagctccaacggggaagactggatcaccataaaagaaggaaacaaacctgttctctttcagggaaacaccaaccccacagatgttgtggttgcagtattccccaaaccactgataactcgatttgtccgaatcaagcctgcaacttgggaaactggcatatctatgagatttgaagtatacggttgcaagataacagattatccttgctctggaatgttgggtatggtgtctggacttatttctgactcccagatcacatcatccaaccaaggggacagaaactggatgcctgaaaacatccgcctggtaaccagtcgctctggctgggcacttccacccgcacctcattcctacatcaatgagtggctccaaatagacctgggggaggagaagatcgtgaggggcatcatcattcagggtgggaagcaccgagagaacaaggtgttcatgaggaagttcaagatcgggtacagcaacaacggctcggactggaagatgatcatggatgacagcaaacgcaaggcgaagtcttttgagggcaacaacaactatgatacacctgagctgcggacttttccagctctctccacgcgattcatcaggatctaccccgagagagccactcatggcggactggggctcagaatggagctgctgggctgtgaagtggaagcccctacagctggaccgaccactcccaacgggaacttggtggatgaatgtgatgacgaccaggccaactgccacagtggaacaggtgatgacttccagctcacaggtggcaccactgtgctggccacagaaaagcccacggtcatagacagcaccatacaatcagagtttccaacatatggttttaactgtgaatttggctggggctctcacaagaccttctgccactgggaacatgacaatcacgtgcagctcaagtggagtgtgttgaccagcaagacgggacccattcaggatcacacaggagatggcaacttcatctattcccaagctgacgaaaatcagaagggcaaagtggctcgcctggtgagccctgtggtttattcccagaactctgcccactgcatgaccttctggtatcacatgtctgggtcccacgtcggcacactcagggtcaaactgcgctaccagaagccagaggagtacgatcagctggtctggatggccattggacaccaaggtgaccactggaaggaagggcgtgtcttgctccacaagtctctgaaactttatcaggtgattttcgagggcgaaatcggaaaaggaaaccttggtgggattgctgtggatgacattagtattaataaccacatttcacaagaagattgtgcaaaaccagcagacctggataaaaagaacccagaaattaaaattgatgaaacagggagcacgccaggatacgaaggtgaaggagaaggtgacaagaacatctccaggaagccaggcaatgtgttgaagaccttagaccccatcctcatcaccatcatagccatgagtgccctgggggtcctcctgggggctgtctgtggggtcgtgctgtactgtgcctgttggcataatgggatgtcagaaagaaacttgtctgccctggagaactataactttgaacttgtggatggtgtgaagttgaaaaaagacaaactgaatacacagagtacttattcggaggcatgaaggcagacagagatgaaaagacagtcaaaggacggaagtggaaggacgggagtgagctggggagctgttgatctttcactatacaggctgggaagtgtgttgatgaccactgagccaggcttttctcaggagcttcaatgagtatggccgacagacatggacaaggagctgtgttcaccatcggactcatgtgcagtcagcttttttcctgttggtttcatttgaataatcagatgctggtgttgagaccaagtatgattgacataatcattcatttcgacccctcctgcc

SEQ ID NO: 379355 - DNA, 4035 bp, Homo sapiens
ttttttttttgttttttttgagacatggcccgggcagtggctcctggaagaggaacaagtgtgggaaaagggagaggaagccggagctaaatgacaggatgcaggcgacttgagacacaaaaagagaagcgttcctctcggatccaggcattgcctcgctgctttcttttctccaagacgggctgaggattgtacagctctaggcggagttggggctcttcggatcgcttagattctcctctttgctgcatttccccccacgtcctcgttctcccgcgtctgcctgcggacccggagaagggagaatggagagggggctgccgctcctctgcgccgtgctcgccctcgtcctcgccccggccggcgcttttcgcaacgataaatgtggcgatactataaaaattgaaagccccgggtaccttacatctcctggttatcctcattcttatcacccaagtgaaaaatgcgaatggctgattcaggctccggacccataccagagaattatgatcaacttcaaccctcacttcgatttggaggacagagactgcaagtatgactacgtggaagtcttcgatggagaaaatgaaaatggacattttaggggaaagttctgtggaaagatagcccctcctcctgttgtgtcttcagggccatttctttttatcaaatttgtctctgactacgaaacacatggtgcaggattttccatacgttatgaaattttcaagagaggtcctgaatgttcccagaactacacaacacctagtggagtgataaagtcccccggattccctgaaaaatatcccaacagccttgaatgcacttatattgtctttgcgccaaagatgtcagagattatcctggaatttgaaagctttgacctggagcctgactcaaatcctccaggggggatgttctgtcgctacgaccggctagaaatctgggatggattccctgatgttggccctcacattgggcgttactgtggacagaaaacaccaggtcgaatccgatcctcatcgggcattctctccatggttttttacaccgacagcgcgatagcaaaagaaggtttctcagcaaactacagtgtcttgcagagcagtgtctcagaagatttcaaatgtatggaagctctgggcatggaatcaggagaaattcattctgaccagatcacagcttcttcccagtatagcaccaactggtctgcagagcgctcccgcctgaactaccctgagaatgggtggactcccggagaggattcctaccgagagtggatacaggtagacttgggccttctgcgctttgtcacggctgtcgggacacagggcgccatttcaaaagaaaccaagaagaaatattatgtcaagacttacaagatcgacgttagctccaacggggaagactggatcaccataaaagaaggaaacaaacctgttctctttcagggaaacaccaaccccacagatgttgtggttgcagtattccccaaaccactgataactcgatttgtccgaatcaagcctgcaacttgggaaactggcatatctatgagatttgaagtatacggttgcaagataacagattatccttgctctggaatgttgggtatggtgtctggacttatttctgactcccagatcacatcatccaaccaaggggacagaaactggatgcctgaaaacatccgcctggtaaccagtcgctctggctgggcacttccacccgcacctcattcctacatcaatgagtggctccaaatagacctgggggaggagaagatcgtgaggggcatcatcattcagggtgggaagcaccgagagaacaaggtgttcatgaggaagttcaagatcgggtacagcaacaacggctcggactggaagatgatcatggatgacagcaaacgcaaggcgaagtcttttgagggcaacaacaactatgatacacctgagctgcggacttttccagctctctccacgcgattcatcaggatctaccccgagagagccactcatggcggactggggctcagaatggagctgctgggctgtgaagtggaagcccctacagctggaccgaccactcccaacgggaacttggtggatgaatgtgatgacgaccaggccaactgccacagtggaacaggtgatgacttccagctcacaggtgcagaaaccatcttcatcccattgctgtaccatttcagttcatgtcttagttgggaccagctaacgcctgtgtgtgtgcttgtaactccgcatggcagagagctgcccaggaatagaagctgccttgccagaacacgtgcatcttcatttcctcatgtcatctggatagatgagttgttcttaatagccacaaccatttgtaacaataatttgagccatttcgagagccaaaggctaggattatcttaattgaataagaatttccccatggctaaatgtactaaaccgatccttattttcattattttcagacccccccccaataacacgtgcaccacccctacgtaaccacacacttcagaatgtttattttcattttctaatgaggacaagtttttttgagtggatcctttatccaacaaatggataaagttaggcttatatttgaagtgcggcttttaagttgggatttggtaaatcattgtacattaacatttacaaaggcagaattagctgctatttcacatcaccaccgaccagcaaatgcatcagagatgttgtgtgccaaatgtctcactaattaatctagagtattactctctaatctcctaaaaccctaaaagctaggaaatgaccttctcttccacttggaatggcagaggaaatattaggcaagtggagaaatgggattataccatttggaaattggccaaggcactagggttttcaccctgtggttgcaaaaggtatcgtgggacttttactgctccctgggtcaaaacgcagtttcaatagcatctgactctcatttgagattaaacatgagcttttgaatgcaggtctgcatttttacccagaagggactcggagagcccacataattaatttccatgggcaaaactgaaggcgttaccatgtaacttcataataaagccatgttattggctaatgcattcgtacaaaatctggaaggaagtgtcctagagtacatttccaattatttcaaaagctctcctctgaaggagtgagagggctctgcactctaagatggaataaagagtaaaagaaagaaaaaaaaattgaaaatctgtcccagaaatttagtactgtgaactgagtttacatttaaatcccacctcctaaagctgtctctctccaaatttccaggataatcatttacattcatatggccaataaatgtcacattgctatgagcttttgaatgcaaatcttgtatacaagcagccacaagccacaaaacttagattaattaatgcagagacattttctgtgtaacatgtcaagttcaagttgaaaactcaaccactgatataaaaaacagagtactattccatgaaccaagtcctctggaagcttcccggggttgcctgtaaacactctgccacaaacctcaggctttttacagaccccgtcacacatccatagtgaaatttctcataaaaaaggaatgattgcaggatcccagtgtgccctttcaattgccctcttgtggaaggggttcttttcttcataaaccctaaagtggtcagttaatattgattagaaacaaagcctcagatttactcctcatatcagaacaaccagccttctcatttttgcattagttcatgactgaatcaattgaaactgaaggctttgaatgaaatagggcgagtatgttagcctggagcaaattgtgtatggcagcgagttacaaaccacagaaaatgggtcatttatagtggaaacactgacaacctttcaaaactataaggttttgctttacctacagtgtttcaattatttctttggtagatagaagaaagttcattctgattttttctttttacatattagcatggtg

SEQ ID NO: 379356 - DNA, 1321 bp, Homo sapiens
ctggagaggacaggtggatgggagactgcaatttcaacaagcattctggtgattcttatggttgggcaagtttaagaacactactttaaaacagaagtataatgatgaacagtgggaaatgggtggcaccactgtgctggccacagaaaagcccacggtcatagacagcaccatacaatcagagtttccaacatatggttttaactgtgaatttggctggggctctcacaagaccttctgccactgggaacatgacaatcacgtgcagctcaagtggagtgtgttgaccagcaagacgggacccattcaggatcacacaggagatggcaacttcatctattcccaagctgacgaaaatcagaagggcaaagtggctcgcctggtgagccctgtggtttattcccagaactctgcccactgcatgaccttctggtatcacatgtctgggtcccacgtcggcacactcagggtcaaactgcgctaccagaagccagaggagtacgatcagctggtctggatggccattggacaccaaggtgaccactggaaggaagggcgtgtcttgctccacaagtctctgaaactttatcaggtgattttcgagggcgaaatcggaaaaggaaaccttggtgggattgctgtggatgacattagtattaataaccacatttcacaagaagattgtgcaaaaccagcagacctggataaaaagaacccagaaattaaaattgatgaaacagggagcacgccaggatacgaaggtgaaggagaaggtgacaagaacatctccaggaagccaggcaatgtgttgaagaccttagaccccatcctcatcaccatcatagccatgagtgccctgggggtcctcctgggggctgtctgtggggtcgtgctgtactgtgcctgttggcataatgggatgtcagaaagaaacttgtctgccctggagaactataactttgaacttgtggatggtgtgaagttgaaaaaagacaaactgaatacacagagtacttattcggaggcatgaaggcagacagagatgaaaagacagtcaaaggacggaagtggaaggacgggagtgagctggggagctgttgatctttcactatacaggctgggaagtgtgttgatgaccactgagccaggcttttctcaggagcttcaatgagtatggccgacagacatggacaaggagctgtgttcaccatcggactcatgtgcagtcagcttttttcctgttggtttcatttgaataatcagatgctggtgttgagaccaagtatgattgacataatcattcatttcgacccctcctgcc

SEQ ID NO: 379357 - DNA, 2329 bp, Homo sapiens
ttttttttttgttttttttgagacatggcccgggcagtggctcctggaagaggaacaagtgtgggaaaagggagaggaagccggagctaaatgacaggatgcaggcgacttgagacacaaaaagagaagcgttcctctcggatccaggcattgcctcgctgctttcttttctccaagacgggctgaggattgtacagctctaggcggagttggggctcttcggatcgcttagattctcctctttgctgcatttccccccacgtcctcgttctcccgcgtctgcctgcggacccggagaagggagaatggagagggggctgccgctcctctgcgccgtgctcgccctcgtcctcgccccggccggcgcttttcgcaacgataaatgtggcgatactataaaaattgaaagccccgggtaccttacatctcctggttatcctcattcttatcacccaagtgaaaaatgcgaatggctgattcaggctccggacccataccagagaattatgatcaacttcaaccctcacttcgatttggaggacagagactgcaagtatgactacgtggaagtcttcgatggagaaaatgaaaatggacattttaggggaaagttctgtggaaagatagcccctcctcctgttgtgtcttcagggccatttctttttatcaaatttgtctctgactacgaaacacatggtgcaggattttccatacgttatgaaattttcaagagaggtcctgaatgttcccagaactacacaacacctagtggagtgataaagtcccccggattccctgaaaaatatcccaacagccttgaatgcacttatattgtctttgcgccaaagatgtcagagattatcctggaatttgaaagctttgacctggagcctgactcaaatcctccaggggggatgttctgtcgctacgaccggctagaaatctgggatggattccctgatgttggccctcacattgggcgttactgtggacagaaaacaccaggtcgaatccgatcctcatcgggcattctctccatggttttttacaccgacagcgcgatagcaaaagaaggtttctcagcaaactacagtgtcttgcagagcagtgtctcagaagatttcaaatgtatggaagctctgggcatggaatcaggagaaattcattctgaccagatcacagcttcttcccagtatagcaccaactggtctgcagagcgctcccgcctgaactaccctgagaatgggtggactcccggagaggattcctaccgagagtggatacaggtagacttgggccttctgcgctttgtcacggctgtcgggacacagggcgccatttcaaaagaaaccaagaagaaatattatgtcaagacttacaagatcgacgttagctccaacggggaagactggatcaccataaaagaaggaaacaaacctgttctctttcagggaaacaccaaccccacagatgttgtggttgcagtattccccaaaccactgataactcgatttgtccgaatcaagcctgcaacttgggaaactggcatatctatgagatttgaagtatacggttgcaagataacagattatccttgctctggaatgttgggtatggtgtctggacttatttctgactcccagatcacatcatccaaccaaggggacagaaactggatgcctgaaaacatccgcctggtaaccagtcgctctggctgggcacttccacccgcacctcattcctacatcaatgagtggctccaaatagacctgggggaggagaagatcgtgaggggcatcatcattcagggtgggaagcaccgagagaacaaggtgttcatgaggaagttcaagatcgggtacagcaacaacggctcggactggaagatgatcatggatgacagcaaacgcaaggcgaagtcttttgagggcaacaacaactatgatacacctgagctgcggacttttccagctctctccacgcgattcatcaggatctaccccgagagagccactcatggcggactggggctcagaatggagctgctgggctgtgaagtggaaggtggcaccactgtgctggccacagaaaagcccacggtcatagacagcaccatacaatcaggtatcaaataaaatacgaaatgtgacagaaaacaaaaaaaaaaaaaaacacaaacacacgacacacacaaacaaataaaaataataaaatataaaaacaaaaaatataaataaaaaaaacaaataataaaaataaatataaagaaaaaataaacaagaaggaaaggagagcgaggagtaaaaacaacaacacacacaacaacaag

SEQ ID NO: 379358 - DNA, 2008 bp, Homo sapiens
ttttttttttgttttttttgagacatggcccgggcagtggctcctggaagaggaacaagtgtgggaaaagggagaggaagccggagctaaatgacaggatgcaggcgacttgagacacaaaaagagaagcgttcctctcggatccaggcattgcctcgctgctttcttttctccaagacgggctgaggattgtacagctctaggcggagttggggctcttcggatcgcttagattctcctctttgctgcatttccccccacgtcctcgttctcccgcgtctgcctgcggacccggagaagggagaatggagagggggctgccgctcctctgcgccgtgctcgccctcgtcctcgccccggccggcgcttttcgcaacgataaatgtggcgatactataaaaattgaaagccccgggtaccttacatctcctggttatcctcattcttatcacccaagtgaaaaatgcgaatggctgattcaggctccggacccataccagagaattatgatcaacttcaaccctcacttcgatttggaggacagagactgcaagtatgactacgtggaagtcttcgatggagaaaatgaaaatggacattttaggggaaagttctgtggaaagatagcccctcctcctgttgtgtcttcagggccatttctttttatcaaatttgtctctgactacgaaacacatggtgcaggattttccatacgttatgaaattttcaagagaggtcctgaatgttcccagaactacacaacacctagtggagtgataaagtcccccggattccctgaaaaatatcccaacagccttgaatgcacttatattgtctttgcgccaaagatgtcagagattatcctggaatttgaaagctttgacctggagcctgactcaaatcctccaggggggatgttctgtcgctacgaccggctagaaatctgggatggattccctgatgttggccctcacattgggcgttactgtggacagaaaacaccaggtcgaatccgatcctcatcgggcattctctccatggttttttacaccgacagcgcgatagcaaaagaaggtttctcagcaaactacagtgtcttgcagagcagtgtctcagaagatttcaaatgtatggaagctctgggcatggaatcaggagaaattcattctgaccagatcacagcttcttcccagtatagcaccaactggtctgcagagcgctcccgcctgaactaccctgagaatgggtggactcccggagaggattcctaccgagagtggatacaggtagacttgggccttctgcgctttgtcacggctgtcgggacacagggcgccatttcaaaagaaaccaagaagaaatattatgtcaagacttacaagatcgacgttagctccaacggggaagactggatcaccataaaagaaggaaacaaacctgttctctttcagggaaacaccaaccccacagatgttgtggttgcagtattccccaaaccactgataactcgatttgtccgaatcaagcctgcaacttgggaaactggcatatctatgagatttgaagtatacggttgcaagataacagattatccttgctctggaatgttgggtatggtgtctggacttatttctgactcccagatcacatcatccaaccaaggggacagaaactggatgcctgaaaacatccgcctggtaaccagtcgctctggctgggcacttccacccgcacctcattcctacatcaatgagtggctccaaatagacctgggggaggagaagatcgtgaggggcatcatcattcagggtgggaagcaccgagagaacaaggtgttcatgaggaagttcaagatcgggtacagcaacaacggctcggactggaagatgatcatggatgacagcaaacgcaaggcgaaggtggcaccactgtgctggccacagaaaagcccacggtcatagacagcaccatacaatcaggtatcaaataaaatacgaaatgtgacaga

SEQ ID NO: 379359 - DNA, 2206 bp, Homo sapiens
  misc_feature (2204)..(2204): n is a, c, g, or t
ttttttttttgttttttttgagacatggcccgggcagtggctcctggaagaggaacaagtgtgggaaaagggagaggaagccggagctaaatgacaggatgcaggcgacttgagacacaaaaagagaagcgttcctctcggatccaggcattgcctcgctgctttcttttctccaagacgggctgaggattgtacagctctaggcggagttggggctcttcggatcgcttagattctcctctttgctgcatttccccccacgtcctcgttctcccgcgtctgcctgcggacccggagaagggagaatggagagggggctgccgctcctctgcgccgtgctcgccctcgtcctcgccccggccggcgcttttcgcaacgataaatgtggcgatactataaaaattgaaagccccgggtaccttacatctcctggttatcctcattcttatcacccaagtgaaaaatgcgaatggctgattcaggctccggacccataccagagaattatgatcaacttcaaccctcacttcgatttggaggacagagactgcaagtatgactacgtggaagtcttcgatggagaaaatgaaaatggacattttaggggaaagttctgtggaaagatagcccctcctcctgttgtgtcttcagggccatttctttttatcaaatttgtctctgactacgaaacacatggtgcaggattttccatacgttatgaaattttcaagagaggtcctgaatgttcccagaactacacaacacctagtggagtgataaagtcccccggattccctgaaaaatatcccaacagccttgaatgcacttatattgtctttgcgccaaagatgtcagagattatcctggaatttgaaagctttgacctggagcctgactcaaatcctccaggggggatgttctgtcgctacgaccggctagaaatctgggatggattccctgatgttggccctcacattgggcgttactgtggacagaaaacaccaggtcgaatccgatcctcatcgggcattctctccatggttttttacaccgacagcgcgatagcaaaagaaggtttctcagcaaactacagtgtcttgcagagcagtgtctcagaagatttcaaatgtatggaagctctgggcatggaatcaggagaaattcattctgaccagatcacagcttcttcccagtatagcaccaactggtctgcagagcgctcccgcctgaactaccctgagaatgggtggactcccggagaggattcctaccgagagtggatacaggtagacttgggccttctgcgctttgtcacggctgtcgggacacagggcgccatttcaaaagaaaccaagaagaaatattatgtcaagacttacaagatcgacgttagctccaacggggaagactggatcaccataaaagaaggaaacaaacctgttctctttcagggaaacaccaaccccacagatgttgtggttgcagtattccccaaaccactgataactcgatttgtccgaatcaagcctgcaacttgggaaactggcatatctatgagatttgaagtatacggttgcaagataacagattatccttgctctggaatgttgggtatggtgtctggacttatttctgactcccagatcacatcatccaaccaaggggacagaaactggatgcctgaaaacatccgcctggtaaccagtcgctctggctgggcacttccacccgcacctcattcctacatcaatgagtggctccaaatagacctgggggaggagaagatcgtgaggggcatcatcattcagggtgggaagcaccgagagaacaaggtgttcatgaggaagttcaagatcgggtacagcaacaacggctcggactggaagatgatcatggatgacagcaaacgcaaggcgaagtcttttgagggcaacaacaactatgatacacctgagctgcggacttttccagctctctccacgcgattcatcaggatctaccccgagagagccactcatggcggactggggctcagaatggagctgctgggctgtgaagtggaagcccctacagctggaccgaccactcccaacgggaacttggtggatgaatgtgatgacgaccaggccaactgccacagtggaacagggcactcttttttgttggccacagaaaagccgaggtttatagaaagtataatttantt

SEQ ID NO: 379360 - DNA, 1998 bp, Homo sapiens
ttttttttttgttttttttgagacatggcccgggcagtggctcctggaagaggaacaagtgtgggaaaagggagaggaagccggagctaaatgacaggatgcaggcgacttgagacacaaaaagagaagcgttcctctcggatccaggcattgcctcgctgctttcttttctccaagacgggctgaggattgtacagctctaggcggagttggggctcttcggatcgcttagattctcctctttgctgcatttccccccacgtcctcgttctcccgcgtctgcctgcggacccggagaagggagaatggagagggggctgccgctcctctgcgccgtgctcgccctcgtcctcgccccggccggcgcttttcgcaacgataaatgtggcgatactataaaaattgaaagccccgggtaccttacatctcctggttatcctcattcttatcacccaagtgaaaaatgcgaatggctgattcaggctccggacccataccagagaattatgatcaacttcaaccctcacttcgatttggaggacagagactgcaagtatgactacgtggaagtcttcgatggagaaaatgaaaatggacattttaggggaaagttctgtggaaagatagcccctcctcctgttgtgtcttcagggccatttctttttatcaaatttgtctctgactacgaaacacatggtgcaggattttccatacgttatgaaattttcaagagaggtcctgaatgttcccagaactacacaacacctagtggagtgataaagtcccccggattccctgaaaaatatcccaacagccttgaatgcacttatattgtctttgcgccaaagatgtcagagattatcctggaatttgaaagctttgacctggagcctgactcaaatcctccaggggggatgttctgtcgctacgaccggctagaaatctgggatggattccctgatgttggccctcacattgggcgttactgtggacagaaaacaccaggtcgaatccgatcctcatcgggcattctctccatggttttttacaccgacagcgcgatagcaaaagaaggtttctcagcaaactacagtgtcttgcagagcagtgtctcagaagatttcaaatgtatggaagctctgggcatggaatcaggagaaattcattctgaccagatcacagcttcttcccagtatagcaccaactggtctgcagagcgctcccgcctgaactaccctgagaatgggtggactcccggagaggattcctaccgagagtggatacaggtagacttgggccttctgcgctttgtcacggctgtcgggacacagggcgccatttcaaaagaaaccaagaagaaatattatgtcaagacttacaagatcgacgttagctccaacggggaagactggatcaccataaaagaaggaaacaaacctgttctctttcagggaaacaccaaccccacagatgttgtggttgcagtattccccaaaccactgataactcgatttgtccgaatcaagcctgcaacttgggaaactggcatatctatgagatttgaagtatacggttgcaagataacagattatccttgctctggaatgttgggtatggtgtctggacttatttctgactcccagatcacatcatccaaccaaggggacagaaactggatgcctgaaaacatccgcctggtaaccagtcgctctggctgggcacttccacccgcacctcattcctacatcaatgagtggctccaaatagacctgggggaggagaagatcgtgaggggcatcatcattcagggtgggaagcaccgagagaacaaggtgttcatgaggaagttcaagatcgggtacagcaacaacggctcggactggaagatgatcatggatgacagcaaacgcaaggcgaaggtgagggctggggactgggaggaggtcatcccttatgtccttgacttcaatcaagggcctctggcattctcccgaggaa

SEQ ID NO: 379361 - DNA, 1707 bp, Homo sapiens
ttttttttttgttttttttgagacatggcccgggcagtggctcctggaagaggaacaagtgtgggaaaagggagaggaagccggagctaaatgacaggatgcaggcgacttgagacacaaaaagagaagcgttcctctcggatccaggcattgcctcgctgctttcttttctccaagacgggctgaggattgtacagctctaggcggagttggggctcttcggatcgcttagattctcctctttgctgcatttccccccacgtcctcgttctcccgcgtctgcctgcggacccggagaagggagaatggagagggggctgccgctcctctgcgccgtgctcgccctcgtcctcgccccggccggcgcttttcgcaacgataaatgtggcgatactataaaaattgaaagccccgggtaccttacatctcctggttatcctcattcttatcacccaagtgaaaaatgcgaatggctgattcaggctccggacccataccagagaattatgatcaacttcaaccctcacttcgatttggaggacagagactgcaagtatgactacgtggaagtcttcgatggagaaaatgaaaatggacattttaggggaaagttctgtggaaagatagcccctcctcctgttgtgtcttcagggccatttctttttatcaaatttgtctctgactacgaaacacatggtgcaggattttccatacgttatgaaattttcaagagaggtcctgaatgttcccagaactacacaacacctagtggagtgataaagtcccccggattccctgaaaaatatcccaacagccttgaatgcacttatattgtctttgcgccaaagatgtcagagattatcctggaatttgaaagctttgacctggagcctgactcaaatcctccaggggggatgttctgtcgctacgaccggctagaaatctgggatggattccctgatgttggccctcacattgggcgttactgtggacagaaaacaccaggtcgaatccgatcctcatcgggcattctctccatggttttttacaccgacagcgcgatagcaaaagaaggtttctcagcaaactacagtgtcttgcagagcagtgtctcagaagatttcaaatgtatggaagctctgggcatggaatcaggagaaattcattctgaccagatcacagcttcttcccagtatagcaccaactggtctgcagagcgctcccgcctgaactaccctgagaatgggtggactcccggagaggattcctaccgagagtggatacaggatgcaaaatacagactccgtgtatcagtggtgcgatcaaaatcttcctcttcaagcacatcattagaacccaggccattaagctcattgaaactgagtttcttttcctataaaataaaaataacgtagccttcactccattcaggctctctcaatctgtgatctatgaatctcagagaaatgcagtttcagtttttccttttcatttccgcaaactaagtacacagtgtactgcatcttctagggagacgttctcaaagatcctgaacgtagccattgacacgcaaagcagaatttaattcgttaattatttcaatgttttattaatgatagtgttcaccacactgtaaacagatttatccttccagctttaattaaagctcttgggagtgctttcctcaaaataactgtgacttttctc

SEQ ID NO: 379362 - DNA, 1655 bp, Homo sapiens
gtttcatttcacttcccagattatccttgctctggaatgttgggtatggtgtctggacttatttctgactcccagatcacatcatccaaccaaggggacagaaactggatgcctgaaaacatccgcctggtaaccagtcgctctggctgggcacttccacccgcacctcattcctacatcaatgagtggctccaaatagacctgggggaggagaagatcgtgaggggcatcatcattcagggtgggaagcaccgagagaacaaggtgttcatgaggaagttcaagatcgggtacagcaacaacggctcggactggaagatgatcatggatgacagcaaacgcaaggcgaagcccctacagctggaccgaccactcccaacgggaacttggtggatgaatgtgatgacgaccaggccaactgccacagtggaacaggtgatgacttccagctcacaggtggcaccactgtgctggccacagaaaagcccacggtcatagacagcaccatacaatcagagtttccaacatatggttttaactgtgaatttggctggggctctcacaagaccttctgccactgggaacatgacaatcacgtgcagctcaagtggagtgtgttgaccagcaagacgggacccattcaggatcacacaggagatggcaacttcatctattcccaagctgacgaaaatcagaagggcaaagtggctcgcctggtgagccctgtggtttattcccagaactctgcccactgcatgaccttctggtatcacatgtctgggtcccacgtcggcacactcagggtcaaactgcgctaccagaagccagaggagtacgatcagctggtctggatggccattggacaccaaggtgaccactggaaggaagggcgtgtcttgctccacaagtctctgaaactttatcaggtgattttcgagggcgaaatcggaaaaggaaaccttggtgggattgctgtggatgacattagtattaataaccacatttcacaagaagattgtgcaaaaccagcagacctggataaaaagaacccagaaattaaaattgatgaaacagggagcacgccaggatacgaaggtgaaggagaaggtgacaagaacatctccaggaagccaggcaatgtgttgaagaccttagaccccatcctcatcaccatcatagccatgagtgccctgggggtcctcctgggggctgtctgtggggtcgtgctgtactgtgcctgttggcataatgggatgtcagaaagaaacttgtctgccctggagaactataactttgaacttgtggatggtgtgaagttgaaaaaagacaaactgaatacacagagtacttattcggaggcatgaaggcagacagagatgaaaagacagtcaaaggacggaagtggaaggacgggagtgagctggggagctgttgatctttcactatacaggctgggaagtgtgttgatgaccactgagccaggcttttctcaggagcttcaatgagtatggccgacagacatggacaaggagctgtgttcaccatcggactcatgtgcagtcagcttttttcctgttggtttcatttgaataatcagatgctggtgttgagaccaagtatgattgacataatcattcatttcgacccctcctgcc

SEQ ID NO: 379363 - DNA, 359 bp, Homo sapiens
aggtgggctttccccaacgctgccctcttgacccttggagctctcccaggattcctcagatttccccagcgcccctttggcactgtgtctcctcctctttgccctgccttctccctgtcccaccaccacctcctcaccctgtctatccctcctcctctttgctctggctccttgccaccaggatcttttcctaacttttttctttcctagtagagacaatgggctgacaacctgacttccaaaaaatattgaggaaaggcaaaaactagtttttaggccaggtgtggtgactcaagcctgtaattccagggctttgggaggctgaggttggaggattgcttgaggccaggtgtaggaca

SEQ ID NO: 379364 - DNA, 1613 bp, Homo sapiens
tttacagggcataactcattttatccttaccacaatcctatgaagtaggaacttttataaaacgcattttatatacaagggcacagagaggttaattaacttgccctctggtcacacagctaggaagtgggcagagtacagatttacactaggcatccgtctcctggccccacatacccagctgctgtaaacccataccggcggccaagcagcctcaatttgtgcatgcacccacttcccagcaagacagcagctcccaagttcctcctgtttagaattttagaagcggcgggccaccaggctgcagtctcccttgggtcaggggtcctggttgcactccgtgctttgcacaaagcaggctctccatttttgttaaatgcacgaatagtgctaagctgggaagttcttcctgaggtctaacctctagctgctcccccacagaagagtgcctgcggccagtggccaccaggggtcgccgcagcacccagcgctggagggcggagcgggcggcagacccggagcagcatgtggactctcgggcgccgcgcagtagccggcctcctggcgtcacccagcccggcccaggcccagaccctcacccgggtcccgcggccggcagagttggccccactctgcggccgccgtggcctgcgcaccgacatcgatgcgacctgcacgccccgccgcgcaagttcgaaccaacgtggcctcaaccagatttggaatgtcaaaaagcagagtgtctatttgatgaatttgaggaaatctggaactttgggccacccaggctctctagatgagaccacctatgaaagactagcagaggaaacgctggactctttagcagagttttttgaagaccttgcagacaagccatacacgtttgaggactatgatgtctcctttgggagtggtgtcttaactgtcaaactgggtggagatctaggaacctatgtgatcaacaagcagacgccaaacaagcaaatctggctatcttctccatccagtggacctaagcgttatgactggactgggaaaaactgggtgtactcccacgacggcgtgtccctccatgagctgctggccgcagagctcactaaagccttaaaaaccaaactggacttgtcttccttggcctattccggaaaagatgcttgatgcccagccccgttttaaggacattaaaagctatcaggccaagaccccagcttcattatgcagctgaggtctgttttgttgttgttgttgtttattttttttattcctgcttttgaggacagttgggctatgtgtcacagctctgtagaaagaatgtgttgcctcctaccttgcccccaagttctgatttttaatttctatggaagattttttggattgtcggatttcctccctcacatgataccccttatcttttataatgtcttatgcctatacctgaatataacaacctttaaaaaagcaaaataataagaaggaaaaattccaggagggaaaatgaattgtcttcactcttcattctttgaaggatttactgcaagaagtacatgaagagcagctggtcaacctgctcactgttctatctccaaatgagacacattaaagggtagcctaca

SEQ ID NO: 379365 - DNA, 1492 bp, Homo sapiens
tttacagggcataactcattttatccttaccacaatcctatgaagtaggaacttttataaaacgcattttatatacaagggcacagagaggttaattaacttgccctctggtcacacagctaggaagtgggcagagtacagatttacactaggcatccgtctcctggccccacatacccagctgctgtaaacccataccggcggccaagcagcctcaatttgtgcatgcacccacttcccagcaagacagcagctcccaagttcctcctgtttagaattttagaagcggcgggccaccaggctgcagtctcccttgggtcaggggtcctggttgcactccgtgctttgcacaaagcaggctctccatttttgttaaatgcacgaatagtgctaagctgggaagttcttcctgaggtctaacctctagctgctcccccacagaagagtgcctgcggccagtggccaccaggggtcgccgcagcacccagcgctggagggcggagcgggcggcagacccggagcagcatgtggactctcgggcgccgcgcagtagccggcctcctggcgtcacccagcccggcccaggcccagaccctcacccgggtcccgcggccggcagagttggccccactctgcggccgccgtggcctgcgcaccgacatcgatgcgacctgcacgccccgccgcgcaagttcgaaccaacgtggcctcaaccagatttggaatgtcaaaaagcagagtgtctatttgatgaatttgaggaaatctggaactttgggccacccaggagtggtgtcttaactgtcaaactgggtggagatctaggaacctatgtgatcaacaagcagacgccaaacaagcaaatctggctatcttctccatccagtggacctaagcgttatgactggactgggaaaaactgggtgtactcccacgacggcgtgtccctccatgagctgctggccgcagagctcactaaagccttaaaaaccaaactggacttgtcttccttggcctattccggaaaagatgcttgatgcccagccccgttttaaggacattaaaagctatcaggccaagaccccagcttcattatgcagctgaggtctgttttgttgttgttgttgtttattttttttattcctgcttttgaggacagttgggctatgtgtcacagctctgtagaaagaatgtgttgcctcctaccttgcccccaagttctgatttttaatttctatggaagattttttggattgtcggatttcctccctcacatgataccccttatcttttataatgtcttatgcctatacctgaatataacaacctttaaaaaagcaaaataataagaaggaaaaattccaggagggaaaatgaattgtcttcactcttcattctttgaaggatttactgcaagaagtacatgaagagcagctggtcaacctgctcactgttctatctccaaatgagacacattaaagggtagcctaca

SEQ ID NO: 379366 - DNA, 1650 bp, Homo sapiens
tttacagggcataactcattttatccttaccacaatcctatgaagtaggaacttttataaaacgcattttatatacaagggcacagagaggttaattaacttgccctctggtcacacagctaggaagtgggcagagtacagatttacactaggcatccgtctcctggccccacatacccagctgctgtaaacccataccggcggccaagcagcctcaatttgtgcatgcacccacttcccagcaagacagcagctcccaagttcctcctgtttagaattttagaagcggcgggccaccaggctgcagtctcccttgggtcaggggtcctggttgcactccgtgctttgcacaaagcaggctctccatttttgttaaatgcacgaatagtgctaagctgggaagttcttcctgaggtctaacctctagctgctcccccacagaagagtgcctgcggccagtggccaccaggggtcgccgcagcacccagcgctggagggcggagcgggcggcagacccggagcagcatgtggactctcgggcgccgcgcagtagccggcctcctggcgtcacccagcccggcccaggcccagaccctcacccgggtcccgcggccggcagagttggccccactctgcggccgccgtggcctgcgcaccgacatcgatgcgacctgcacgccccgccgcgcaagttcgaaccaacgtggcctcaaccagatttggaatgtcaaaaagcagagtgtctatttgatgaatttgaggaaatctggaactttgggccacccaggctctctagatgagaccacctatgaaagactagcagaggaaacgctggactctttagcagagttttttgaagaccttgcagacaagccatacacgtttgaggactatgatgtctcctttgggagtggtgtcttaactgtcaaactgggtggagatctaggaacctatgtgatcaacaagcagacgccaaacaagcaaatctggctatcttctccatccagtggacctaagcgttatgactggactgggaaaaactgggtgtactcccacgacggcgtgtccctccatgagctgctggccgcagagctcactaaagccttaaaaaccaaactggacttgtcttccttggcctattccggaaaagatgcttgatgcccagccccgttttaaggacattaaaagctatcaggccaagaccccagcttcattatgcagctgaggtctgttttgttgttgttgttgtttattttttttattcctgcttttgaggacagttgggctatgtgtcacagctctgtagaaagaatgtgttgcctcctaccttgcccccaagttctgatttttaatttctatggaagattttttggattgtcggatttcctccctcacatgataccccttatcttttataatgtcttatgcctatacctgaatataacaacctttaaaaaagcaaaaaacaaaaaaaagggggggccgcccttttattttgttcttttaaaaaaatttcgtttgtaatattagctcaaaactcccaactcaccttgtatttaaacagggatggtgacacctcccagcccttaggagaaaaaatgtgatcccggtttactagaaaaaacttcccggacccttacaaaacccaaa

SEQ ID NO: 379367 - DNA, 468 bp, Homo sapiens
catcgatgcgacctgcacgccccgccgcgcagtaagtatccgcgccgggaacagccgcgggccgcacgccgcgggccgcacgccgcacgcctgcgcagggaggcgccgcgcacgccggggtcgctccgggtacgcgcgctggactagctcaccccgctccttctcagggcggcccggcggaagcggccttgcaactcccttctctggttctcccggttgcatttacactggcttctgctttccgaaggaaaaggggacattttgtcctgcggtgcgactgcgggtcaaggcacgggcgaaggcagggcaggctggtggaggggaccggttccgaggggtgtgcggctgtctccatgcttgtcacttctctgcgataacttgtttcagtaatattaatagatggtatctgctagtatatacatacacataatgtgtgtgtctgtgtgtatctgtatatagcgtgtgtgt

SEQ ID NO: 379368 - DNA, 3908 bp, Homo sapiens
cttctgtccgaagttgtgtcggaacgcatgccattataatgagtttttatatctggtgggagcttttacaagggtataaaataatgtgaatttagtgtatgtggagattttcctgttatctaagttcccagtttctctttcaatggcaagaaaacgggtttttgataaggcgcgcgccgcgggcagcttctgcctcagcgggtcttcggcggccgcgggaagacccgagagtcattagaagcgcaagatggcgactgcggccgaaacctcggcttcagaacccgaggctgagtccaaggctgggcccaaggctgacggagaggaggatgaggttaaggcggctaggacaaggagaaaggtgttatcgcgggctgtggccgctgcgacatacaagaccatggggccagcgtgggatcagcaggaggaaggcgtgagcgagagcgatggggatgagtacgccatggcttcctccgcggagagctcccccggggagtacgagtgggaatatgacgaagaggaggagaaaaaccagctggagattgagagactggaggagcagttgtctatcaacgtctatgactacaactgccatgtggacttgatcagactgctcaggctggaaggggagcttaccaaggtgaggatggcccgccagaagatgagtgaaatctttcccttgactgaagagctctggctggagtggctgcatgacgagatcagcatggcccaggatggcctggacagagagcacgtgtatgacctctttgagaaagccgtgaaggattacatttgtcctaacatttggctagagtatggccagtactcagttggtgggattggtcagaaaggtggccttgagaaagttcgctccgtgtttgaaagggctctctcgtctgttggtttacatatgaccaaaggactcgccctctgggaggcttaccgagagtttgaaagtgcgattgtggaagctgctcggcttgagaaagtccacagtcttttccggcgacagttggcgatcccactctatgatatggaggccacatttgcagagtatgaagaatggtcagaagacccaataccagagtcagtaattcagaactataacaaagcactacagcagctggagaaatataaaccctatgaagaagcactgttgcaggcagaggcaccaaggctggcagaatatcaagcatatatcgattttgagatgaaaattggcgatcctgctcgcattcagttgatctttgagcgcgccctggtcgagaactgccttgtcccagacttatggatccgttacagtcagtacctagatcgacaactgaaagtaaaggatttggttttatctgtacataaccgcgctattagaaactgcccctggacagttgccttatggagtcggtacctcttggccatggagagacatggagttgatcatcaagtaatttctgtaaccttcgagaaagctttgaatgccggcttcatccaggccactgattatgtggagatttggcaggcataccttgattacctgaggagaagggttgatttcaaacaagactccagtaaagagctggaggagttgagggccgcctttactcgtgccttggagtatctgaagcaggaggtggaagagcgtttcaatgagagtggtgatccaagctgcgtgattatgcagaactgggctaggattgaggctcgactgtgcaataacatgcagaaagctcgggaactctgggatagcatcatgaccagaggaaatgccaagtacgccaacatgtggctagagtattacaacctggaaagagctcatggtgacacccagcactgccggaaggctctgcaccgggccgtccagtgcaccagtgactacccagagcacgtctgcgaagtgttactcaccatggagaggacagaaggttctttagaagattgggatatagctgttcagaaaactgaaacccgattagctcgtgtcaatgagcagagaatgaaggctgcagagaaggaagcagcccttgtgcagcaagaagaagaaaaggctgaacaacggaaaagagctcgggctgagaagaaagcgttaaaaaagaagaaaaagatcagaggcccagagaagcgcggagcagatgaggacgatgagaaagagtggggcgatgatgaagaagagcagccttccaaacgcagaagggtcgagaacagcatccctgcagctggagaaacacaaaatgtagaagtagcagcagggcccgctgggaaatgtgctgccgtagatgtggagcccccttcgaagcagaaggagaaggcagcctccctgaagagggacatgcccaaggtgctgcacgacagcagcaaggacagcatcaccgtctttgtcagcaacctgccctacagcatgcaggagccggacacgaagctcaggccactcttcgaggcctgtggggaggtggtccagatccgacccatcttcagcaaccgtggggatttccgaggttactgctacgtggagtttaaagaagagaaatcagcccttcaggcactggagatggaccggaaaagtgtagaagggaggccaatgtttgtttccccctgtgtggataagagcaaaaaccccgattttaaggtgttcaggtacagcacttccctagagaaacacaagctgttcatctcaggcctgcctttctcctgtactaaagaggaactagaagaaatctgtaaggctcatggcaccgtgaaggacctcaggctggtcaccaaccgggctggcaaaccaaagggcctggcctacgtggagtatgaaaatgaatcccaggcgtcgcaggctgtgatgaagatggacggcatgactatcaaagagaacatcatcaaagtggcaatcagcaaccctcctcagaggaaagttccagagaagccagagaccaggaaggcaccaggtggccccatgcttttgccgcagacatacggagcgagggggaagggaaggacgcagctgtctctactgcctcgtgccctgcagcgcccaagtgctgcagctcctcaggctgagaacggccctgccgcggctcctgcagttgccgccccagcagccaccgaggcacccaagatgtccaatgccgattttgccaagctgtttctgagaaagtgaacgggacgctgggagacaggaaatgccttacttcactctggcccggcggacctcccaccacccagcagtgcactggggatggacaggcctggtgtgctgcgtgctcgcaaccacagatggctcctcggctttagacagaaaggggaaggggttctaagtcaagagcctttcagtgctccctcatattgagggcagtggcagaaaagtgaccactctgcaggctgggcccaggatgtggtgtcctgagatagttttgtatcttaaagactgaggcacagaagcgaaacgagaacacactgtttttgagacacagttgtccaaatgtttctggccagctccggcccctttttgtatgacacttctcttccaccctgcacagcacatgtgcccgtcattcttttaattttaaaagatgaaatggcagatgctagtaattcacagaatggcctcttgtgggggtgggtctgagggaagtcagctataaaacatttgctggagttttgttcaatggggctgtgcatttttatattatgtgtttgtaaatgacatgtcagcccttgtttcatgtttcctaaaagcagaatatttgcaacatttgttttgtataggaattatttgtgccacctgctgtggactgttttctttgcctagtgactagtgacctgtgttgtctaaacatgagtttcagccctttggttttgtttaataccatgtcaaatgcaaacttcaattctccccatttagctttattaaactgacgttctcttca

SEQ ID NO: 379369 - DNA, 1070 bp, Homo sapiens
cttctgtccgaagttgtgtcggaacgcatgccattataatgagtttttatatctggtgggagcttttacaagggtataaaataatgtgaatttagtgtatgtggagattttcctgttatctaagttcccagtttctctttcaatggcaagaaaacgggtttttgataaggcgcgcgccgcgggcagcttctgcctcagcgggtcttcggcggccgcgggaagacccgagagtcattagaagcgcaagatggcgactgcggccgaaacctcggcttcagaacccgaggctgagtccaaggctgggcccaaggctgacggagaggaggatgaggttaaggcggctaggacaaggagaaaggtgttatcgcgggctgtggccgctgcgacatacaagaccatggggccagcgtgggatcagcaggaggaaggcgtgagcgagagcgatggggatgagtacgccatggcttcctccgcggagagctcccccggggagtacgagtgggaatatgacgaagaggaggagaaaaaccagctggagattgagagactggaggagcagttgtctatcaacgtctatgactacaactgccatgtggacttgatcagactgctcaggctggaaggggagcttaccaaggtgaggatggcccgccagaagatgagtgaaatctttcccttgactgaagagctctggctggagtggctgcatgacgagatcagcatggcccaggatggcctggacagagagcacgtgtatgacctctttgagaaagccgtgaaggattacatttgtcctaacatttggctagagtatggccagtactcagttggtgggattggtcagaaaggtggccttgagaaagttcgctccgtgtttgaaagggctctctcgtctgttggtttacatatgaccaaaggactcgccctctgggaggcttaccgagagtttggaacaagttgccgattcgttggggaaaaggcctgtggccttccggggccttttgacagaaaaaagttcccacagctcctttttccggcgacagttggagatccactctatgatatggagg

SEQ ID NO: 379370 - DNA, 1171 bp, Homo sapiens
aaggagttttgactttgcagggcccctgagaggctctgggagatcctcaggggtacgtggatcttactttgagaaccagtgctctgaatttattctgagcatcataatatgtatatataattatgtatatttaaaatgttttaaaaacaaatatgaatacactgttgcataacagttatgattagcagaattgtgtagctgttgtgattagcagtgtacaaaaaggatctgtttgcgaccagccttgccaacctggtgaaaacctgtctctattagaaatacaaaaattagctgggtgtagtggtgggcacctgtaatcccagctactcaggaggctgaagcaggagaattgcctgaacctgggagacagaggttggagtgagccgagatcgtgctattgcactcccacctgggtgacaagagcgagactccccttccaaaaaaaaaaaaagatctgactctgggtatgaaatttgacactaccctggattcataactctcctgtcagtaggacgccatagtaaaatttccctggggactgtatcaggttacagagagctgttggactcccccgccatgtgccgcacatgtgaatgctgtaaaggcagaatgctggttgcagatcacaatatcaggtacactttccagtagcccctacatggctgagggagagagtgcttcagggaaatacttcgtaggtgactgtagagactctggaaggagaaagcatcatggatagatctgaaagctaaggtcttctcagaagctagagttactgaagagtgagtttctacctgggagaagacggcctctcccttcgagtgccttccactttgtgtcctggtggcagcaactttttgttttctgccttagagctcatggtgacacccagcactgccggaaggctctgcaccgggccgtccagtgcaccagtgactacccagagcacgtctgcgaagtgttactcaccatggagaggacagaaggtgggacccccagctctcttctggcttggagcctaacccatttgctgtttggtctcaagtaggagcatctggttacagtctggggacagactgtgtttatgctgccaccttaggtggtgccctatgattagactgtcacaagtgtcctgaaaatgagtcctcctgcagctcttctcaaattctgc

SEQ ID NO: 379371 - DNA, 405 bp, Homo sapiens
aaacgtgactatctagtactgtcgagtaagtaccgtgcgctccctctctcggttctcaggaaacataggtagattagcttgtggctgcagaaaggctcaagtgtttgggctgggtcgtttaccactggagggaggcctggggaatgcccagggacatctgtaacactaatagttgtggggtgctttttatgtgtgtctgttggaagtgtgttgtatgatgggtgtcgacgtcataaggttcaggtctcctaacagcctgctgatgcactttaggctcgactgtgcaataacatgcagaaagctcgggaactctgggatagcatcatgaccagaggaaatgccaagtacgccaacatgtggctagagtattacaacctggaaaggtaactgatctcggggtgggga

SEQ ID NO: 379372 - DNA, 380 bp, Homo sapiens
tgtaatgttttttagtcctttatggtcatctctgctgttaggccttcactgtcatttagtgctgctgtctgagtacttttttggtaggcacatttcgtttgttatgcatcagttttgatatttgggtattttatatcccaaactaattgaacacttcttatttttaggtcctaacatttggctagagtatggccagtactcagttggtgggattggtcagaaaggtggccttgagaaagttcgctccgtgtttgaaagggctctctcgtctgttggtttacatatgaccaaaggactcgccctctgggaggcttaccgagagtttgaaagtgcgattgtggaagctgctcgggtgagtacctgtggttgtctctgaacgg

SEQ ID NO: 379373 - DNA, 430 bp, Homo sapiens
tgagacctagttggaaaggcagagatagggtctctgaaaggaatagtgaatgacacctgtattttttggggaaacttcattgaacaagagttccattataatcattttctcttcacaagtaacctcttccataacagcaggaattttacatgagtttagatcattcctctatgggagggatttggttcagaagtgcagttgattggaagtactcataagtgagtttcttggggtttggtaaagagtttccttatttggtaaatacattttggcaatctaagcctttgagtctttggagctatgagtgtgtgcgtgctgggaggatttttctgagtatgggaagagtttgtcatggctgttgtgtttgttccctagacacgggcatgtgttgtacatactcagaacctctgggcaactttactggagccca

SEQ ID NO: 379374 - DNA, 4390 bp, Homo sapiens
cttctgtccgaagttgtgtcggaacgcatgccattataatgagtttttatatctggtgggagcttttacaagggtataaaataatgtgaatttagtgtatgtggagattttcctgttatctaagttcccagtttctctttcaatggcaagaaaacgggtttttgataaggcgcgcgccgcgggcagcttctgcctcagcgggtcttcggcggccgcgggaagacccgagagtcattagaagcgcaagatggcgactgcggccgaaacctcggcttcagaacccgaggctgagtccaaggctgggcccaaggctgacggagaggaggatgaggttaaggcggctaggacaaggagaaaggtgttatcgcgggctgtggccgctgcgacatacaagaccatggggccagcgtgggatcagcaggaggaaggcgtgagcgagagcgatggggatgagtacgccatggcttcctccgcggagagctcccccggggagtacgagtgggaatatgacgaagaggaggagaaaaaccagctggagattgagagactggaggagcagttgtctatcaacgtctatgactacaactgccatgtggacttgatcagactgctcaggctggaaggggagcttaccaaggtgaggatggcccgccagaagatgagtgaaatctttcccttgactgaagagctctggctggagtggctgcatgacgagatcagcatggcccaggatggcctggacagagagcacgtgtatgacctctttgagaaagccgtgaaggattacatttgtcctaacatttggctagagtatggccagtactcagttggtgggattggtcagaaaggtggccttgagaaagttcgctccgtgtttgaaagggctctctcgtctgttggtttacatatgaccaaaggactcgccctctgggaggcttaccgagagtttgaaagtgcgattgtggaagctgctcggcttgagaaagtccacagtcttttccggcgacagttggcgatcccactctatgatatggaggccacatttgcagagtatgaagaatggtcagaagacccaataccagagtcagtaattcagaactataacaaagcactacagcagctggagaaatataaaccctatgaagaagcactgttgcaggcagaggcaccaaggctggcagaatatcaagcatatatcgattttgagatgaaaattggcgatcctgctcgcattcagttgatctttgagcgcgccctggtcgagaactgccttgtcccagacttatggatccgttacagtcagtacctagatcgacaactgaaagtaaaggatttggttttatctgtacataaccgcgctattagaaactgcccctggacagttgccttatggagtcggtacctcttggccatggagagacatggagttgatcatcaagtaatttctgtaaccttcgagaaagctttgaatgccggcttcatccaggccactgattatgtggagatttggcaggcataccttgattacctgaggagaagggttgatttcaaacaagactccagtaaagagctggaggagttgagggccgcctttactcgtgccttggagtatctgaagcaggaggtggaagagcgtttcaatgagagtggtgatccaagctgcgtgattatgcagaactgggctaggattgaggctcgactgtgcaataacatgcagaaagctcgggaactctgggatagcatcatgaccagaggaaatgccaagtacgccaacatgtggctagagtattacaacctggaaagagctcatggtgacacccagcactgccggaaggctctgcaccgggccgtccagtgcaccagtgactacccagagcacgtctgcgaagtgttactcaccatggagaggacagaaggttctttagaagattgggatatagctgttcagaaaactgaaacccgattagctcgtgtcaatgagcagagaatgaaggctgcagagaaggaagcagcccttgtgcagcaagaagaagaaaaggctgaacaacggaaaagagctcgggctgagaagaaagcgttaaaaaagaagaaaaagatcagaggcccagagaagcgcggagcagatgaggacgatgagaaagagtggggcgatgatgaagaagagcagccttccaaacgcagaagggtcgagaacagcatccctgcagctggagaaacacaaaatgtagaagtagcagcagggcccgctgggaaatgtgctgccgtagatgtggagcccccttcgaagcagaaggagaaggcagcctccctgaagagggacatgcccaaggtgctgcacgacagcagcaaggacagcatcaccgtctttgtcagcaacctgccctacagcatgcaggagccggacacgaagctcaggccactcttcgaggcctgtggggaggtggtccagatccgacccatcttcagcaaccgtggggatttccgaggttactgctacgtggagtttaaagaagagaaatcagcccttcaggcactggagatggaccggaaaagtgtagaagggaggccaatgtttgtttccccctgtgtggataagagcaaaaaccccgattttaaggtgttcaggtacagcacttccctagagaaacacaagctgttcatctcaggcctgcctttctcctgtactaaagaggaactagaagaaatctgtaaggctcatggcaccgtgaaggacctcaggctggtcaccaaccgggctggcaaaccaaagggcctggcctacgtggagtatgaaaatgaatcccaggcgtcgcaggctgtgatgaagatggacggcatgactatcaaagagaacatcatcaaagtggcaatcagcaaccctcctcagaggaaagttccagagaagccagagaccaggaaggcaccaggtggccccatgcttttgccgcagacatacggagcgagggggaagggaaggacgcagctgtctctactgcctcgtgccctgcagcgcccaagtgctgcagctcctcaggctgagaacggccctgccgcggctcctgcagttgccgccccagcagccaccgaggcacccaagatgtccaatgccgattttgccaagctgtttctgagaaagtgaacgggacgctgggagacaggaaatgccttacttcactctggcccggcggacctcccaccacccagcagtgcactggggatggacaggcctggtgtgctgcgtgctcgcaaccacagatggctcctcggctttagacagaaaggggaaggggttctaagtcaagagcctttcagtgctccctcatattgagggcagtggcagaaaagtgaccactctgcaggctgggcccaggatgtggtgtcctgagatagttttgtatcttaaagactgaggcacagaagcgaaacgagaacacactgtttttgagacacagttgtccaaatgtttctggccagctccggcccctttttgtatgacacttctcttccaccctgcacagcacatgtgcccgtcattcttttaattttaaaagatgaaatggcagatgctagtaattcacagaatggcctcttgtgggggtgggtctgagggaagtcagctataaaacatttgctggagttttgttcaatggggctgtgcatttttatattatgtgtttgtaaatgacatgtcagcccttgtttcatgtttcctaaaagcagaatatttgcaacatttgttttgtataggaattatttgtgccacctgctgtggactgttttctttgcctagtgactagtgacctgtgttgtctaaacatgagtttcagccctttggttttgtttaataccatgtcaaatgcaaacttcaattctccccatttagctttattaaactgacgttctcttcaaaacttcttgctgaatggtactcagatgtgcattcacatacagatgtgttttgaagtgggtgtaccttgctttacctaatagatgtgtaaatagaacttttgtaagtcaaatcccattgtcactttgatttaaattattccagctgtgatgtgtcttcattttatagcagtttgacactggagcttttgagcttttttacctcacatcttttatcaaataatatttactgctttgaaaacagcaacagcattggccagttcagtaggggaagcttgctttattaagacactctggagaaagacgtcagggaatccttgtatatgtcgtgggaatcaactcctcatttatctgttgcgtaagtttaagtttttgtgcatcagtcgggttttctatatttttttaacttaacattttttaatataaccgattaaaaagtagacagaacagtaaaataaactcctgtgtgcctaccaaaaaaaat

SEQ ID NO: 379375 - DNA, 4472 bp, Homo sapiens
cttctgtccgaagttgtgtcggaacgcatgccattataatgagtttttatatctggtgggagcttttacaagggtataaaataatgtgaatttagtgtatgtggagattttcctgttatctaagttcccagtttctctttcaatggcaagaaaacgggtttttgataaggcgcgcgccgcgggcagcttctgcctcagcgggtcttcggcggccgcgggaagacccgagagtcattagaagcgcaagatggcgactgcggccgaaacctcggcttcagaacccgaggctgagtccaaggctgggcccaaggctgacggagaggaggatgaggttaaggcggctaggacaaggagaaaggtgttatcgcgggctgtggccgctgcgacatacaagaccatggggccagcgtgggatcagcaggaggaaggcgtgagcgagagcgatggggatgagtacgccatggcttcctccgcggagagctcccccggggagtacgagtgggaatatgacgaagaggaggagaaaaaccagctggagattgagagactggaggagcagttgtctatcaacgtctatgactacaactgccatgtggacttgatcagactgctcaggctggaaggggagcttaccaaggtgaggatggcccgccagaagatgagtgaaatctttcccttgactgaagagctctggctggagtggctgcatgacgagatcagcatggcccaggatggcctggacagagagcacgtgtatgacctctttgagaaagccgtgaaggattacatttgtcctaacatttggctagagtatggccagtactcagttggtgggattggtcagaaaggtggccttgagaaagttcgctccgtgtttgaaagggctctctcgtctgttggtttacatatgaccaaaggactcgccctctgggaggcttaccgagagtttgaaagtgcgattgtggaagctgctcggcttgagaaagtccacagtcttttccggcgacagttggcgatcccactctatgatatggaggccacatttgcagagtatgaagaatggtcagaagacccaataccagagtcagtaattcagaactataacaaagcactacagcagctggagaaatataaaccctatgaagaagcactggttaagaaatagaacattgccagtaccttagaagtctcctatgtgcccctctccgattgcctcctcctccctctcccgagagttgcaggcagaggcaccaaggctggcagaatatcaagcatatatcgattttgagatgaaaattggcgatcctgctcgcattcagttgatctttgagcgcgccctggtcgagaactgccttgtcccagacttatggatccgttacagtcagtacctagatcgacaactgaaagtaaaggatttggttttatctgtacataaccgcgctattagaaactgcccctggacagttgccttatggagtcggtacctcttggccatggagagacatggagttgatcatcaagtaatttctgtaaccttcgagaaagctttgaatgccggcttcatccaggccactgattatgtggagatttggcaggcataccttgattacctgaggagaagggttgatttcaaacaagactccagtaaagagctggaggagttgagggccgcctttactcgtgccttggagtatctgaagcaggaggtggaagagcgtttcaatgagagtggtgatccaagctgcgtgattatgcagaactgggctaggattgaggctcgactgtgcaataacatgcagaaagctcgggaactctgggatagcatcatgaccagaggaaatgccaagtacgccaacatgtggctagagtattacaacctggaaagagctcatggtgacacccagcactgccggaaggctctgcaccgggccgtccagtgcaccagtgactacccagagcacgtctgcgaagtgttactcaccatggagaggacagaaggttctttagaagattgggatatagctgttcagaaaactgaaacccgattagctcgtgtcaatgagcagagaatgaaggctgcagagaaggaagcagcccttgtgcagcaagaagaagaaaaggctgaacaacggaaaagagctcgggctgagaagaaagcgttaaaaaagaagaaaaagatcagaggcccagagaagcgcggagcagatgaggacgatgagaaagagtggggcgatgatgaagaagagcagccttccaaacgcagaagggtcgagaacagcatccctgcagctggagaaacacaaaatgtagaagtagcagcagggcccgctgggaaatgtgctgccgtagatgtggagcccccttcgaagcagaaggagaaggcagcctccctgaagagggacatgcccaaggtgctgcacgacagcagcaaggacagcatcaccgtctttgtcagcaacctgccctacagcatgcaggagccggacacgaagctcaggccactcttcgaggcctgtggggaggtggtccagatccgacccatcttcagcaaccgtggggatttccgaggttactgctacgtggagtttaaagaagagaaatcagcccttcaggcactggagatggaccggaaaagtgtagaagggaggccaatgtttgtttccccctgtgtggataagagcaaaaaccccgattttaaggtgttcaggtacagcacttccctagagaaacacaagctgttcatctcaggcctgcctttctcctgtactaaagaggaactagaagaaatctgtaaggctcatggcaccgtgaaggacctcaggctggtcaccaaccgggctggcaaaccaaagggcctggcctacgtggagtatgaaaatgaatcccaggcgtcgcaggctgtgatgaagatggacggcatgactatcaaagagaacatcatcaaagtggcaatcagcaaccctcctcagaggaaagttccagagaagccagagaccaggaaggcaccaggtggccccatgcttttgccgcagacatacggagcgagggggaagggaaggacgcagctgtctctactgcctcgtgccctgcagcgcccaagtgctgcagctcctcaggctgagaacggccctgccgcggctcctgcagttgccgccccagcagccaccgaggcacccaagatgtccaatgccgattttgccaagctgtttctgagaaagtgaacgggacgctgggagacaggaaatgccttacttcactctggcccggcggacctcccaccacccagcagtgcactggggatggacaggcctggtgtgctgcgtgctcgcaaccacagatggctcctcggctttagacagaaaggggaaggggttctaagtcaagagcctttcagtgctccctcatattgagggcagtggcagaaaagtgaccactctgcaggctgggcccaggatgtggtgtcctgagatagttttgtatcttaaagactgaggcacagaagcgaaacgagaacacactgtttttgagacacagttgtccaaatgtttctggccagctccggcccctttttgtatgacacttctcttccaccctgcacagcacatgtgcccgtcattcttttaattttaaaagatgaaatggcagatgctagtaattcacagaatggcctcttgtgggggtgggtctgagggaagtcagctataaaacatttgctggagttttgttcaatggggctgtgcatttttatattatgtgtttgtaaatgacatgtcagcccttgtttcatgtttcctaaaagcagaatatttgcaacatttgttttgtataggaattatttgtgccacctgctgtggactgttttctttgcctagtgactagtgacctgtgttgtctaaacatgagtttcagccctttggttttgtttaataccatgtcaaatgcaaacttcaattctccccatttagctttattaaactgacgttctcttcaaaacttcttgctgaatggtactcagatgtgcattcacatacagatgtgttttgaagtgggtgtaccttgctttacctaatagatgtgtaaatagaacttttgtaagtcaaatcccattgtcactttgatttaaattattccagctgtgatgtgtcttcattttatagcagtttgacactggagcttttgagcttttttacctcacatcttttatcaaataatatttactgctttgaaaacagcaacagcattggccagttcagtaggggaagcttgctttattaagacactctggagaaagacgtcagggaatccttgtatatgtcgtgggaatcaactcctcatttatctgttgcgtaagtttaagtttttgtgcatcagtcgggttttctatatttttttaacttaacattttttaatataaccgattaaaaagtagacagaacagtaaaataaactcctgtgtgcctaccaaaaaaaat

SEQ ID NO: 379376 - DNA, 4859 bp, Homo sapiens
cttctgtccgaagttgtgtcggaacgcatgccattataatgagtttttatatctggtgggagcttttacaagggtataaaataatgtgaatttagtgtatgtggagattttcctgttatctaagttcccagtttctctttcaatggcaagaaaacgggtttttgataaggcgcgcgccgcgggcagcttctgcctcagcgggtcttcggcggccgcgggaagacccgagagtcattagaagcgcaagatggcgactgcggccgaaacctcggcttcagaacccgaggctgagtccaaggctgggcccaaggctgacggagaggaggatgaggttaaggcggctaggacaaggagaaaggtgttatcgcgggctgtggccgctgcgacatacaagaccatggggccagcgtgggatcagcaggaggaaggcgtgagcgagagcgatggggatgagtacgccatggcttcctccgcggagagctcccccggggagtacgagtgggaatatgacgaagaggaggagaaaaaccagctggagattgagagactggaggagcagttgtctatcaacgtctatgactacaactgccatgtggacttgatcagactgctcaggctggaaggggagcttaccaaggtgaggatggcccgccagaagatgagtgaaatctttcccttgactgaagagctctggctggagtggctgcatgacgagatcagcatggcccaggatggcctggacagagagcacgtgtatgacctctttgagaaagccgtgaaggattacatttgtcctaacatttggctagagtatggccagtactcagttggtgggattggtcagaaaggtggccttgagaaagttcgctccgtgtttgaaagggctctctcgtctgttggtttacatatgaccaaaggactcgccctctgggaggcttaccgagagtttgaaagtgcgattgtggaagctgctcggcttgagaaagtccacagtcttttccggcgacagttggcgatcccactctatgatatggaggccacatttgcagagtatgaagaatggtcagaagacccaataccagagtcagtaattcagaactataacaaagcactacagcagctggagaaatataaaccctatgaagaagcactgttgcaggcagaggcaccaaggctggcagaatatcaagcatatatcgattttgagatgaaaattggcgatcctgctcgcattcagttgatctttgagcgcgccctggtcgagaactgccttgtcccagacttatggatccgttacagtcagtacctagatcgacaactgaaagtaaaggatttggttttatctgtacataaccgcgctattagaaactgcccctggacagttgccttatggagtcggtacctcttggccatggagagacatggagttgatcatcaagtaatttctggtgcggatgtttttgtgggagaacttctaagctatttgtcccaagtgaaaaacagagagcggtgacaaagtcattacatcagtgttccctggggttttctttgggttatggagtgtagtgacaaaaagggctctgagtgagagatgaactggttatatttgtggcttcttagagctttttaacatgctaatattcattgtattttctaagaagttgtagtgttttctccaaacttccttgatctggaacttttcttgcagggcgtcttgtggaagaagttttttctagaacacagtctgtagagtgctgtagcaacttctgtcttcaacattcctgtctagctcatttcattctgttgcatctattagtctttaaagtcatgtagtgttttatagtcagtagaatgtagtgactttctattagtttccatttgaattggtaacaaatcctgacttttctccaactccagtaaccttcgagaaagctttgaatgccggcttcatccaggccactgattatgtggagatttggcaggcataccttgattacctgaggagaagggttgatttcaaacaagactccagtaaagagctggaggagttgagggccgcctttactcgtgccttggagtatctgaagcaggaggtggaagagcgtttcaatgagagtggtgatccaagctgcgtgattatgcagaactgggctaggattgaggctcgactgtgcaataacatgcagaaagctcgggaactctgggatagcatcatgaccagaggaaatgccaagtacgccaacatgtggctagagtattacaacctggaaagagctcatggtgacacccagcactgccggaaggctctgcaccgggccgtccagtgcaccagtgactacccagagcacgtctgcgaagtgttactcaccatggagaggacagaaggttctttagaagattgggatatagctgttcagaaaactgaaacccgattagctcgtgtcaatgagcagagaatgaaggctgcagagaaggaagcagcccttgtgcagcaagaagaagaaaaggctgaacaacggaaaagagctcgggctgagaagaaagcgttaaaaaagaagaaaaagatcagaggcccagagaagcgcggagcagatgaggacgatgagaaagagtggggcgatgatgaagaagagcagccttccaaacgcagaagggtcgagaacagcatccctgcagctggagaaacacaaaatgtagaagtagcagcagggcccgctgggaaatgtgctgccgtagatgtggagcccccttcgaagcagaaggagaaggcagcctccctgaagagggacatgcccaaggtgctgcacgacagcagcaaggacagcatcaccgtctttgtcagcaacctgccctacagcatgcaggagccggacacgaagctcaggccactcttcgaggcctgtggggaggtggtccagatccgacccatcttcagcaaccgtggggatttccgaggttactgctacgtggagtttaaagaagagaaatcagcccttcaggcactggagatggaccggaaaagtgtagaagggaggccaatgtttgtttccccctgtgtggataagagcaaaaaccccgattttaaggtgttcaggtacagcacttccctagagaaacacaagctgttcatctcaggcctgcctttctcctgtactaaagaggaactagaagaaatctgtaaggctcatggcaccgtgaaggacctcaggctggtcaccaaccgggctggcaaaccaaagggcctggcctacgtggagtatgaaaatgaatcccaggcgtcgcaggctgtgatgaagatggacggcatgactatcaaagagaacatcatcaaagtggcaatcagcaaccctcctcagaggaaagttccagagaagccagagaccaggaaggcaccaggtggccccatgcttttgccgcagacatacggagcgagggggaagggaaggacgcagctgtctctactgcctcgtgccctgcagcgcccaagtgctgcagctcctcaggctgagaacggccctgccgcggctcctgcagttgccgccccagcagccaccgaggcacccaagatgtccaatgccgattttgccaagctgtttctgagaaagtgaacgggacgctgggagacaggaaatgccttacttcactctggcccggcggacctcccaccacccagcagtgcactggggatggacaggcctggtgtgctgcgtgctcgcaaccacagatggctcctcggctttagacagaaaggggaaggggttctaagtcaagagcctttcagtgctccctcatattgagggcagtggcagaaaagtgaccactctgcaggctgggcccaggatgtggtgtcctgagatagttttgtatcttaaagactgaggcacagaagcgaaacgagaacacactgtttttgagacacagttgtccaaatgtttctggccagctccggcccctttttgtatgacacttctcttccaccctgcacagcacatgtgcccgtcattcttttaattttaaaagatgaaatggcagatgctagtaattcacagaatggcctcttgtgggggtgggtctgagggaagtcagctataaaacatttgctggagttttgttcaatggggctgtgcatttttatattatgtgtttgtaaatgacatgtcagcccttgtttcatgtttcctaaaagcagaatatttgcaacatttgttttgtataggaattatttgtgccacctgctgtggactgttttctttgcctagtgactagtgacctgtgttgtctaaacatgagtttcagccctttggttttgtttaataccatgtcaaatgcaaacttcaattctccccatttagctttattaaactgacgttctcttcaaaacttcttgctgaatggtactcagatgtgcattcacatacagatgtgttttgaagtgggtgtaccttgctttacctaatagatgtgtaaatagaacttttgtaagtcaaatcccattgtcactttgatttaaattattccagctgtgatgtgtcttcattttatagcagtttgacactggagcttttgagcttttttacctcacatcttttatcaaataatatttactgctttgaaaacagcaacagcattggccagttcagtaggggaagcttgctttattaagacactctggagaaagacgtcagggaatccttgtatatgtcgtgggaatcaactcctcatttatctgttgcgtaagtttaagtttttgtgcatcagtcgggttttctatatttttttaacttaacattttttaatataaccgattaaaaagtagacagaacagtaaaataaactcctgtgtgcctaccaaaaaaaat

SEQ ID NO: 379377 - DNA, 3296 bp, Homo sapiens
aaaacttaggctaggtacgaggctgggttgtgaaaatataaccctatgaagaagcactgttgcaggcagaggcaccaaggctggcagaatatcaagcatatatcgattttgagatgaaaattggcgatcctgctcgcattcagttgatctttgagcgcgccctggtcgagaactgccttgtcccagacttatggatccgttacagtcagtacctagatcgacaactgaaagtaaaggatttggttttatctgtacataaccgcgctattagaaactgcccctggacagttgccttatggagtcggtacctcttggccatggagagacatggagttgatcatcaagtaatttctgtaaccttcgagaaagctttgaatgccggcttcatccaggccactgattatgtggagatttggcaggcataccttgattacctgaggagaagggttgatttcaaacaagactccagtaaagagctggaggagttgagggccgcctttactcgtgccttggagtatctgaagcaggaggtggaagagcgtttcaatgagagtggtgatccaagctgcgtgattatgcagaactgggctaggattgaggctcgactgtgcaataacatgcagaaagctcgggaactctgggatagcatcatgaccagaggaaatgccaagtacgccaacatgtggctagagtattacaacctggaaagagctcatggtgacacccagcactgccggaaggctctgcaccgggccgtccagtgcaccagtgactacccagagcacgtctgcgaagtgttactcaccatggagaggacagaaggttctttagaagattgggatatagctgttcagaaaactgaaacccgattagctcgtgtcaatgagcagagaatgaaggctgcagagaaggaagcagcccttgtgcagcaagaagaagaaaaggctgaacaacggaaaagagctcgggctgagaagaaagcgttaaaaaagaagaaaaagatcagaggcccagagaagcgcggagcagatgaggacgatgagaaagagtggggcgatgatgaagaagagcagccttccaaacgcagaagggtcgagaacagcatccctgcagctggagaaacacaaaatgtagaagtagcagcagggcccgctgggaaatgtgctgccgtagatgtggagcccccttcgaagcagaaggagaaggcagcctccctgaagagggacatgcccaaggtgctgcacgacagcagcaaggacagcatcaccgtctttgtcagcaacctgccctacagcatgcaggagccggacacgaagctcaggccactcttcgaggcctgtggggaggtggtccagatccgacccatcttcagcaaccgtggggatttccgaggttactgctacgtggagtttaaagaagagaaatcagcccttcaggcactggagatggaccggaaaagtgtagaagggaggccaatgtttgtttccccctgtgtggataagagcaaaaaccccgattttaaggtgttcaggtacagcacttccctagagaaacacaagctgttcatctcaggcctgcctttctcctgtactaaagaggaactagaagaaatctgtaaggctcatggcaccgtgaaggacctcaggctggtcaccaaccgggctggcaaaccaaagggcctggcctacgtggagtatgaaaatgaatcccaggcgtcgcaggctgtgatgaagatggacggcatgactatcaaagagaacatcatcaaagtggcaatcagcaaccctcctcagaggaaagttccagagaagccagagaccaggaaggcaccaggtggccccatgcttttgccgcagacatacggagcgagggggaagggaaggacgcagctgtctctactgcctcgtgccctgcagcgcccaagtgctgcagctcctcaggctgagaacggccctgccgcggctcctgcagttgccgccccagcagccaccgaggcacccaagatgtccaatgccgattttgccaagctgtttctgagaaagtgaacgggacgctgggagacaggaaatgccttacttcactctggcccggcggacctcccaccacccagcagtgcactggggatggacaggcctggtgtgctgcgtgctcgcaaccacagatggctcctcggctttagacagaaaggggaaggggttctaagtcaagagcctttcagtgctccctcatattgagggcagtggcagaaaagtgaccactctgcaggctgggcccaggatgtggtgtcctgagatagttttgtatcttaaagactgaggcacagaagcgaaacgagaacacactgtttttgagacacagttgtccaaatgtttctggccagctccggcccctttttgtatgacacttctcttccaccctgcacagcacatgtgcccgtcattcttttaattttaaaagatgaaatggcagatgctagtaattcacagaatggcctcttgtgggggtgggtctgagggaagtcagctataaaacatttgctggagttttgttcaatggggctgtgcatttttatattatgtgtttgtaaatgacatgtcagcccttgtttcatgtttcctaaaagcagaatatttgcaacatttgttttgtataggaattatttgtgccacctgctgtggactgttttctttgcctagtgactagtgacctgtgttgtctaaacatgagtttcagccctttggttttgtttaataccatgtcaaatgcaaacttcaattctccccatttagctttattaaactgacgttctcttcaaaacttcttgctgaatggtactcagatgtgcattcacatacagatgtgttttgaagtgggtgtaccttgctttacctaatagatgtgtaaatagaacttttgtaagtcaaatcccattgtcactttgatttaaattattccagctgtgatgtgtcttcattttatagcagtttgacactggagcttttgagcttttttacctcacatcttttatcaaataatatttactgctttgaaaacagcaacagcattggccagttcagtaggggaagcttgctttattaagacactctggagaaagacgtcagggaatccttgtatatgtcgtgggaatcaactcctcatttatctgttgcgtaagtttaagtttttgtgcatcagtcgggttttctatatttttttaacttaacattttttaatataaccgattaaaaagtagacagaacagtaaaataaactcctgtgtgcctaccaaaaaaaat

SEQ ID NO: 379378 - DNA, 2621 bp, Homo sapiens
cttctgtccgaagttgtgtcggaacgcatgccattataatgagtttttatatctggtgggagcttttacaagggtataaaataatgtgaatttagtgtatgtggagattttcctgttatctaagttcccagtttctctttcaatggcaagaaaacgggtttttgataaggcgcgcgccgcgggcagcttctgcctcagcgggtcttcggcggccgcgggaagacccgagagtcattagaagcgcaagatggcgactgcggccgaaacctcggcttcagaacccgaggctgagtccaaggctgggcccaaggctgacggagaggaggatgaggttaaggcggctaggacaaggagaaaggtgttatcgcgggctgtggccgctgcgacatacaagaccatggggccagcgtgggatcagcaggaggaaggcgtgagcgagagcgatggggatgagtacgccatggcttcctccgcggagagctcccccggggagtacgagtgggaatatgacgaagaggaggagaaaaaccagctggagattgagagactggaggagcagttgtctatcaacgtctatgactacaactgccatgtggacttgatcagactgctcaggctggaaggggagcttaccaaggtgaggatggcccgccagaagatgagtgaaatctttcccttgactgaagagctctggctggagtggctgcatgacgagatcagcatggcccaggatggcctggacagagagcacgtgtatgacctctttgagaaagccgtgaaggattacatttgtcctaacatttggctagagtatggccagtactcagttggtgggattggtcagaaaggtggccttgagaaagttcgctccgtgtttgaaagggctctctcgtctgttggtttacatatgaccaaaggactcgccctctgggaggcttaccgagagtttgaaagtgcgattgtggaagctgctcggcttgagaaagtccacagtcttttccggcgacagttggcgatcccactctatgatatggaggccacatttgcagagtatgaagaatggtcagaagacccaataccagagtcagtaattcagaactataacaaagcactacagcagctggagaaatataaaccctatgaagaagcactggttaagaaatagaacattgccagtaccttagaagtctcctatgtgcccctctccgattgcctcctcctccctctcccgagagttgcaggcagaggcaccaaggctggcagaatatcaagcatatatcgattttgagatgaaaattggcgatcctgctcgcattcagttgatctttgagcgcgccctggtcgagaactgccttgtcccagacttatggatccgttacagtcagtacctagatcgacaactgaaagtaaaggatttggttttatctgtacataaccgcgctattagaaactgcccctggacagttgccttatggagtcggtacctcttggccatggagagacatggagttgatcatcaagtaatttctgtaaccttcgagaaagctttgaatgccggcttcatccaggccactgattatgtggagatttggcaggcataccttgattacctgaggagaagggttgatttcaaacaagactccagtaaagagctggaggagttgagggccgcctttactcgtgccttggagtatctgaagcaggaggtggaagagcgtttcaatgagagtggtgatccaagctgcgtgattatgcagaactgggctaggattgaggctcgactgtgcaataacatgcagaaagctcgggaactctgggatagcatcatgaccagaggaaatgccaagtacgccaacatgtggctagagtattacaacctggaaagagctcatggtgacacccagcactgccggaaggctctgcaccgggccgtccagtgcaccagtgactacccagagcacgtctgcgaagtgttactcaccatggagaggacagaaggttctttagaagattgggatatagctgttcagaaaactgaaacccgattagctcgtgtcaatgagcagagaatgaaggctgcagagaaggaagcagcccttgtgcagcaagaagaagaaaaggctgaacaacggaaaagagctcgggctgagaagaaagcgttaaaaaagaagaaaaagatcagaggcccagagaagcgcggagcagatgaggacgatgagaaagagtggggcgatgatgaagaagagcagcttccaaaacgcagaagggtcgagaaccggcatcccctgaggtgggggaaccccacaagtgtggaagttgccgccgggcccgcgggggaaatggtgcgcgcgggatagtgtggggcccccgtgtaaagcgaaagggaaaggcgctcccctggagagaggactggtccggcgtgtgctaagcagacacaaggaggaccacccgctggggaaacagcctataaattaacgaacggcacacaaaggaccctggcgcgggaagcgagcacacacacagccgagggggatattactagcatgatgtactatacaaccccacgcaatcgaacagacaggcagcatgcgtgtgaacacgagggacaccaaagtagagcc

SEQ ID NO: 379379 - DNA, 2970 bp, Homo sapiens
aaacgtgactatctagtactgtcgagtaagtaccgtgcgctccctctctcggttctcaggaaacataggtagattagcttgtggctgcagaaaggctcaagtgtttgggctgggtcgtttaccactggagggaggcctggggaatgcccagggacatctgtaacactaatagttgtggggtgctttttatgtgtgtctgttggaagtgtgttgtatgatgggtgtcgacgtcataaggttcaggtctcctaacagcctgctgatgcactttaggctcgactgtgcaataacatgcagaaagctcgggaactctgggatagcatcatgaccagaggaaatgccaagtacgccaacatgtggctagagtattacaacctggaaagagctcatggtgacacccagcactgccggaaggctctgcaccgggccgtccagtgcaccagtgactacccagagcacgtctgcgaagtgttactcaccatggagaggacagaaggttctttagaagattgggatatagctgttcagaaaactgaaacccgattagctcgtgtcaatgagcagagaatgaaggctgcagagaaggaagcagcccttgtgcagcaagaagaagaaaaggctgaacaacggaaaagagctcgggctgagaagaaagcgttaaaaaagaagaaaaagatcagaggcccagagaagcgcggagcagatgaggacgatgagaaagagtggggcgatgatgaagaagagcagccttccaaacgcagaagggtcgagaacagcatccctgcagctggagaaacacaaaatgtagaagtagcagcagggcccgctgggaaatgtgctgccgtagatgtggagcccccttcgaagcagaaggagaaggcagcctccctgaagagggacatgcccaaggtgctgcacgacagcagcaaggacagcatcaccgtctttgtcagcaacctgccctacagcatgcaggagccggacacgaagctcaggccactcttcgaggcctgtggggaggtggtccagatccgacccatcttcagcaaccgtggggatttccgaggttactgctacgtggagtttaaagaagagaaatcagcccttcaggcactggagatggaccggaaaagtgtagaagggaggccaatgtttgtttccccctgtgtggataagagcaaaaaccccgattttaaggtgttcaggtacagcacttccctagagaaacacaagctgttcatctcaggcctgcctttctcctgtactaaagaggaactagaagaaatctgtaaggctcatggcaccgtgaaggacctcaggctggtcaccaaccgggctggcaaaccaaagggcctggcctacgtggagtatgaaaatgaatcccaggcgtcgcaggctgtgatgaagatggacggcatgactatcaaagagaacatcatcaaagtggcaatcagcaaccctcctcagaggaaagttccagagaagccagagaccaggaaggcaccaggtggccccatgcttttgccgcagacatacggagcgagggggaagggaaggacgcagctgtctctactgcctcgtgccctgcagcgcccaagtgctgcagctcctcaggctgagaacggccctgccgcggctcctgcagttgccgccccagcagccaccgaggcacccaagatgtccaatgccgattttgccaagctgtttctgagaaagtgaacgggacgctgggagacaggaaatgccttacttcactctggcccggcggacctcccaccacccagcagtgcactggggatggacaggcctggtgtgctgcgtgctcgcaaccacagatggctcctcggctttagacagaaaggggaaggggttctaagtcaagagcctttcagtgctccctcatattgagggcagtggcagaaaagtgaccactctgcaggctgggcccaggatgtggtgtcctgagatagttttgtatcttaaagactgaggcacagaagcgaaacgagaacacactgtttttgagacacagttgtccaaatgtttctggccagctccggcccctttttgtatgacacttctcttccaccctgcacagcacatgtgcccgtcattcttttaattttaaaagatgaaatggcagatgctagtaattcacagaatggcctcttgtgggggtgggtctgagggaagtcagctataaaacatttgctggagttttgttcaatggggctgtgcatttttatattatgtgtttgtaaatgacatgtcagcccttgtttcatgtttcctaaaagcagaatatttgcaacatttgttttgtataggaattatttgtgccacctgctgtggactgttttctttgcctagtgactagtgacctgtgttgtctaaacatgagtttcagccctttggttttgtttaataccatgtcaaatgcaaacttcaattctccccatttagctttattaaactgacgttctcttcaaaacttcttgctgaatggtactcagatgtgcattcacatacagatgtgttttgaagtgggtgtaccttgctttacctaatagatgtgtaaatagaacttttgtaagtcaaatcccattgtcactttgatttaaattattccagctgtgatgtgtcttcattttatagcagtttgacactggagcttttgagcttttttacctcacatcttttatcaaataatatttactgctttgaaaacagcaacagcattggccagttcagtaggggaagcttgctttattaagacactctggagaaagacgtcagggaatccttgtatatgtcgtgggaatcaactcctcatttatctgttgcgtaagtttaagtttttgtgcatcagtcgggttttctatatttttttaacttaacattttttaatataaccgattaaaaagtagacagaacagtaaaataaactcctgtgtgcctaccaaaaaaaat

SEQ ID NO: 379380 - DNA, 3086 bp, Homo sapiens
actgtgcgttatacaatgtttaggggcatccctggcttctagccctgaaatgccagtagcagcttcaccaccacaaccaaacatgacaaccagaaatgtctcttaacattgccaaatgtctcttgatgggcaggatccctcctttgagagtcactgtgctctagtacaacatctatccaacaaaggagcttggagaggcaaatggctcaatgtgtcctttgcatcccttgttaaatttcagagccttcagtgttagctagaaccaatagaaaaataatgtgaacttatctgtgggtattggtctggattttgggtatggacccctcagaactggcttgcaaagaccaccaaaaaataagaaataaatgcctcaacatttgagtagctcttaaaattcttcagtcttaatataaatgtacttttgcattagaacgttcgttttcatattctttgccatttagagcccttaatagatcatattctggttttcaagtctctcctgaaaggagagggacattttaaacccacttagaaggactatttgaattctgaacttcaagcctacagggattacattttcttattgtttgatgggagagatctcttctggaggttctttagaagattgggatatagctgttcagaaaactgaaacccgattagctcgtgtcaatgagcagagaatgaaggctgcagagaaggaagcagcccttgtgcagcaagaagaagaaaaggctgaacaacggaaaagagctcgggctgagaagaaagcgttaaaaaagaagaaaaagatcagaggcccagagaagcgcggagcagatgaggacgatgagaaagagtggggcgatgatgaagaagagcagccttccaaacgcagaagggtcgagaacagcatccctgcagctggagaaacacaaaatgtagaagtagcagcagggcccgctgggaaatgtgctgccgtagatgtggagcccccttcgaagcagaaggagaaggcagcctccctgaagagggacatgcccaaggtgctgcacgacagcagcaaggacagcatcaccgtctttgtcagcaacctgccctacagcatgcaggagccggacacgaagctcaggccactcttcgaggcctgtggggaggtggtccagatccgacccatcttcagcaaccgtggggatttccgaggttactgctacgtggagtttaaagaagagaaatcagcccttcaggcactggagatggaccggaaaagtgtagaagggaggccaatgtttgtttccccctgtgtggataagagcaaaaaccccgattttaaggtgttcaggtacagcacttccctagagaaacacaagctgttcatctcaggcctgcctttctcctgtactaaagaggaactagaagaaatctgtaaggctcatggcaccgtgaaggacctcaggctggtcaccaaccgggctggcaaaccaaagggcctggcctacgtggagtatgaaaatgaatcccaggcgtcgcaggctgtgatgaagatggacggcatgactatcaaagagaacatcatcaaagtggcaatcagcaaccctcctcagaggaaagttccagagaagccagagaccaggaaggcaccaggtggccccatgcttttgccgcagacatacggagcgagggggaagggaaggacgcagctgtctctactgcctcgtgccctgcagcgcccaagtgctgcagctcctcaggctgagaacggccctgccgcggctcctgcagttgccgccccagcagccaccgaggcacccaagatgtccaatgccgattttgccaagctgtttctgagaaagtgaacgggacgctgggagacaggaaatgccttacttcactctggcccggcggacctcccaccacccagcagtgcactggggatggacaggcctggtgtgctgcgtgctcgcaaccacagatggctcctcggctttagacagaaaggggaaggggttctaagtcaagagcctttcagtgctccctcatattgagggcagtggcagaaaagtgaccactctgcaggctgggcccaggatgtggtgtcctgagatagttttgtatcttaaagactgaggcacagaagcgaaacgagaacacactgtttttgagacacagttgtccaaatgtttctggccagctccggcccctttttgtatgacacttctcttccaccctgcacagcacatgtgcccgtcattcttttaattttaaaagatgaaatggcagatgctagtaattcacagaatggcctcttgtgggggtgggtctgagggaagtcagctataaaacatttgctggagttttgttcaatggggctgtgcatttttatattatgtgtttgtaaatgacatgtcagcccttgtttcatgtttcctaaaagcagaatatttgcaacatttgttttgtataggaattatttgtgccacctgctgtggactgttttctttgcctagtgactagtgacctgtgttgtctaaacatgagtttcagccctttggttttgtttaataccatgtcaaatgcaaacttcaattctccccatttagctttattaaactgacgttctcttcaaaacttcttgctgaatggtactcagatgtgcattcacatacagatgtgttttgaagtgggtgtaccttgctttacctaatagatgtgtaaatagaacttttgtaagtcaaatcccattgtcactttgatttaaattattccagctgtgatgtgtcttcattttatagcagtttgacactggagcttttgagcttttttacctcacatcttttatcaaataatatttactgctttgaaaacagcaacagcattggccagttcagtaggggaagcttgctttattaagacactctggagaaagacgtcagggaatccttgtatatgtcgtgggaatcaactcctcatttatctgttgcgtaagtttaagtttttgtgcatcagtcgggttttctatatttttttaacttaacattttttaatataaccgattaaaaagtagacagaacagtaaaataaactcctgtgtgcctaccaaaaaaaat

SEQ ID NO: 379381 - DNA, 1613 bp, Homo sapiens
  misc_feature (14)..(15): n is a, c, g, or t
  misc_feature (30)..(30): n is a, c, g, or t
atactatacaatcnngctcgtacctcatangttcgcatgctgtgatgaagatggacggcatgactatcaaagagaacatcatcaaagtggcaatcagcaaccctcctcagaggaaagttccagagaagccagagaccaggaaggcaccaggtggccccatgcttttgccgcagacatacggagcgagggggaagggaaggacgcagctgtctctactgcctcgtgccctgcagcgcccaagtgctgcagctcctcaggctgagaacggccctgccgcggctcctgcagttgccgccccagcagccaccgaggcacccaagatgtccaatgccgattttgccaagctgtttctgagaaagtgaacgggacgctgggagacaggaaatgccttacttcactctggcccggcggacctcccaccacccagcagtgcactggggatggacaggcctggtgtgctgcgtgctcgcaaccacagatggctcctcggctttagacagaaaggggaaggggttctaagtcaagagcctttcagtgctccctcatattgagggcagtggcagaaaagtgaccactctgcaggctgggcccaggatgtggtgtcctgagatagttttgtatcttaaagactgaggcacagaagcgaaacgagaacacactgtttttgagacacagttgtccaaatgtttctggccagctccggcccctttttgtatgacacttctcttccaccctgcacagcacatgtgcccgtcattcttttaattttaaaagatgaaatggcagatgctagtaattcacagaatggcctcttgtgggggtgggtctgagggaagtcagctataaaacatttgctggagttttgttcaatggggctgtgcatttttatattatgtgtttgtaaatgacatgtcagcccttgtttcatgtttcctaaaagcagaatatttgcaacatttgttttgtataggaattatttgtgccacctgctgtggactgttttctttgcctagtgactagtgacctgtgttgtctaaacatgagtttcagccctttggttttgtttaataccatgtcaaatgcaaacttcaattctccccatttagctttattaaactgacgttctcttcaaaacttcttgctgaatggtactcagatgtgcattcacatacagatgtgttttgaagtgggtgtaccttgctttacctaatagatgtgtaaatagaacttttgtaagtcaaatcccattgtcactttgatttaaattattccagctgtgatgtgtcttcattttatagcagtttgacactggagcttttgagcttttttacctcacatcttttatcaaataatatttactgctttgaaaacagcaacagcattggccagttcagtaggggaagcttgctttattaagacactctggagaaagacgtcagggaatccttgtatatgtcgtgggaatcaactcctcatttatctgttgcgtaagtttaagtttttgtgcatcagtcgggttttctatatttttttaacttaacattttttaatataaccgattaaaaagtagacagaacagtaaaataaactcctgtgtgcctaccaaaaaaaat

SEQ ID NO: 379382 - DNA, 2646 bp, Homo sapiens
cttctgtccgaagttgtgtcggaacgcatgccattataatgagtttttatatctggtgggagcttttacaagggtataaaataatgtgaatttagtgtatgtggagattttcctgttatctaagttcccagtttctctttcaatggcaagaaaacgggtttttgataaggcgcgcgccgcgggcagcttctgcctcagcgggtcttcggcggccgcgggaagacccgagagtcattagaagcgcaagatggcgactgcggccgaaacctcggcttcagaacccgaggctgagtccaaggctgggcccaaggctgacggagaggaggatgaggttaaggcggctaggacaaggagaaaggtgttatcgcgggctgtggccgctgcgacatacaagaccatggggccagcgtgggatcagcaggaggaaggcgtgagcgagagcgatggggatgagtacgccatggcttcctccgcggagagctcccccggggagtacgagtgggaatatgacgaagaggaggagaaaaaccagctggagattgagagactggaggagcagttgtctatcaacgtctatgactacaactgccatgtggacttgatcagactgctcaggctggaaggggagcttaccaaggtgaggatggcccgccagaagatgagtgaaatctttcccttgactgaagagctctggctggagtggctgcatgacgagatcagcatggcccaggatggcctggacagagagcacgtgtatgacctctttgagaaagccgtgaaggattacatttgtcctaacatttggctagagtatggccagtactcagttggtgggattggtcagaaaggtggccttgagaaagttcgctccgtgtttgaaagggctctctcgtctgttggtttacatatgaccaaaggactcgccctctgggaggcttaccgagagtttgaaagtgcgattgtggaagctgctcggcttgagaaagtccacagtcttttccggcgacagttggcgatcccactctatgatatggaggccacatttgcagagtatgaagaatggtcagaagacccaataccagagtcagtaattcagaactataacaaagcactacagcagctggagaaatataaaccctatgaagaagcactgttgcaggcagaggcaccaaggctggcagaatatcaagcatatatcgattttgagatgaaaattggcgatcctgctcgcattcagttgatctttgagcgcgccctggtcgagaactgccttgtcccagacttatggatccgttacagtcagtacctagatcgacaactgaaagtaaaggatttggttttatctgtacataaccgcgctattagaaactgcccctggacagttgccttatggagtcggtacctcttggccatggagagacatggagttgatcatcaagtaatttctggtgcggatgtttttgtgggagaacttctaagctatttgtcccaagtgaaaaacagagagcggtgacaaagtcattacatcagtgttccctggggttttctttgggttatggagtgtagtgacaaaaagggctctgagtgagagatgaactggttatatttgtggcttcttagagctttttaacatgctaatattcattgtattttctaagaagttgtagtgttttctccaaacttccttgatctggaacttttcttgcagggcgtcttgtggaagaagttttttctagaacacagtctgtagagtgctgtagcaacttctgtcttcaacattcctgtctagctcatttcattctgttgcatctattagtctttaaagtcatgtagtgttttatagtcagtagaatgtagtgactttctattagtttccatttgaattggtaacaaatcctgacttttctccaactccagtaaccttcgagaaagctttgaatgccggcttcatccaggccactgattatgtggagatttggcaggcataccttgattacctgaggagaagggttgatttcaaacaaggtatttaagcacatgtttttcactttagagctgaacatgttcttaatacaacttttggcgagatgtcccagttccccagatacattgtgattgggcaaatgatgtagactaggtattggtgactttttcccccagaaatcttagcaatttctgtctttaacaagtcatgatgtggattgtaaagcaagagagtaatcgtttatactggctcctgccagcctttttagtcttagctctcatttctcctttcaggtctttttatttatcctaaatacttcttgaaataagtctgctgtgttttagaaaaatctttgtacctctgtgggatcctttgccccttcatgtccccccgaaaacaaccagaaaacccctaacttgtacttgcacactcatgtcagctgtcacctcatacaggtagcctttagccattctcttgtttgcctgtgtcaccccagctgggggagactcccccccacagcaccctgtgtttgcctttttcaccacgctgtccatgctctattctgttcaaatttctttctccccaactatgtgatgagggcaggaattggcaattttatttctgtgtcccttgcatgatgccaggtacatagtgggtctcca

SEQ ID NO: 379383 - DNA, 1328 bp, Homo sapiens
cttctgtccgaagttgtgtcggaacgcatgccattataatgagtttttatatctggtgggagcttttacaagggtataaaataatgtgaatttagtgtatgtggagattttcctgttatctaagttcccagtttctctttcaatggcaagaaaacgggtttttgataaggcgcgcgccgcgggcagcttctgcctcagcgggtcttcggcggccgcgggaagacccgagagtcattagaagcgcaagatggcgactgcggccgaaacctcggcttcagaacccgaggctgagtccaaggctgggcccaaggctgacggagaggaggatgaggttaaggcggctaggacaaggagaaaggtgttatcgcgggctgtggccgctgcgacatacaagaccatggggccagcgtgggatcagcaggaggaaggcgtgagcgagagcgatggggatgagtacgccatggcttcctccgcggagagctcccccggggagtacgagtgggaatatgacgaagaggaggagaaaaaccagctggagattgagagactggaggagcagttgtctatcaacgtctatgactacaactgccatgtggacttgatcagactgctcaggctggaaggggagcttaccaaggtgaggatggcccgccagaagatgagtgaaatctttcccttgactgaagagctctggctggagtggctgcatgacgagatcagcatggcccaggatggcctggacagagagcacgtgtatgacctctttgagaaagccgtgaaggattacatttgtcctaacatttggctagagtatggccagtactcagttggtgggattggtcagaaaggtggccttgagaaagttcgctccgtgtttgaaagggctctctcgtctgttggtttacatatgaccaaaggactcgccctctgggaggcttaccgagagtttgaaagtgcgattgtggaagctgctcggcccgtagctggcttcctttccccttttgaccgggaacaaacctttgattcacagcttgagaaagtccacagtcttttccggcgacagttggcgatcccactctatgatatggaggccacatttgcagagtatgaagaatggtcagaagacccaataccagagtcagtaattcagaactataacaaagcactacagcagcaccaccattcgtggtgctgctctgttggtgatcacacccattcttcctaggttagcacctccagtcaccatacacaggttaccagtgtcgaacttgatgaaatcagtaatcttgccgtctccaatccatctgaatgagcagcacccacgactt

SEQ ID NO: 379384 - DNA, 714 bp, Homo sapiens
gtcttaatataaatgtacttttgcattagaacgttcgttttcatattctttgccatttagagcccttaatagatcatattctggttttcaagtctctcctgaaaggagagggacattttaaacccacttagaaggactatttgaattctgaacttcaagcctacagggattacattttcttattgtttgatgggagagatctcttctggaggtacagagaaattaagaaaaatttatgtgattgtatccttcaaaatcctaaagagtgaaagttttgcttctctttctttcaaggttctttagaagattgggatatagctgttcagaaaactgaaacccgattagctcgtgtcaatgagcagagaatgaaggtaatgacaatgtttgaagtctttggcacctctggtagctattttggctcagtttggtatggatgtttcttgtcaagatgttttacattttcctaagtgtcttttactcagtattaattataaaatatttagatcaatgcttaaacctgtcttgtgtcatttttacattgttctaaaacatcagccccaatattaagtacttgtttcatttagtgagggaattttggctctaaaatttacgagaattgatgaaaaagaataaagaagagcctcacttagcctagtgagtggaacatgaacaccccaacttatttagggcttcagttttatggatttttttttt

SEQ ID NO: 379385 - DNA, 600 bp, Homo sapiens
tgtggtcctagctactcaggactctgaggtgggaggattgcatgagcctggagtgtgaggctgtagtgagttgtgatcacaccaccacactccagccagggtgacagcaagaacccttctcaaaagaaaaagaaagaaccacagtttgtcatttactactaatttgcttctttagcccgtagctggcttcctttccccttttgaccgggaacaaacctttgattcacagcttgagaaagtccacagtcttttccggcgacagttggcgatcccactctatggtaagagaaactgacatgtcaacagccagccctctatggtttttaaaatgctttggggaacaacatgtagttagacctttcccaccatcctgtgaggcaggtaaagctggtgttcttactctccttggatattgtctctttggatgaggtccttggtaaaaacatcttgaatgttagtgcttaagagggttgtgagggtcagaggcaggactggaagccagactccctgactcccaggtgagagctcttttctcctttgagacctagttggaaaggcagagatagggtctctgaaaggaatagtgaatgacacctgtat

SEQ ID NO: 379386 - DNA, 1183 bp, Homo sapiens
  misc_feature (833)..(833): n is a, c, g, or t
cttctgtccgaagttgtgtcggaacgcatgccattataatgagtttttatatctggtgggagcttttacaagggtataaaataatgtgaatttagtgtatgtggagattttcctgttatctaagttcccagtttctctttcaatggcaagaaaacgggtttttgataaggcgcgcgccgcgggcagcttctgcctcagcgggtcttcggcggccgcgggaagacccgagagtcattagaagcgcaagatggcgactgcggccgaaacctcggcttcagaacccgaggctgagtccaaggctgggcccaaggctgacggagaggaggatgaggttaaggcggctaggacaaggagaaaggtgttatcgcgggctgtggccgctgcgacatacaagaccatggggccagcgtgggatcagcaggaggaaggcgtgagcgagagcgatggggatgagtacgccatggcttcctccgcggagagctcccccggggagtacgagtgggaatatgacgaagaggaggagaaaaaccagctggagattgagagactggaggagcaggtgggcccgggggtgggcagcgggcatcttccagtctttcaggtcctcgggtccccatgtcctggcccgcctccctagtcctcggcggcgataaagccgccaaggctgcaaacccgtttttcgtgacagtagctcctgtcggatttgagtgcttactgcctgcccattgccttgcaaacgttatctcattgaatcctcgccacgaccctgtgaaggaagccctgttatctatccccattttactggaggaaactgaggctcgtggaggaaagtntcttgctcaagataacacttcctgcaagtcaggccttgtactttgatcccattccagaactcccactcttaaccacacgtccaacagtagaaataaactcattcgcaagagagtgttattttgttatgtaggaatgacggcgatgatgaaacttgtggtaagaaaaatattgaccgcgatggtgataatagaaatggaaaggtttctggttctggaggttaaggcctcagttctagctgttcaactcttgtatgtgcttgtaagaatttcttaatttctctcaccctctcgacttccttatctgcagattgggagcaacaatttctgcataatataattgttgtaacagt

SEQ ID NO: 379387 - DNA, 4108 bp, Homo sapiens
cttctgtccgaagttgtgtcggaacgcatgccattataatgagtttttatatctggtgggagcttttacaagggtataaaataatgtgaatttagtgtatgtggagattttcctgttatctaagttcccagtttctctttcaatggcaagaaaacgggtttttgataaggcgcgcgccgcgggcagcttctgcctcagcgggtcttcggcggccgcgggaagacccgagagtcattagaagcgcaagatggcgactgcggccgaaacctcggcttcagaacccgaggctgagtccaaggctgggcccaaggctgacggagaggaggatgaggttaaggcggctaggacaaggagaaaggtgttatcgcgggctgtggccgctgcgacatacaagaccatggggccagcgtgggatcagcaggaggaaggcgtgagcgagagcgatggggatgagtacgccatggcttcctccgcggagagctcccccggggagtacgagtgggaatatgacgaagaggaggagaaaaaccagctggagattgagagactggaggagcagttgtctatcaacgtctatgactacaactgccatgtggacttgatcagactgctcaggctggaaggggagcttaccaaggtgaggatggcccgccagaagatgagtgaaatctttcccttgactgaagagctctggctggagtggctgcatgacgagatcagcatggcccaggatggcctggacagagagcacgtgtatgacctctttgagaaagccgtgaaggattacatttgtcctaacatttggctagagtatggccagtactcagttggtgggattggtcagaaaggtggccttgagaaagttcgctccgtgtttgaaagggctctctcgtctgttggtttacatatgaccaaaggactcgccctctgggaggcttaccgagagtttgaaagtgcgattgtggaagctgctcggcttgagaaagtccacagtcttttccggcgacagttggcgatcccactctatgatatggaggccacatttgcagagtatgaagaatggtcagaagacccaataccagagtcagtaattcagaactataacaaagcactacagcagctggagaaatataaaccctatgaagaagcactgttgcaggcagaggcaccaaggctggcagaatatcaagcatatatcgattttgagatgaaaattggcgatcctgctcgcattcagttgatctttgagcgcgccctggtcgagaactgccttgtcccagacttatggatccgttacagtcagtacctagatcgacaactgaaagtaaaggatttggttttatctgtacataaccgcgctattagaaactgcccctggacagttgccttatggagtcggtacctcttggccatggagagacatggagttgatcatcaagtaatttctgtaaccttcgagaaagctttgaatgccggcttcatccaggccactgattatgtggagatttggcaggcataccttgattacctgaggagaagggttgatttcaaacaagactccagtaaagagctggaggagttgagggccgcctttactcgtgccttggagtatctgaagcaggaggtggaagagcgtttcaatgagagtggtgatccaagctgcgtgattatgcagaactgggctaggattgaggctcgactgtgcaataacatgcagaaagctcgggaactctgggatagcatcatgaccagaggaaatgccaagtacgccaacatgtggctagagtattacaacctggaaagagctcatggtgacacccagcactgccggaaggctctgcaccgggccgtccagtgcaccagtgactacccagagcacgtctgcgaagtgttactcaccatggagaggacagaaggttctttagaagattgggatatagctgttcagaaaactgaaacccgattagctcgtgtcaatgagcagagaatgaaggctgcagagaaggaagcagcccttgtgcagcaagaagaagaaaaggctgaacaacggaaaagagctcgggctgagaagaaagcgttaaaaaagaagaaaaagatcagaggcccagagaagcgcggagcagatgaggacgatgagaaagagtggggcgatgatgaagaagagcagccttccaaacgcagaagggtcgagaacagcatccctgcagctggagaaacacaaaatgtagaagtagcagcagggcccgctgggaaatgtgctgccgtagatgtggagcccccttcgaagcagaaggagaaggcagcctccctgaagagggacatgcccaaggtgctgcacgacagcagcaaggacagcatcaccgtctttgtcagcaacctgccctacagcatgcaggagccggacacgaagctcaggccactcttcgaggcctgtggggaggtggtccagatccgacccatcttcagcaaccgtggggatttccgaggttactgctacgtggagtttaaagaagagaaatcagcccttcaggcactggagatggaccggaaaagtgtagaagggaggccaatgtttgtttccccctgtgtggataagagcaaaaaccccgattttaaggtgttcaggtacagcacttccctagagaaacacaagctgttcatctcaggcctgcctttctcctgtactaaagaggaactagaagaaatctgtaaggctcatggcaccgtgaaggacctcaggctggtcaccaaccgggctggcaaaccaaagggcctggcctacgtggagtatgaaaatgaatcccaggcgtcgcaggctgtgatgaagatggacggcatgactatcaaagagaacatcatcaaagtggcaatcagcaaccctcctcagaggaaagttccagagaagccagagaccaggaaggcaccaggtggccccatgcttttgccgcagacatacggagcgagggggaagggaaggacgcagctgtctctactgcctcgtgccctgcagcgcccaagtgctgcagctcctcaggctgagaacggccctgccgcggctcctgcagttgccgccccagcagccaccgaggcacccaagatgtccaatgccgattttgccaagctgtttctgagaaagtgaacgggacgctgggagacaggaaatgccttacttcactctggcccggcggacctcccaccacccagcagtgcactggggatggacaggcctggtgtgctgcgtgctcgcaaccacagatggctcctcggctttagacagaaaggggaaggggttctaagtcaagagcctttcagtgctccctcatattgagggcagtggcagaaaagtgaccactctgcaggctgggcccaggatgtggtgtcctgagatagttttgtatcttaaagactgaggcacagaagcgaaacgagaacacactgtttttgagacacagttgtccaaatgtttctggccagctccggcccctttttgtatgacacttctcttccaccctgcacagcacatgtgcccgtcattcttttaattttaaaagatgaaatggcagatgctagtaattcacagaatggcctcttgtgggggtgggtctgagggaagtcagctataaaacatttgctggagttttgttcaatggggctgtgcatttttatattatgtgtttgtaaatgacatgtcagcccttgtttcatgtttcctaaaagcagaatatttgcaacatttgttttgtataggaattatttgtgccacctgctgtggactgttttctttgcctagtgactagtgacctgtgttgtctaaacatgagtttcagccctttggttttgtttaataccatgtcaaatgcaaacttcaattctccccatttagctttattaaactgacgttctcttcaaaacttcttgctgaatggtactcagatgtgcattcacatacagatgtgttttgaagtgggtgtaccttgctttacctaatagatgtgtaaatagaacttttgtaagtcaaatcccattgtcactttgatttaaattattccagctccagtgtcaaactgctataaaatgaagacacatcacagctggaataatgtcggac

SEQ ID NO: 379388 - DNA, 4444 bp, Homo sapiens
cttctgtccgaagttgtgtcggaacgcatgccattataatgagtttttatatctggtgggagcttttacaagggtataaaataatgtgaatttagtgtatgtggagattttcctgttatctaagttcccagtttctctttcaatggcaagaaaacgggtttttgataaggcgcgcgccgcgggcagcttctgcctcagcgggtcttcggcggccgcgggaagacccgagagtcattagaagcgcaagatggcgactgcggccgaaacctcggcttcagaacccgaggctgagtccaaggctgggcccaaggctgacggagaggaggatgaggttaaggcggctaggacaaggagaaaggtgttatcgcgggctgtggccgctgcgacatacaagaccatggggccagcgtgggatcagcaggaggaaggcgtgagcgagagcgatggggatgagtacgccatggcttcctccgcggagagctcccccggggagtacgagtgggaatatgacgaagaggaggagaaaaaccagctggagattgagagactggaggagcagttgtctatcaacgtctatgactacaactgccatgtggacttgatcagactgctcaggctggaaggggagcttaccaaggtgaggatggcccgccagaagatgagtgaaatctttcccttgactgaagagctctggctggagtggctgcatgacgagatcagcatggcccaggatggcctggacagagagcacgtgtatgacctctttgagaaagccgtgaaggattacatttgtcctaacatttggctagagtatggccagtactcagttggtgggattggtcagaaaggtggccttgagaaagttcgctccgtgtttgaaagggctctctcgtctgttggtttacatatgaccaaaggactcgccctctgggaggcttaccgagagtttgaaagtgcgattgtggaagctgctcggcccgtagctggcttcctttccccttttgaccgggaacaaacctttgattcacagcttgagaaagtccacagtcttttccggcgacagttggcgatcccactctatgatatggaggccacatttgcagagtatgaagaatggtcagaagacccaataccagagtcagtaattcagaactataacaaagcactacagcagctggagaaatataaaccctatgaagaagcactgttgcaggcagaggcaccaaggctggcagaatatcaagcatatatcgattttgagatgaaaattggcgatcctgctcgcattcagttgatctttgagcgcgccctggtcgagaactgccttgtcccagacttatggatccgttacagtcagtacctagatcgacaactgaaagtaaaggatttggttttatctgtacataaccgcgctattagaaactgcccctggacagttgccttatggagtcggtacctcttggccatggagagacatggagttgatcatcaagtaatttctgtaaccttcgagaaagctttgaatgccggcttcatccaggccactgattatgtggagatttggcaggcataccttgattacctgaggagaagggttgatttcaaacaagactccagtaaagagctggaggagttgagggccgcctttactcgtgccttggagtatctgaagcaggaggtggaagagcgtttcaatgagagtggtgatccaagctgcgtgattatgcagaactgggctaggattgaggctcgactgtgcaataacatgcagaaagctcgggaactctgggatagcatcatgaccagaggaaatgccaagtacgccaacatgtggctagagtattacaacctggaaagagctcatggtgacacccagcactgccggaaggctctgcaccgggccgtccagtgcaccagtgactacccagagcacgtctgcgaagtgttactcaccatggagaggacagaaggttctttagaagattgggatatagctgttcagaaaactgaaacccgattagctcgtgtcaatgagcagagaatgaaggctgcagagaaggaagcagcccttgtgcagcaagaagaagaaaaggctgaacaacggaaaagagctcgggctgagaagaaagcgttaaaaaagaagaaaaagatcagaggcccagagaagcgcggagcagatgaggacgatgagaaagagtggggcgatgatgaagaagagcagccttccaaacgcagaagggtcgagaacagcatccctgcagctggagaaacacaaaatgtagaagtagcagcagggcccgctgggaaatgtgctgccgtagatgtggagcccccttcgaagcagaaggagaaggcagcctccctgaagagggacatgcccaaggtgctgcacgacagcagcaaggacagcatcaccgtctttgtcagcaacctgccctacagcatgcaggagccggacacgaagctcaggccactcttcgaggcctgtggggaggtggtccagatccgacccatcttcagcaaccgtggggatttccgaggttactgctacgtggagtttaaagaagagaaatcagcccttcaggcactggagatggaccggaaaagtgtagaagggaggccaatgtttgtttccccctgtgtggataagagcaaaaaccccgattttaaggtgttcaggtacagcacttccctagagaaacacaagctgttcatctcaggcctgcctttctcctgtactaaagaggaactagaagaaatctgtaaggctcatggcaccgtgaaggacctcaggctggtcaccaaccgggctggcaaaccaaagggcctggcctacgtggagtatgaaaatgaatcccaggcgtcgcaggctgtgatgaagatggacggcatgactatcaaagagaacatcatcaaagtggcaatcagcaaccctcctcagaggaaagttccagagaagccagagaccaggaaggcaccaggtggccccatgcttttgccgcagacatacggagcgagggggaagggaaggacgcagctgtctctactgcctcgtgccctgcagcgcccaagtgctgcagctcctcaggctgagaacggccctgccgcggctcctgcagttgccgccccagcagccaccgaggcacccaagatgtccaatgccgattttgccaagctgtttctgagaaagtgaacgggacgctgggagacaggaaatgccttacttcactctggcccggcggacctcccaccacccagcagtgcactggggatggacaggcctggtgtgctgcgtgctcgcaaccacagatggctcctcggctttagacagaaaggggaaggggttctaagtcaagagcctttcagtgctccctcatattgagggcagtggcagaaaagtgaccactctgcaggctgggcccaggatgtggtgtcctgagatagttttgtatcttaaagactgaggcacagaagcgaaacgagaacacactgtttttgagacacagttgtccaaatgtttctggccagctccggcccctttttgtatgacacttctcttccaccctgcacagcacatgtgcccgtcattcttttaattttaaaagatgaaatggcagatgctagtaattcacagaatggcctcttgtgggggtgggtctgagggaagtcagctataaaacatttgctggagttttgttcaatggggctgtgcatttttatattatgtgtttgtaaatgacatgtcagcccttgtttcatgtttcctaaaagcagaatatttgcaacatttgttttgtataggaattatttgtgccacctgctgtggactgttttctttgcctagtgactagtgacctgtgttgtctaaacatgagtttcagccctttggttttgtttaataccatgtcaaatgcaaacttcaattctccccatttagctttattaaactgacgttctcttcaaaacttcttgctgaatggtactcagatgtgcattcacatacagatgtgttttgaagtgggtgtaccttgctttacctaatagatgtgtaaatagaacttttgtaagtcaaatcccattgtcactttgatttaaattattccagctgtgatgtgtcttcattttatagcagtttgacactggagcttttgagcttttttacctcacatcttttatcaaataatatttactgctttgaaaacagcaacagcattggccagttcagtaggggaagcttgctttattaagacactctggagaaagacgtcagggaatccttgtatatgtcgtgggaatcaactcctcatttatctgttgcgtaagtttaagtttttgtgcatcagtcgggttttctatatttttttaacttaacattttttaatataaccgattaaaaagtagacagaacagtaaaataaactcctgtgtgcctaccaaaaaaaat

SEQ ID NO: 379389 - DNA, 3705 bp, Homo sapiens
cttctgtccgaagttgtgtcggaacgcatgccattataatgagtttttatatctggtgggagcttttacaagggtataaaataatgtgaatttagtgtatgtggagattttcctgttatctaagttcccagtttctctttcaatggcaagaaaacgggtttttgataaggcgcgcgccgcgggcagcttctgcctcagcgggtcttcggcggccgcgggaagacccgagagtcattagaagcgcaagatggcgactgcggccgaaacctcggcttcagaacccgaggctgagtccaaggctgggcccaaggctgacggagaggaggatgaggttaaggcggctaggacaaggagaaaggtgttatcgcgggctgtggccgctgcgacatacaagaccatggggccagcgtgggatcagcaggaggaaggcgtgagcgagagcgatggggatgagtacgccatggcttcctccgcggagagctcccccggggagtacgagtgggaatatgacgaagaggaggagaaaaaccagctggagattgagagactggaggagcagttgtctatcaacgtctatgactacaactgccatgtggacttgatcagactgctcaggctggaaggggagcttaccaaggtgaggatggcccgccagaagatgagtgaaatctttcccttgactgaagagctctggctggagtggctgcatgacgagatcagcatggcccaggatggcctggacagagagcacgtgtatgacctctttgagaaagccgtgaaggattacatttgtcctaacatttggctagagtatggccagtactcagttggtgggattggtcagaaaggtggccttgagaaagttcgctccgtgtttgaaagggctctctcgtctgttggtttacatatgaccaaaggactcgccctctgggaggcttaccgagagtttgaaagtgcgattgtggaagctgctcggcttgagaaagtccacagtcttttccggcgacagttggcgatcccactctatgatatggaggccacatttgcagagtatgaagaatggtcagaagacccaataccagagtcagtaattcagaactataacaaagcactacagcagctggagaaatataaaccctatgaagaagcactggttaagaaatagaacattgccagtaccttagaagtctcctatgtgcccctctccgattgcctcctcctccctctcccgagagttgcaggcagaggcaccaaggctggcagaatatcaagcatatatcgattttgagatgaaaattggcgatcctgctcgcattcagttgatctttgagcgcgccctggtcgagaactgccttgtcccagacttatggatccgttacagtcagtacctagatcgacaactgaaagtaaaggatttggttttatctgtacataaccgcgctattagaaactgcccctggacagttgccttatggagtcggtacctcttggccatggagagacatggagttgatcatcaagtaatttctgtaaccttcgagaaagctttgaatgccggcttcatccaggccactgattatgtggagatttggcaggcataccttgattacctgaggagaagggttgatttcaaacaagactccagtaaagagctggaggagttgagggccgcctttactcgtgccttggagtatctgaagcaggaggtggaagagcgtttcaatgagagtggtgatccaagctgcgtgattatgcagaactgggctaggattgaggctcgactgtgcaataacatgcagaaagctcgggaactctgggatagcatcatgaccagaggaaatgccaagtacgccaacatgtggctagagtattacaacctggaaagagctcatggtgacacccagcactgccggaaggctctgcaccgggccgtccagtgcaccagtgactacccagagcacgtctgcgaagtgttactcaccatggagaggacagaaggttctttagaagattgggatatagctgttcagaaaactgaaacccgattagctcgtgtcaatgagcagagaatgaaggctgcagagaaggaagcagcccttgtgcagcaagaagaagaaaaggctgaacaacggaaaagagctcgggctgagaagaaagcgttaaaaaagaagaaaaagatcagaggcccagagaagcgcggagcagatgaggacgatgagaaagagtggggcgatgatgaagaagagcagccttccaaacgcagaagggtcgagaacagcatccctgcagctggagaaacacaaaatgtagaagtagcagcagggcccgctgggaaatgtgctgccgtagatgtggagcccccttcgaagcagaaggagaaggcagcctccctgaagagggacatgcccaaggtgctgcacgacagcagcaaggacagcatcaccgtctttgtcagcaacctgccctacagcatgcaggagccggacacgaagctcaggccactcttcgaggcctgtggggaggtggtccagatccgacccatcttcagcaaccgtggggatttccgaggttactgctacgtggagtttaaagaagagaaatcagcccttcaggcactggagatggaccggaaaagtgtagaagggaggccaatgtttgtttccccctgtgtggataagagcaaaaaccccgattttaaggtgttcaggtacagcacttccctagagaaacacaagctgttcatctcaggcctgcctttctcctgtactaaagaggaactagaagaaatctgtaaggctcatggcaccgtgaaggacctcaggctggtcaccaaccgggctggcaaaccaaagggcctggcctacgtggagtatgaaaatgaatcccaggcgtcgcaggctgtgatgaagatggacggcatgactatcaaagagaacatcatcaaagtggcaatcagcaaccctcctcagaggaaagttccagagaagccagagaccaggaaggcaccaggtggccccatgcttttgccgcagacatacggagcgtaagtgcttgcatggtagactagtgcaaacttcgtcctggctggcaccagttcatggatcacggggggattaacccgggatgaattagcttcctgttaggacagaaaagccaagatgtgctgttccttgtggtaatcactgtggttccactggagcaaggcgtccagagcaggatgcaagcctaggcagtgacctctgcctggtactggccaatttacacttgtcatttatttcagacagaaataaggcagtgattattttaaagtcccctttgccagttggatctgtgtgtttacaaagaaatctcatacccatgtgtgtgccagtctacggccctagctatgatccacataagctgtgctgttcgctggtttgggatgaggaggagatagcagaattgccaggtgactggtgaggtctgagaggtgatagtcacactgatcccctctgagtgtgactggtgctcagggttgatctttgccaaaactgaacaaggccaagtctgttgaagcagtttttacttcataaacagaattaaggaggcagggattatcttatcctttttttttttcaccttttaacttctggttatattaaaactgtcttggcttattttcacaaataaatgaggggccacgaattgttgcttcaaaaggtccat

SEQ ID NO: 379390 - DNA, 3460 bp, Homo sapiens
aaggagttttgactttgcagggcccctgagaggctctgggagatcctcaggggtacgtggatcttactttgagaaccagtgctctgaatttattctgagcatcataatatgtatatataattatgtatatttaaaatgttttaaaaacaaatatgaatacactgttgcataacagttatgattagcagaattgtgtagctgttgtgattagcagtgtacaaaaaggatctgtttgcgaccagccttgccaacctggtgaaaacctgtctctattagaaatacaaaaattagctgggtgtagtggtgggcacctgtaatcccagctactcaggaggctgaagcaggagaattgcctgaacctgggagacagaggttggagtgagccgagatcgtgctattgcactcccacctgggtgacaagagcgagactccccttccaaaaaaaaaaaaagatctgactctgggtatgaaatttgacactaccctggattcataactctcctgtcagtaggacgccatagtaaaatttccctggggactgtatcaggttacagagagctgttggactcccccgccatgtgccgcacatgtgaatgctgtaaaggcagaatgctggttgcagatcacaatatcaggtacactttccagtagcccctacatggctgagggagagagtgcttcagggaaatacttcgtaggtgactgtagagactctggaaggagaaagcatcatggatagatctgaaagctaaggtcttctcagaagctagagttactgaagagtgagtttctacctgggagaagacggcctctcccttcgagtgccttccactttgtgtcctggtggcagcaactttttgttttctgccttagagctcatggtgacacccagcactgccggaaggctctgcaccgggccgtccagtgcaccagtgactacccagagcacgtctgcgaagtgttactcaccatggagaggacagaaggttctttagaagattgggatatagctgttcagaaaactgaaacccgattagctcgtgtcaatgagcagagaatgaaggctgcagagaaggaagcagcccttgtgcagcaagaagaagaaaaggctgaacaacggaaaagagctcgggctgagaagaaagcgttaaaaaagaagaaaaagatcagaggcccagagaagcgcggagcagatgaggacgatgagaaagagtggggcgatgatgaagaagagcagccttccaaacgcagaagggtcgagaacagcatccctgcagctggagaaacacaaaatgtagaagtagcagcagggcccgctgggaaatgtgctgccgtagatgtggagcccccttcgaagcagaaggagaaggcagcctccctgaagagggacatgcccaaggtgctgcacgacagcagcaaggacagcatcaccgtctttgtcagcaacctgccctacagcatgcaggagccggacacgaagctcaggccactcttcgaggcctgtggggaggtggtccagatccgacccatcttcagcaaccgtggggatttccgaggttactgctacgtggagtttaaagaagagaaatcagcccttcaggcactggagatggaccggaaaagtgtagaagggaggccaatgtttgtttccccctgtgtggataagagcaaaaaccccgattttaaggtgttcaggtacagcacttccctagagaaacacaagctgttcatctcaggcctgcctttctcctgtactaaagaggaactagaagaaatctgtaaggctcatggcaccgtgaaggacctcaggctggtcaccaaccgggctggcaaaccaaagggcctggcctacgtggagtatgaaaatgaatcccaggcgtcgcaggctgtgatgaagatggacggcatgactatcaaagagaacatcatcaaagtggcaatcagcaaccctcctcagaggaaagttccagagaagccagagaccaggaaggcaccaggtggccccatgcttttgccgcagacatacggagcgagggggaagggaaggacgcagctgtctctactgcctcgtgccctgcagcgcccaagtgctgcagctcctcaggctgagaacggccctgccgcggctcctgcagttgccgccccagcagccaccgaggcacccaagatgtccaatgccgattttgccaagctgtttctgagaaagtgaacgggacgctgggagacaggaaatgccttacttcactctggcccggcggacctcccaccacccagcagtgcactggggatggacaggcctggtgtgctgcgtgctcgcaaccacagatggctcctcggctttagacagaaaggggaaggggttctaagtcaagagcctttcagtgctccctcatattgagggcagtggcagaaaagtgaccactctgcaggctgggcccaggatgtggtgtcctgagatagttttgtatcttaaagactgaggcacagaagcgaaacgagaacacactgtttttgagacacagttgtccaaatgtttctggccagctccggcccctttttgtatgacacttctcttccaccctgcacagcacatgtgcccgtcattcttttaattttaaaagatgaaatggcagatgctagtaattcacagaatggcctcttgtgggggtgggtctgagggaagtcagctataaaacatttgctggagttttgttcaatggggctgtgcatttttatattatgtgtttgtaaatgacatgtcagcccttgtttcatgtttcctaaaagcagaatatttgcaacatttgttttgtataggaattatttgtgccacctgctgtggactgttttctttgcctagtgactagtgacctgtgttgtctaaacatgagtttcagccctttggttttgtttaataccatgtcaaatgcaaacttcaattctccccatttagctttattaaactgacgttctcttcaaaacttcttgctgaatggtactcagatgtgcattcacatacagatgtgttttgaagtgggtgtaccttgctttacctaatagatgtgtaaatagaacttttgtaagtcaaatcccattgtcactttgatttaaattattccagctgtgatgtgtcttcattttatagcagtttgacactggagcttttgagcttttttacctcacatcttttatcaaataatatttactgctttgaaaacagcaacagcattggccagttcagtaggggaagcttgctttattaagacactctggagaaagacgtcagggaatccttgtatatgtcgtgggaatcaactcctcatttatctgttgcgtaagtttaagtttttgtgcatcagtcgggttttctatatttttttaacttaacattttttaatataaccgattaaaaagtagacagaacagtaaaataaactcctgtgtgcctaccaaaaaaaat

SEQ ID NO: 379391 - DNA, 2138 bp, Homo sapiens
agtaacctcggaaatccccacggttgctgaagatgggtcggatctggaccacctccctgaagagggacatgcccaaggtgctgcacgacagcagcaaggacagcatcaccgtctttgtcagcaacctgccctacagcatgcaggagccggacacgaagctcaggccactcttcgaggcctgtggggaggtggtccagatccgacccatcttcagcaaccgtggggatttccgaggttactgctacgtggagtttaaagaagagaaatcagcccttcaggcactggagatggaccggaaaagtgtagaagggaggccaatgtttgtttccccctgtgtggataagagcaaaaaccccgattttaaggtgttcaggtacagcacttccctagagaaacacaagctgttcatctcaggcctgcctttctcctgtactaaagaggaactagaagaaatctgtaaggctcatggcaccgtgaaggacctcaggctggtcaccaaccgggctggcaaaccaaagggcctggcctacgtggagtatgaaaatgaatcccaggcgtcgcaggctgtgatgaagatggacggcatgactatcaaagagaacatcatcaaagtggcaatcagcaaccctcctcagaggaaagttccagagaagccagagaccaggaaggcaccaggtggccccatgcttttgccgcagacatacggagcgagggggaagggaaggacgcagctgtctctactgcctcgtgccctgcagcgcccaagtgctgcagctcctcaggctgagaacggccctgccgcggctcctgcagttgccgccccagcagccaccgaggcacccaagatgtccaatgccgattttgccaagctgtttctgagaaagtgaacgggacgctgggagacaggaaatgccttacttcactctggcccggcggacctcccaccacccagcagtgcactggggatggacaggcctggtgtgctgcgtgctcgcaaccacagatggctcctcggctttagacagaaaggggaaggggttctaagtcaagagcctttcagtgctccctcatattgagggcagtggcagaaaagtgaccactctgcaggctgggcccaggatgtggtgtcctgagatagttttgtatcttaaagactgaggcacagaagcgaaacgagaacacactgtttttgagacacagttgtccaaatgtttctggccagctccggcccctttttgtatgacacttctcttccaccctgcacagcacatgtgcccgtcattcttttaattttaaaagatgaaatggcagatgctagtaattcacagaatggcctcttgtgggggtgggtctgagggaagtcagctataaaacatttgctggagttttgttcaatggggctgtgcatttttatattatgtgtttgtaaatgacatgtcagcccttgtttcatgtttcctaaaagcagaatatttgcaacatttgttttgtataggaattatttgtgccacctgctgtggactgttttctttgcctagtgactagtgacctgtgttgtctaaacatgagtttcagccctttggttttgtttaataccatgtcaaatgcaaacttcaattctccccatttagctttattaaactgacgttctcttcaaaacttcttgctgaatggtactcagatgtgcattcacatacagatgtgttttgaagtgggtgtaccttgctttacctaatagatgtgtaaatagaacttttgtaagtcaaatcccattgtcactttgatttaaattattccagctgtgatgtgtcttcattttatagcagtttgacactggagcttttgagcttttttacctcacatcttttatcaaataatatttactgctttgaaaacagcaacagcattggccagttcagtaggggaagcttgctttattaagacactctggagaaagacgtcagggaatccttgtatatgtcgtgggaatcaactcctcatttatctgttgcgtaagtttaagtttttgtgcatcagtcgggttttctatatttttttaacttaacattttttaatataaccgattaaaaagtagacagaacagtaaaataaactcctgtgtgcctaccaaaaaaaat

SEQ ID NO: 379392 - DNA, 2177 bp, Homo sapiens
cttctgtccgaagttgtgtcggaacgcatgccattataatgagtttttatatctggtgggagcttttacaagggtataaaataatgtgaatttagtgtatgtggagattttcctgttatctaagttcccagtttctctttcaatggcaagaaaacgggtttttgataaggcgcgcgccgcgggcagcttctgcctcagcgggtcttcggcggccgcgggaagacccgagagtcattagaagcgcaagatggcgactgcggccgaaacctcggcttcagaacccgaggctgagtccaaggctgggcccaaggctgacggagaggaggatgaggttaaggcggctaggacaaggagaaaggtgttatcgcgggctgtggccgctgcgacatacaagaccatggggccagcgtgggatcagcaggaggaaggcgtgagcgagagcgatggggatgagtacgccatggcttcctccgcggagagctcccccggggagtacgagtgggaatatgacgaagaggaggagaaaaaccagctggagattgagagactggaggagcagttgtctatcaacgtctatgactacaactgccatgtggacttgatcagactgctcaggctggaaggggagcttaccaaggtgaggatggcccgccagaagatgagtgaaatctttcccttgactgaagagctctggctggagtggctgcatgacgagatcagcatggcccaggatggcctggacagagagcacgtgtatgacctctttgagaaagccgtgaaggattacatttgtcctaacatttggctagagtatggccagtactcagttggtgggattggtcagaaaggtggccttgagaaagttcgctccgtgtttgaaagggctctctcgtctgttggtttacatatgaccaaaggactcgccctctgggaggcttaccgagagtttgaaagtgcgattgtggaagctgctcggcttgagaaagtccacagtcttttccggcgacagttggcgatcccactctatgatatggaggccacatttgcagagtatgaagaatggtcagaagacccaataccagagtcagtaattcagaactataacaaagcactacagcagctggagaaatataaaccctatgaagaagcactgttgcaggcagaggcaccaaggctggcagaatatcaagcatatatcgattttgagatgaaaattggcgatcctgctcgcattcagttgatctttgagcgcgccctggtcgagaactgccttgtcccagacttatggatccgttacagtcagtacctagatcgacaactgaaagtaaaggatttggttttatctgtacataaccgcgctattagaaactgcccctggacagttgccttatggagtcggtacctcttggccatggagagacatggagttgatcatcaagtaatttctgtaaccttcgagaaagctttgaatgccggcttcatccaggccactgattatgtggagatttggcaggcataccttgattacctgaggagaagggttgatttcaaacaaggtatttaagcacatgtttttcactttagagctgaacatgttcttaatacaacttttggcgagatgtcccagttccccagatacattgtgattgggcaaatgatgtagactaggtattggtgactttttcccccagaaatcttagcaatttctgtctttaacaagtcatgatgtggattgtaaagcaagagagtaatcgtttatactggctcctgccagcctttttagtcttagctctcatttctcctttcaggtctttttatttatcctaaatacttcttgaaataagtctgctgtgttttagaaaaatctttgtacctctgtgggatcctttgccccttcatgtccccccgaaaacaaccagaaaacccctaacttgtacttgcacactcatgtcagctgtcacctcatacaggtagcctttagccattctcttgtttgcctgtgtcaccccagctgggggagactcccccccacagcaccctgtgtttgcctttttcaccacgctgtccatgctctattctgttcaaatttctttctccccaactatgtgatgagggcaggaattggcaattttatttctgtgtcccttgcatgatgccaggtacatagtgggtctcca

SEQ ID NO: 379393 - DNA, 1170 bp, Homo sapiens
cttctgtccgaagttgtgtcggaacgcatgccattataatgagtttttatatctggtgggagcttttacaagggtataaaataatgtgaatttagtgtatgtggagattttcctgttatctaagttcccagtttctctttcaatggcaagaaaacgggtttttgataaggcgcgcgccgcgggcagcttctgcctcagcgggtcttcggcggccgcgggaagacccgagagtcattagaagcgcaagatggcgactgcggccgaaacctcggcttcagaacccgaggctgagtccaaggctgggcccaaggctgacggagaggaggatgaggttaaggcggctaggacaaggagaaaggtgttatcgcgggctgtggccgctgcgacatacaagaccatggggccagcgtgggatcagcaggaggaaggcgtgagcgagagcgatggggatgagtacgccatggcttcctccgcggagagctcccccggggagtacgagtgggaatatgacgaagaggaggagaaaaaccagctggagattgagagactggaggagcagttgtctatcaacgtctatgactacaactgccatgtggacttgatcagactgctcaggctggaaggggagcttaccaaggtgaggatggcccgccagaagatgagtgaaatctttcccttgactgaagagctctggctggagtggctgcatgacgagatcagcatggcccaggatggcctggacagagagcacgtgtatgacctctttgagaaagccgtgaaggattacatttgtaagttcccgtggactttttttggatatctggcaatgtcatatatatcagtctgctgttgaggactgtattatgagatgttgctacccagaaaagggaacgttagtttcacaattagcaagatttaagttgagttgtcttatcattgtctttggtctttaattgaggaagtttaattttaaaataaaagtggaagaagcacttgtagtaagggaatgaatacactcacactcaggatttattgacagtgagaacttacatggtatttccactgatcttttatacattcaataggtttttagaggttttggacaggatgctttaaaaaaaaagattaaaacattaaaagaaaacctttttattttgaagtaattataga

SEQ ID NO: 379394 - DNA, 963 bp, Homo sapiens
gggcagagggaagcataataatttccaccaacccttacgtgaagattttttttccttttaaattaccacccaatttggcatttatttaaggtcagggctgtgcttcccataactttgcagagtgtgtaacccgttgacgatttcagcgcaagagacattatttgatttcttgtggaaggcttacaaagtaaagtatcaataccaaacaagtgcttgttgagttctaaagttaaaaaattaaaatcgttctttccttaggtatacaattttattgccaagcaataaaattggcaagaaaaccaaagttattgttcagtactttgtattgttctactctgtgcccaccaaatgtcaaagcactggaaggacagagggacaagagggatggccctttcaggacgggaacccacgtctggctggagagataagaccgattataatcagcaagacatggccaggagctaaattataaggaagaaactgctactgagggggatcaggaaaggatgcagaaggatgtgctggaaaaacagaggagggtttctcagaaaaagcatcttccgtccaaagaaacagtgtttgtacaggatgaaaagtctgaggaggtcatcttgggcaaaggaaacggcagctataaatatttgtgaattaacagatatgcttccctgcacaatgaattaccctttttgtctccagtaagcacccagatcttaatgtcagcttttgcaagttttgaaatggtttctggaactccatcctgtagcttgtcttcaatagctgtagctcccaggagctagaatgtatattaaaaaaaaaaaaaaaaaaaaaggaattagcaaacaaaccaaaagttttctgtaattacaggttgccaacctgtaaaaagaagggctaattatacatcctggttgctgctctcctggggccaatggccagtgttaacagggaaggctgccatgtttc

SEQ ID NO: 379395 - DNA, 378 bp, Homo sapiens
gacaaggcttatgtctccatctcagttcttccccataaggggaataccagactaggcagtggtgactggtagcagttgttttcttggcaattcaataaagacaatgctaagaataagaacactcaaggaagctaagtgaaggaaaaaagagctggggacagtggtgatcctggtgggagaggttggggtggggcaaagagcaaagcatgctccctgagcagcatgtcaggccttgcttctgccctccactgtctgccctgccttgacctgtactgcaggctgactgattaacaggcttccagcagctgtgccagtcaggtggccagggctgccctgcacaaccttgcttccttgcattcccttcagcaatgttcctct

SEQ ID NO: 379396 - DNA, 436 bp, Homo sapiens
ccaccacagtggttaaaaggcgtttgtatctgacactatgtgtgtgttttaaaataaacttttggaaacatgtttggaaaaaaaaaaaaaaaaaaaaaaaaaaaaaaaaaaaaaaaaaaaaaaaaaaaaaaaaaaaaaaaaaaaaaaaaaaaaaaaaaaaaaaaaaaaaaaaaaaaaaaaaaaaaaaaaaataaaaaaaaaaatttagaaaataaaaacaaaaatattaaaaatataagtaaagtgggtgtatatcgcctatatgggttaaagtttaaattaaaacagcgttattagctaagagaataaaccgtaaatacacaggcttatgataaacataaaatggcttagaacaaattcacttttagacagtttgttcactttgcaaggagcacggaaatggtgacgcgtaaatattatgtaaaattcctagata

SEQ ID NO: 379397 - DNA, 2761 bp, Homo sapiens
cgcgagagcaggttaggagaggagaggaggccgcagtactgctcacacgctccgctcttctcccactctcggcctacctttacccgcccgcctgctcggcgaccagaacaccttccaccatgaccacctcagcaagttcccacttaaataaaggcatcaagcaggtgtacatgtccctgcctcagggtgagaaagtccaggccatgtatatctggatcgatggtactggagaaggactgcgctgcaagacccggaccctggacagtgagcccaagtgtgtggaagagttgcctgagtggaatttcgatggctccagtactttacagtctgagggttccaacagtgacatgtatctcgtgcctgctgccatgtttcgggaccccttccgtaaggaccctaacaagctggtgttatgtgaagttttcaagtacaatcgaaggcctgcagagaccaatttgaggcacacctgtaaacggataatggacatggtgagcaaccagcacccctggtttggcatggagcaggagtataccctcatggggacagatgggcacccctttggttggccttccaacggcttcccagggccccagggtccatattactgtggtgtgggagcagacagagcctatggcagggacatcgtggaggcccattaccgggcctgcttgtatgctggagtcaagattgcggggactaatgccgaggtcatgcctgcccagtgggaatttcagattggaccttgtgaaggaatcagcatgggagatcatctctgggtggcccgtttcatcttgcatcgtgtgtgtgaagactttggagtgatagcaacctttgatcctaagcccattcctgggaactggaatggtgcaggctgccataccaacttcagcaccaaggccatgcgggaggagaatggtctgaagtacatcgaggaggccattgagaaactaagcaagcggcaccagtaccacatccgtgcctatgatcccaagggaggcctggacaatgcccgacgtctaactggattccatgaaacctccaacatcaacgacttttctgctggtgtagccaatcgtagcgccagcatacgcattccccggactgttggccaggagaagaagggttactttgaagatcgtcgcccctctgccaactgcgaccccttttcggtgacagaagccctcatccgcacgtgtcttctcaatgaaaccggcgatgagcccttccagtacaaaaattaagtggactagacctccagctgttgagcccctcctagttcttcatcccactccaactcttccccctctcccagttgtcccgattgtaactcaaagggtggaatatcaaggtcgtttttttcattccatgtgcccagttaatcttgctttctttgtttggctgggatagaggggtcaagttattaatttcttcacacctaccctcctttttttccctatcactgaagctttttagtgcattagtggggaggagggtggggagacataaccactgcttccatttaatggggtgcacctgtccaataggcgtagctatccggacagagcacgtttgcagaagggggtctcttcttccaggtagctgaaaggggaagacctgacgtactctggttaggttaggacttgccctcgtggtggaaacttttcttaaaaagttataaccaacttttctattaaaagtgggaattaggagagaaggtaggggttgggaatcagagagaatggctttggtctcttgcttgtgggactagcctggcttgggactaaatgccctgctctgaacacgaagcttagtataaactgatggatatccctaccttgaaagaagaaaaggttcttactgcttggtccttgatttatcacacaaagcagaatagtatttttatatttaaatgtaaagacaaaaaactatatgtatggttttgtggattatgtgtgttttgctaaaggaaaaaaccatccaggtcacggggcaccaaatttgagacaaatagtcggattagaaataaagcatctcattttgagtagagagcaagggaagtggttcttagatggtgatctgggattaggccctcaagacccttttgggtttctgccctgcccaccctctggagaaggtgggcactggattagttaacagacgacacgttactagcagtcacttgatctccgtggctttggtttaaaagacacacttgtccacataggtttagagataagagttggctggtcaacttgagcatgttactgacagagggggtattggggttattttctggtaggaatagcatgtcactaaagcaggccttttgatattaaattttttaaaaagcaaaattatagaagtttagattttaatcaaatttgtagggtttctaggtaatttttacagaattgcttgtttgcttcaactgtctcctacctctgctcttggaggagatggggacagggctggagtcaaaacacttgtaattttgtatcttgatgtctttgttaagactgctgaagaattattttttttcttttataataaggaataaaccccacctttattccttcatttcatctaccattttctggttcttgtgttggctgtggcaggccagctgtggttttcttttgccatgacaacttctaattgccatgtacagtatgttcaaagtcaaataactcctcattgtaaacaaactgtgtaactgcccaaagcagcacttataaatcagcctaacataagaaaaaaaaaa

SEQ ID NO: 379398 - DNA, 3489 bp, Homo sapiens
cgcgagagcaggttaggagaggagaggaggccgcagtactgctcacacgctccgctcttctcccactctcggcctacctttacccgcccgcctgctcggcgaccagaacaccttccaccatgaccacctcagcaagttcccacttaaataaaggcatcaagcaggtgtacatgtccctgcctcagggtgagaaagtccaggccatgtatatctggatcgatggtactggagaaggactgcgctgcaagacccggaccctggacagtgagcccaagtgtgtggaagagttgcctgagtggaatttcgatggctccagtactttacagtctgagggttccaacagtgacatgtatctcgtgcctgctgccatgtttcgggaccccttccgtaaggaccctaacaagctggtgttatgtgaagttttcaagtacaatcgaaggcctgcaggtgtgttatagcacagctatggatacccctcctcaatctgtgaatgctgtgaaggggagggagaagacattctgaaatcagcattgggaagactaggcaatttcagcactattttaagaatctgagtgattcttttccctgaacttctgctttgaggaagagataatatggcccatctttctatggtcttctctgttggttgcataaaatagcattggatttgtccagatctgtttgccggtcttggagtccccagtaacagccttcctgcctggaatgtaggccaggacaaatgtaaaccaatggacaaatgtttctcaaaaattatagaatggctccaagtgcctgagaaatgaagaataaatctgacaaccagaagcagctgtcttgtgaatagagggttaagtgcctggcatttggtgcttgggaggtggccagaatgcagataaggtgaaagttgccctgttctaaatccactcccatgtgacttggttgtaactgagtttagttaaaactgaagtctttcagagtcttcctacagatgtacaattaacagcttctctcatttttctgactcggtgatcccaagaaggcctatactgggtcagttcataccatagtgcacacctcagttgtatagaatccaaggactattctcccatcagcatcggtattcagcatctatgtctttagatccctgatggcgtattattgactcttttttctagagaccaatttgaggcacacctgtaaacggataatggacatggtgagcaaccagcacccctggtttggcatggagcaggagtataccctcatggggacagatgggcacccctttggttggccttccaacggcttcccagggccccagggtccatattactgtggtgtgggagcagacagagcctatggcagggacatcgtggaggcccattaccgggcctgcttgtatgctggagtcaagattgcggggactaatgccgaggtcatgcctgcccagtgggaatttcagattggaccttgtgaaggaatcagcatgggagatcatctctgggtggcccgtttcatcttgcatcgtgtgtgtgaagactttggagtgatagcaacctttgatcctaagcccattcctgggaactggaatggtgcaggctgccataccaacttcagcaccaaggccatgcgggaggagaatggtctgaagtacatcgaggaggccattgagaaactaagcaagcggcaccagtaccacatccgtgcctatgatcccaagggaggcctggacaatgcccgacgtctaactggattccatgaaacctccaacatcaacgacttttctgctggtgtagccaatcgtagcgccagcatacgcattccccggactgttggccaggagaagaagggttactttgaagatcgtcgcccctctgccaactgcgaccccttttcggtgacagaagccctcatccgcacgtgtcttctcaatgaaaccggcgatgagcccttccagtacaaaaattaagtggactagacctccagctgttgagcccctcctagttcttcatcccactccaactcttccccctctcccagttgtcccgattgtaactcaaagggtggaatatcaaggtcgtttttttcattccatgtgcccagttaatcttgctttctttgtttggctgggatagaggggtcaagttattaatttcttcacacctaccctcctttttttccctatcactgaagctttttagtgcattagtggggaggagggtggggagacataaccactgcttccatttaatggggtgcacctgtccaataggcgtagctatccggacagagcacgtttgcagaagggggtctcttcttccaggtagctgaaaggggaagacctgacgtactctggttaggttaggacttgccctcgtggtggaaacttttcttaaaaagttataaccaacttttctattaaaagtgggaattaggagagaaggtaggggttgggaatcagagagaatggctttggtctcttgcttgtgggactagcctggcttgggactaaatgccctgctctgaacacgaagcttagtataaactgatggatatccctaccttgaaagaagaaaaggttcttactgcttggtccttgatttatcacacaaagcagaatagtatttttatatttaaatgtaaagacaaaaaactatatgtatggttttgtggattatgtgtgttttgctaaaggaaaaaaccatccaggtcacggggcaccaaatttgagacaaatagtcggattagaaataaagcatctcattttgagtagagagcaagggaagtggttcttagatggtgatctgggattaggccctcaagacccttttgggtttctgccctgcccaccctctggagaaggtgggcactggattagttaacagacgacacgttactagcagtcacttgatctccgtggctttggtttaaaagacacacttgtccacataggtttagagataagagttggctggtcaacttgagcatgttactgacagagggggtattggggttattttctggtaggaatagcatgtcactaaagcaggccttttgatattaaattttttaaaaagcaaaattatagaagtttagattttaatcaaatttgtagggtttctaggtaatttttacagaattgcttgtttgcttcaactgtctcctacctctgctcttggaggagatggggacagggctggagtcaaaacacttgtaattttgtatcttgatgtctttgttaagactgctgaagaattattttttttcttttataataaggaataaaccccacctttattccttcatttcatctaccattttctggttcttgtgttggctgtggcaggccagctgtggttttcttttgccatgacaacttctaattgccatgtacagtatgttcaaagtcaaataactcctcattgtaaacaaactgtgtaactgcccaaagcagcacttataaatcagcctaacataagaaaaaaaaaa

SEQ ID NO: 379399 - DNA, 3129 bp, Homo sapiens
cgcgagagcaggttaggagaggagaggaggccgcagtactgctcacacgctccgctcttctcccactctcggcctacctttacccgcccgcctgctcggcgaccagaacaccttccaccatgaccacctcagcaagttcccacttaaataaaggcatcaagcaggtgtacatgtccctgcctcagggtgagaaagtccaggccatgtatatctggatcgatggtactggagaaggactgcgctgcaagacccggaccctggacagtgagcccaagtgtgtggaagagttgcctgagtggaatttcgatggctccagtactttacagtctgagggttccaacagtgacatgtatctcgtgcctgctgccatgtttcgggaccccttccgtaaggaccctaacaagctggtgttatgtgaagttttcaagtacaatcgaaggcctgcagagaccaatttgaggcacacctgtaaacggataatggacatggtgagcaaccagcacccctggtttggcatggagcaggagtataccctcatggggacagatgggcacccctttggttggccttccaacggcttcccagggccccagggtaagtctccttgggttagaggtgaaattcccagaagtgtctaactgtgcaggaatgccccttcccagggatgggaatgactttcagaatcaagaagcaaaataatacagtaaaggcgaaacagccctcacatcaccaaagtccaaaaatggatatgaatatataaagtaaggttttagggggaacgtttggccccactgaagctgtggtgaagaggaactcccctattgcccctcccctgccccgcacctgcagatgaaggcaaggatagtgattcaagagggcaaggcttaagggccttctgatctctgactttgggattctctggatttcttgactcttagtgttttgtcctgatgcttctgtaggtccatattactgtggtgtgggagcagacagagcctatggcagggacatcgtggaggcccattaccgggcctgcttgtatgctggagtcaagattgcggggactaatgccgaggtcatgcctgcccagtgggaatttcagattggaccttgtgaaggaatcagcatgggagatcatctctgggtggcccgtttcatcttgcatcgtgtgtgtgaagactttggagtgatagcaacctttgatcctaagcccattcctgggaactggaatggtgcaggctgccataccaacttcagcaccaaggccatgcgggaggagaatggtctgaagtacatcgaggaggccattgagaaactaagcaagcggcaccagtaccacatccgtgcctatgatcccaagggaggcctggacaatgcccgacgtctaactggattccatgaaacctccaacatcaacgacttttctgctggtgtagccaatcgtagcgccagcatacgcattccccggactgttggccaggagaagaagggttactttgaagatcgtcgcccctctgccaactgcgaccccttttcggtgacagaagccctcatccgcacgtgtcttctcaatgaaaccggcgatgagcccttccagtacaaaaattaagtggactagacctccagctgttgagcccctcctagttcttcatcccactccaactcttccccctctcccagttgtcccgattgtaactcaaagggtggaatatcaaggtcgtttttttcattccatgtgcccagttaatcttgctttctttgtttggctgggatagaggggtcaagttattaatttcttcacacctaccctcctttttttccctatcactgaagctttttagtgcattagtggggaggagggtggggagacataaccactgcttccatttaatggggtgcacctgtccaataggcgtagctatccggacagagcacgtttgcagaagggggtctcttcttccaggtagctgaaaggggaagacctgacgtactctggttaggttaggacttgccctcgtggtggaaacttttcttaaaaagttataaccaacttttctattaaaagtgggaattaggagagaaggtaggggttgggaatcagagagaatggctttggtctcttgcttgtgggactagcctggcttgggactaaatgccctgctctgaacacgaagcttagtataaactgatggatatccctaccttgaaagaagaaaaggttcttactgcttggtccttgatttatcacacaaagcagaatagtatttttatatttaaatgtaaagacaaaaaactatatgtatggttttgtggattatgtgtgttttgctaaaggaaaaaaccatccaggtcacggggcaccaaatttgagacaaatagtcggattagaaataaagcatctcattttgagtagagagcaagggaagtggttcttagatggtgatctgggattaggccctcaagacccttttgggtttctgccctgcccaccctctggagaaggtgggcactggattagttaacagacgacacgttactagcagtcacttgatctccgtggctttggtttaaaagacacacttgtccacataggtttagagataagagttggctggtcaacttgagcatgttactgacagagggggtattggggttattttctggtaggaatagcatgtcactaaagcaggccttttgatattaaattttttaaaaagcaaaattatagaagtttagattttaatcaaatttgtagggtttctaggtaatttttacagaattgcttgtttgcttcaactgtctcctacctctgctcttggaggagatggggacagggctggagtcaaaacacttgtaattttgtatcttgatgtctttgttaagactgctgaagaattattttttttcttttataataaggaataaaccccacctttattccttcatttcatctaccattttctggttcttgtgttggctgtggcaggccagctgtggttttcttttgccatgacaacttctaattgccatgtacagtatgttcaaagtcaaataactcctcattgtaaacaaactgtgtaactgcccaaagcagcacttataaatcagcctaacataagaaaaaaaaaa

SEQ ID NO: 379400 - DNA, 3857 bp, Homo sapiens
cgcgagagcaggttaggagaggagaggaggccgcagtactgctcacacgctccgctcttctcccactctcggcctacctttacccgcccgcctgctcggcgaccagaacaccttccaccatgaccacctcagcaagttcccacttaaataaaggcatcaagcaggtgtacatgtccctgcctcagggtgagaaagtccaggccatgtatatctggatcgatggtactggagaaggactgcgctgcaagacccggaccctggacagtgagcccaagtgtgtggaagagttgcctgagtggaatttcgatggctccagtactttacagtctgagggttccaacagtgacatgtatctcgtgcctgctgccatgtttcgggaccccttccgtaaggaccctaacaagctggtgttatgtgaagttttcaagtacaatcgaaggcctgcaggtgtgttatagcacagctatggatacccctcctcaatctgtgaatgctgtgaaggggagggagaagacattctgaaatcagcattgggaagactaggcaatttcagcactattttaagaatctgagtgattcttttccctgaacttctgctttgaggaagagataatatggcccatctttctatggtcttctctgttggttgcataaaatagcattggatttgtccagatctgtttgccggtcttggagtccccagtaacagccttcctgcctggaatgtaggccaggacaaatgtaaaccaatggacaaatgtttctcaaaaattatagaatggctccaagtgcctgagaaatgaagaataaatctgacaaccagaagcagctgtcttgtgaatagagggttaagtgcctggcatttggtgcttgggaggtggccagaatgcagataaggtgaaagttgccctgttctaaatccactcccatgtgacttggttgtaactgagtttagttaaaactgaagtctttcagagtcttcctacagatgtacaattaacagcttctctcatttttctgactcggtgatcccaagaaggcctatactgggtcagttcataccatagtgcacacctcagttgtatagaatccaaggactattctcccatcagcatcggtattcagcatctatgtctttagatccctgatggcgtattattgactcttttttctagagaccaatttgaggcacacctgtaaacggataatggacatggtgagcaaccagcacccctggtttggcatggagcaggagtataccctcatggggacagatgggcacccctttggttggccttccaacggcttcccagggccccagggtaagtctccttgggttagaggtgaaattcccagaagtgtctaactgtgcaggaatgccccttcccagggatgggaatgactttcagaatcaagaagcaaaataatacagtaaaggcgaaacagccctcacatcaccaaagtccaaaaatggatatgaatatataaagtaaggttttagggggaacgtttggccccactgaagctgtggtgaagaggaactcccctattgcccctcccctgccccgcacctgcagatgaaggcaaggatagtgattcaagagggcaaggcttaagggccttctgatctctgactttgggattctctggatttcttgactcttagtgttttgtcctgatgcttctgtaggtccatattactgtggtgtgggagcagacagagcctatggcagggacatcgtggaggcccattaccgggcctgcttgtatgctggagtcaagattgcggggactaatgccgaggtcatgcctgcccagtgggaatttcagattggaccttgtgaaggaatcagcatgggagatcatctctgggtggcccgtttcatcttgcatcgtgtgtgtgaagactttggagtgatagcaacctttgatcctaagcccattcctgggaactggaatggtgcaggctgccataccaacttcagcaccaaggccatgcgggaggagaatggtctgaagtacatcgaggaggccattgagaaactaagcaagcggcaccagtaccacatccgtgcctatgatcccaagggaggcctggacaatgcccgacgtctaactggattccatgaaacctccaacatcaacgacttttctgctggtgtagccaatcgtagcgccagcatacgcattccccggactgttggccaggagaagaagggttactttgaagatcgtcgcccctctgccaactgcgaccccttttcggtgacagaagccctcatccgcacgtgtcttctcaatgaaaccggcgatgagcccttccagtacaaaaattaagtggactagacctccagctgttgagcccctcctagttcttcatcccactccaactcttccccctctcccagttgtcccgattgtaactcaaagggtggaatatcaaggtcgtttttttcattccatgtgcccagttaatcttgctttctttgtttggctgggatagaggggtcaagttattaatttcttcacacctaccctcctttttttccctatcactgaagctttttagtgcattagtggggaggagggtggggagacataaccactgcttccatttaatggggtgcacctgtccaataggcgtagctatccggacagagcacgtttgcagaagggggtctcttcttccaggtagctgaaaggggaagacctgacgtactctggttaggttaggacttgccctcgtggtggaaacttttcttaaaaagttataaccaacttttctattaaaagtgggaattaggagagaaggtaggggttgggaatcagagagaatggctttggtctcttgcttgtgggactagcctggcttgggactaaatgccctgctctgaacacgaagcttagtataaactgatggatatccctaccttgaaagaagaaaaggttcttactgcttggtccttgatttatcacacaaagcagaatagtatttttatatttaaatgtaaagacaaaaaactatatgtatggttttgtggattatgtgtgttttgctaaaggaaaaaaccatccaggtcacggggcaccaaatttgagacaaatagtcggattagaaataaagcatctcattttgagtagagagcaagggaagtggttcttagatggtgatctgggattaggccctcaagacccttttgggtttctgccctgcccaccctctggagaaggtgggcactggattagttaacagacgacacgttactagcagtcacttgatctccgtggctttggtttaaaagacacacttgtccacataggtttagagataagagttggctggtcaacttgagcatgttactgacagagggggtattggggttattttctggtaggaatagcatgtcactaaagcaggccttttgatattaaattttttaaaaagcaaaattatagaagtttagattttaatcaaatttgtagggtttctaggtaatttttacagaattgcttgtttgcttcaactgtctcctacctctgctcttggaggagatggggacagggctggagtcaaaacacttgtaattttgtatcttgatgtctttgttaagactgctgaagaattattttttttcttttataataaggaataaaccccacctttattccttcatttcatctaccattttctggttcttgtgttggctgtggcaggccagctgtggttttcttttgccatgacaacttctaattgccatgtacagtatgttcaaagtcaaataactcctcattgtaaacaaactgtgtaactgcccaaagcagcacttataaatcagcctaacataagaaaaaaaaaa

SEQ ID NO: 379401 - DNA, 2658 bp, Homo sapiens
cgcgagagcaggttaggagaggagaggaggccgcagtactgctcacacgctccgctcttctcccactctcggcctacctttacccgcccgcctgctcggcgaccagaacaccttccaccatgaccacctcagcaagttcccacttaaataaaggcatcaagcaggtgtacatgtccctgcctcagggtgagaaagtccaggccatgtatatctggatcgatggtactggagaaggactgcgctgcaagacccggaccctggacagtgagcccaagtgtgtggaagagttgcctgagtggaatttcgatggctccagtactttacagtctgagggttccaacagtgacatgtatctcgtgcctgctgccatgtttcgggaccccttccgtaaggaccctaacaagctggtgttatgtgaagttttcaagtacaatcgaaggcctgcagagaccaatttgaggcacacctgtaaacggataatggacatggtggtccatattactgtggtgtgggagcagacagagcctatggcagggacatcgtggaggcccattaccgggcctgcttgtatgctggagtcaagattgcggggactaatgccgaggtcatgcctgcccagtgggaatttcagattggaccttgtgaaggaatcagcatgggagatcatctctgggtggcccgtttcatcttgcatcgtgtgtgtgaagactttggagtgatagcaacctttgatcctaagcccattcctgggaactggaatggtgcaggctgccataccaacttcagcaccaaggccatgcgggaggagaatggtctgaagtacatcgaggaggccattgagaaactaagcaagcggcaccagtaccacatccgtgcctatgatcccaagggaggcctggacaatgcccgacgtctaactggattccatgaaacctccaacatcaacgacttttctgctggtgtagccaatcgtagcgccagcatacgcattccccggactgttggccaggagaagaagggttactttgaagatcgtcgcccctctgccaactgcgaccccttttcggtgacagaagccctcatccgcacgtgtcttctcaatgaaaccggcgatgagcccttccagtacaaaaattaagtggactagacctccagctgttgagcccctcctagttcttcatcccactccaactcttccccctctcccagttgtcccgattgtaactcaaagggtggaatatcaaggtcgtttttttcattccatgtgcccagttaatcttgctttctttgtttggctgggatagaggggtcaagttattaatttcttcacacctaccctcctttttttccctatcactgaagctttttagtgcattagtggggaggagggtggggagacataaccactgcttccatttaatggggtgcacctgtccaataggcgtagctatccggacagagcacgtttgcagaagggggtctcttcttccaggtagctgaaaggggaagacctgacgtactctggttaggttaggacttgccctcgtggtggaaacttttcttaaaaagttataaccaacttttctattaaaagtgggaattaggagagaaggtaggggttgggaatcagagagaatggctttggtctcttgcttgtgggactagcctggcttgggactaaatgccctgctctgaacacgaagcttagtataaactgatggatatccctaccttgaaagaagaaaaggttcttactgcttggtccttgatttatcacacaaagcagaatagtatttttatatttaaatgtaaagacaaaaaactatatgtatggttttgtggattatgtgtgttttgctaaaggaaaaaaccatccaggtcacggggcaccaaatttgagacaaatagtcggattagaaataaagcatctcattttgagtagagagcaagggaagtggttcttagatggtgatctgggattaggccctcaagacccttttgggtttctgccctgcccaccctctggagaaggtgggcactggattagttaacagacgacacgttactagcagtcacttgatctccgtggctttggtttaaaagacacacttgtccacataggtttagagataagagttggctggtcaacttgagcatgttactgacagagggggtattggggttattttctggtaggaatagcatgtcactaaagcaggccttttgatattaaattttttaaaaagcaaaattatagaagtttagattttaatcaaatttgtagggtttctaggtaatttttacagaattgcttgtttgcttcaactgtctcctacctctgctcttggaggagatggggacagggctggagtcaaaacacttgtaattttgtatcttgatgtctttgttaagactgctgaagaattattttttttcttttataataaggaataaaccccacctttattccttcatttcatctaccattttctggttcttgtgttggctgtggcaggccagctgtggttttcttttgccatgacaacttctaattgccatgtacagtatgttcaaagtcaaataactcctcattgtaaacaaactgtgtaactgcccaaagcagcacttataaatcagcctaacataagaaaaaaaaaa

SEQ ID NO: 379402 - DNA, 2964 bp, Homo sapiens
cgcgagagcaggttaggagaggagaggaggccgcagtactgctcacacgctccgctcttctcccactctcggcctacctttacccgcccgcctgctcggcgaccagaacaccttccaccatgaccacctcagcaagttcccacttaaataaaggcatcaagcaggtgtacatgtccctgcctcagggtgagaaagtccaggccatgtatatctggatcgatggtactggagaaggactgcgctgcaagacccggaccctggacagtgagcccaagtgtgtggaagagttgcctgagtggaatttcgatggctccagtactttacagtctgagggttccaacagtgacatgtatctcgtgcctgctgccatgtttcgggaccccttccgtaaggaccctaacaagctggtgttatgtgaagttttcaagtacaatcgaaggcctgcagagaccaatttgaggcacacctgtaaacggataatggacatggtgagcaaccagcacccctggtttggcatggagcaggagtataccctcatggggacagatgggcacccctttggttggccttccaacggcttcccagggccccagggtccatattactgtggtgtgggagcagacagagcctatggcagggacatcgtggaggcccattaccgggcctgcttgtatgctggagtcaagattgcggggactaatgccgaggtcatgcctgcccaggtaagtatagctccaatccatcaatgaagaagggtaggtaggtgtacataggacttttgctagtaagggctgctgatacaccactcactaacccaaaacctaagaacgggttggagtacaggtgagaagagaacaggtttaggagattctgagttggagtgagcagttagctttgttttaatggccaagcttctcgtttctagtgggaatttcagattggaccttgtgaaggaatcagcatgggagatcatctctgggtggcccgtttcatcttgcatcgtgtgtgtgaagactttggagtgatagcaacctttgatcctaagcccattcctgggaactggaatggtgcaggctgccataccaacttcagcaccaaggccatgcgggaggagaatggtctgaagtacatcgaggaggccattgagaaactaagcaagcggcaccagtaccacatccgtgcctatgatcccaagggaggcctggacaatgcccgacgtctaactggattccatgaaacctccaacatcaacgacttttctgctggtgtagccaatcgtagcgccagcatacgcattccccggactgttggccaggagaagaagggttactttgaagatcgtcgcccctctgccaactgcgaccccttttcggtgacagaagccctcatccgcacgtgtcttctcaatgaaaccggcgatgagcccttccagtacaaaaattaagtggactagacctccagctgttgagcccctcctagttcttcatcccactccaactcttccccctctcccagttgtcccgattgtaactcaaagggtggaatatcaaggtcgtttttttcattccatgtgcccagttaatcttgctttctttgtttggctgggatagaggggtcaagttattaatttcttcacacctaccctcctttttttccctatcactgaagctttttagtgcattagtggggaggagggtggggagacataaccactgcttccatttaatggggtgcacctgtccaataggcgtagctatccggacagagcacgtttgcagaagggggtctcttcttccaggtagctgaaaggggaagacctgacgtactctggttaggttaggacttgccctcgtggtggaaacttttcttaaaaagttataaccaacttttctattaaaagtgggaattaggagagaaggtaggggttgggaatcagagagaatggctttggtctcttgcttgtgggactagcctggcttgggactaaatgccctgctctgaacacgaagcttagtataaactgatggatatccctaccttgaaagaagaaaaggttcttactgcttggtccttgatttatcacacaaagcagaatagtatttttatatttaaatgtaaagacaaaaaactatatgtatggttttgtggattatgtgtgttttgctaaaggaaaaaaccatccaggtcacggggcaccaaatttgagacaaatagtcggattagaaataaagcatctcattttgagtagagagcaagggaagtggttcttagatggtgatctgggattaggccctcaagacccttttgggtttctgccctgcccaccctctggagaaggtgggcactggattagttaacagacgacacgttactagcagtcacttgatctccgtggctttggtttaaaagacacacttgtccacataggtttagagataagagttggctggtcaacttgagcatgttactgacagagggggtattggggttattttctggtaggaatagcatgtcactaaagcaggccttttgatattaaattttttaaaaagcaaaattatagaagtttagattttaatcaaatttgtagggtttctaggtaatttttacagaattgcttgtttgcttcaactgtctcctacctctgctcttggaggagatggggacagggctggagtcaaaacacttgtaattttgtatcttgatgtctttgttaagactgctgaagaattattttttttcttttataataaggaataaaccccacctttattccttcatttcatctaccattttctggttcttgtgttggctgtggcaggccagctgtggttttcttttgccatgacaacttctaattgccatgtacagtatgttcaaagtcaaataactcctcattgtaaacaaactgtgtaactgcccaaagcagcacttataaatcagcctaacataagaaaaaaaaaa

SEQ ID NO: 379403 - DNA, 2707 bp, Homo sapiens
cgcgagagcaggttaggagaggagaggaggccgcagtactgctcacacgctccgctcttctcccactctcggcctacctttacccgcccgcctgctcggcgaccagaacaccttccaccatgaccacctcagcaagttcccacttaaataaaggcatcaagcaggtgtacatgtccctgcctcagggtgagaaagtccaggccatgtatatctggatcgatggtactggagaaggactgcgctgcaagacccggaccctggacagtgagcccaagtgtgtggaagagttgcctgagtggaatttcgatggctccagtactttacagtctgagggttccaacagtgacatgtatctcgtgcctgctgccatgtttcgggaccccttccgtaaggaccctaacaagctggtgttatgtgaagttttcaagtacaatcgaaggcctgcagagaccaatttgaggcacacctgtaaacggataatggacatggtgagcaaccagcacccctggtttggcatggagcaggagtataccctcatggggacagatgggcacccctttggttggccttccaacggcttcccagggccccagggtccatattactgtggtgtgggagcagacagagcctatggcagggacatcgtggaggcccattaccgggcctgcttgtatgctggagtcaagattgcggggactaatgccgaggtcatgcctgcccagtgggaatttcagattggaccttgtgaaggaatcagcatgggagatcatctctgggtggcccgtttcatcttgcatcgtgtgtgtgaagactttggagtgatagcaacctttgatcctaagcccattcctgggaactggaatggtgcaggctgccataccaacttcagcaccaaggccatgcgggaggagaatggtctgaagtacatcgaggaggccattgagaaactaagcaagcggcaccagtaccacatccgtgcctatgatcccaagggaggcctggacaatgcccgacgtctaactggattccatgaaacctccaacatcaacgacttttctgctggtgtagccaatcgtagcgccagcatacgcattccccggactgttggccaggagaagaagggttactttgaagatcgtcgcccctctgccaactgcgaccccttttcggtgacagaagccctcatccgcacgtgtcttctcaatgaaaccggcgatgagcccttccagtacaaaaattaagtggactagacctccagctgttgagcccctcctagttcttcatcccactccaactcttccccctctcccagttgtcccgattgtaactcaaagggtggaatatcaaggtcgtttttttcattccatgtgcccagttaatcttgctttctttgtttggctgggatagaggggtcaagttattaatttcttcacacctaccctcctttttttccctatcactgaagctttttagtgcattagtggggaggagggtggggagacataaccactgcttccatttaatggggtgcacctgtccaataggcgtagctatccggacagagcacgtttgcagaagggggtctcttcttccaggtagctgaaaggggaagacctgacgtactctggttaggttaggacttgccctcgtggtggaaacttttcttaaaaagttataaccaacttttctattggtctcttgcttgtgggactagcctggcttgggactaaatgccctgctctgaacacgaagcttagtataaactgatggatatccctaccttgaaagaagaaaaggttcttactgcttggtccttgatttatcacacaaagcagaatagtatttttatatttaaatgtaaagacaaaaaactatatgtatggttttgtggattatgtgtgttttgctaaaggaaaaaaccatccaggtcacggggcaccaaatttgagacaaatagtcggattagaaataaagcatctcattttgagtagagagcaagggaagtggttcttagatggtgatctgggattaggccctcaagacccttttgggtttctgccctgcccaccctctggagaaggtgggcactggattagttaacagacgacacgttactagcagtcacttgatctccgtggctttggtttaaaagacacacttgtccacataggtttagagataagagttggctggtcaacttgagcatgttactgacagagggggtattggggttattttctggtaggaatagcatgtcactaaagcaggccttttgatattaaattttttaaaaagcaaaattatagaagtttagattttaatcaaatttgtagggtttctaggtaatttttacagaattgcttgtttgcttcaactgtctcctacctctgctcttggaggagatggggacagggctggagtcaaaacacttgtaattttgtatcttgatgtctttgttaagactgctgaagaattattttttttcttttataataaggaataaaccccacctttattccttcatttcatctaccattttctggttcttgtgttggctgtggcaggccagctgtggttttcttttgccatgacaacttctaattgccatgtacagtatgttcaaagtcaaataactcctcattgtaaacaaactgtgtaactgcccaaagcagcacttataaatcagcctaacataagaaaaaaaaaa

SEQ ID NO: 379404 - DNA, 2707 bp, Homo sapiens
cgcgagagcaggttaggagaggagaggaggccgcagtactgctcacacgctccgctcttctcccactctcggcctacctttacccgcccgcctgctcggcgaccagaacaccttccaccatgaccacctcagcaagttcccacttaaataaaggcatcaagcaggtgtacatgtccctgcctcagggtgagaaagtccaggccatgtatatctggatcgatggtactggagaaggactgcgctgcaagacccggaccctggacagtgagcccaagtgtgtggaagagttgcctgagtggaatttcgatggctccagtactttacagtctgagggttccaacagtgacatgtatctcgtgcctgctgccatgtttcgggaccccttccgtaaggaccctaacaagctggtgttatgtgaagttttcaagtacaatcgaaggcctgcagagaccaatttgaggcacacctgtaaacggataatggacatggtgagcaaccagcacccctggtttggcatggagcaggagtataccctcatggggacagatgggcacccctttggttggccttccaacggcttcccagggccccagggtccatattactgtggtgtgggagcagacagagcctatggcagggacatcgtggaggcccattaccgggcctgcttgtatgctggagtcaagattgcggggactaatgccgaggtcatgcctgcccagtgggaatttcagattggaccttgtgaaggaatcagcatgggagatcatctctgggtggcccgtttcatcttgcatcgtgtgtgtgaagactttggagtgatagcaacctttgatcctaagcccattcctgggaactggaatggtgcaggctgccataccaacttcagcaccaaggccatgcgggaggagaatggtctgaagtacatcgaggaggccattgagaaactaagcaagcggcaccagtaccacatccgtgcctatgatcccaagggaggcctggacaatgcccgacgtctaactggattccatgaaacctccaacatcaacgacttttctgctggtgtagccaatcgtagcgccagcatacgcattccccggactgttggccaggagaagaagggttactttgaagatcgtcgcccctctgccaactgcgaccccttttcggtgacagaagccctcatccgcacgtgtcttctcaatgaaaccggcgatgagcccttccagtacaaaaattaagtggactagacctccagctgttgagcccctcctagttcttcatcccactccaactcttccccctctcccagttgtcccgattgtaactcaaagggtggaatatcaaggtcgtttttttcattccatgtgcccagttaatcttgctttctttgtttggctgggatagaggggtcaagttattaatttcttcacacctaccctcctttttttccctatcactgaagctttttagtgcattagtggggaggagggtggggagacataaccactgcttccatttaatggggtgcacctgtccaataggcgtagctatccggacagagcacgtttgcagaagggggtctcttcttccaggtagctgaaaggggaagacctgacgtactctggttaggttaggacttgccctcgtggtggaaacttttcttaaaaagttataaccaacttttctattaaaagtgggaattaggagagaaggtaggggttgggaatcagagagaatggctttggtctcttgcttgtgggactagcctggcttgggactaaatgccctgctctgaacacgaagcttagtataaactgatggatatccctaccttgaaagaagaaaaggttcttactgcttggtccttgatttatcacacaaagcagaatagtatttttatatttaaatgtaaagacaaaaaactatatgtatggttttgtggattatgtgtgttttgctaaaggaataaagcatctcattttgagtagagagcaagggaagtggttcttagatggtgatctgggattaggccctcaagacccttttgggtttctgccctgcccaccctctggagaaggtgggcactggattagttaacagacgacacgttactagcagtcacttgatctccgtggctttggtttaaaagacacacttgtccacataggtttagagataagagttggctggtcaacttgagcatgttactgacagagggggtattggggttattttctggtaggaatagcatgtcactaaagcaggccttttgatattaaattttttaaaaagcaaaattatagaagtttagattttaatcaaatttgtagggtttctaggtaatttttacagaattgcttgtttgcttcaactgtctcctacctctgctcttggaggagatggggacagggctggagtcaaaacacttgtaattttgtatcttgatgtctttgttaagactgctgaagaattattttttttcttttataataaggaataaaccccacctttattccttcatttcatctaccattttctggttcttgtgttggctgtggcaggccagctgtggttttcttttgccatgacaacttctaattgccatgtacagtatgttcaaagtcaaataactcctcattgtaaacaaactgtgtaactgcccaaagcagcacttataaatcagcctaacataagaaaaaaaaaa

SEQ ID NO: 379405 - DNA, 3942 bp, Homo sapiens
cgcgagagcaggttaggagaggagaggaggccgcagtactgctcacacgctccgctcttctcccactctcggcctacctttacccgcccgcctgctcggcgaccagaacaccttccaccatgaccacctcagcaagttcccacttaaataaaggcatcaagcaggtgtacatgtccctgcctcagggtgagaaagtccaggccatgtatatctggatcgatggtactggagaaggactgcgctgcaagacccggaccctggacagtgagcccaagtgtgtggaagagttgcctgagtggaatttcgatggctccagtactttacagtctgagggttccaacagtgacatgtatctcgtgcctgctgccatgtttcgggaccccttccgtaaggaccctaacaagctggtgttatgtgaagttttcaagtacaatcgaaggcctgcagagaccaatttgaggcacacctgtaaacggataatggacatggtgagcaaccagcacccctggtttggcatggagcaggagtataccctcatggggacagatgggcacccctttggttggccttccaacggcttcccagggccccagggtccatattactgtggtgtgggagcagacagagcctatggcagggacatcgtggaggcccattaccgggcctgcttgtatgctggagtcaagattgcggggactaatgccgaggtcatgcctgcccagtgggaatttcagattggaccttgtgaaggaatcagcatgggagatcatctctgggtggcccgtttcatcttgcatcgtgtgtgtgaagactttggagtgatagcaacctttgatcctaagcccattcctgggaactggaatggtgcaggctgccataccaacttcagcaccaaggccatgcgggaggagaatggtctgaagtacatcgaggaggccattgagaaactaagcaagcggcaccagtaccacatccgtgcctatgatcccaagggaggcctggacaatgcccgacgtctaactggattccatgaaacctccaacatcaacgacttttctgctggtgtagccaatcgtagcgccagcatacgcattccccggactgttggccaggagaagaagggttactttgaagatcgtcgcccctctgccaactgcgaccccttttcggtgacagaagccctcatccgcacgtgtcttctcaatgaaaccggcgatgagcccttccagtacaaaaattaagtggactagacctccagctgttgagcccctcctagttcttcatcccactccaactcttccccctctcccagttgtcccgattgtaactcaaagggtggaatatcaaggtcgtttttttcattccatgtgcccagttaatcttgctttctttgtttggctgggatagaggggtcaagttattaatttcttcacacctaccctcctttttttccctatcactgaagctttttagtgcattagtggggaggagggtggggagacataaccactgcttccatttaatggggtgcacctgtccaataggcgtagctatccggacagagcacgtttgcagaagggggtctcttcttccaggtagctgaaaggggaagacctgacgtactctggttaggttaggacttgccctcgtggtggaaacttttcttaaaaagttataaccaacttttctattaaaagtgggaattaggagagaaggtaggggttgggaatcagagagaatggctttggtctcttgcttgtgggactagcctggcttgggactaaatgccctgctctgaacacgaagcttagtataaactgatggatatccctaccttgaaagaagaaaaggttcttactgcttggtccttgatttatcacacaaagcagaatagtatttttatatttaaatgtaaagacaaaaaactatatgtatggttttgtggattatgtgtgttttgctaaaggaaaaaaccatccaggtcacggggcaccaaatttgagacaaatagtcggattagaaataaagcatctcattttgagtagagagcaagggaagtggttcttagatggtgatctgggattaggccctcaagacccttttgggtttctgccctgcccaccctctggagaaggtgggcactggattagttaacagacgacacgttactagcagtcacttgatctccgtggctttggtttaaaagacacacttgtccacataggtttagagataagagttggctggtcaacttgagcatgttactgacagagggggtattggggttattttctggtaggaatagcatgtcactaaagcaggccttttgatattaaattttttaaaaagcaaaattatagaagtttagattttaatcaaatttgtagggtttctaggtaatttttacagaattgcttgtttgcttcaactgtctcctacctctgctcttggaggagatggggacagggctggagtcaaaacacttgtaattttgtatcttgatgtctttgttaagactgctgaagaattattttttttcttttataataaggaataaaccccacctttattccttcatttcatctaccattttctggttcttgtgttggctgtggcaggccagctgtggttttcttttgccatgacaacttctaattgccatgtacagtatgttcaaagtcaaataactcctcattgtaaacaaactgtgtaactgcccaaagcagcacttataaatcagcctaacataagaaaaaaaaaatgtgtttgtgattctttcaaatccctatgtgccattatatttctttatttcctaaaacaggcaaaataagctcaagtttatgtactctgagtttttaaaacactggagtgatgttgctgaccagccgtttcctgtacctctctaagttgggtatttgggacttaagggattaagtttttcacctagacttagttacacacaatcttggcatttcctagcctagaggtttgtagcagggtacaagccccactcctcccccttcctttgctcccctgagtttggttttggcttaccataacattgttttgaccattcctagcctaatacaatagcctaacataatgtaagattaactggctttacgatttctattctctgctctcagtgattcatttaagtaacaaatattagctaccctgctaccctggttgaagccttccaaggctggctatgccctaggcatgggctcatccttgggtgtatcttgccttgcaggaagaccagtggaccgattgtgattctcaaaagctctgtgttgtcacctgtgcccttgccccttgctcttatcttggtccgtgtatctggggagttcttccaccttatcttggccaattcctaccttcgttcattcctcatgaggttgggtaaaagctccctccggctcccatgatgctgtgcatatacctagcaaaaagcaattattggacacattggagtgcaatattattaatagcattaatactactaataatgtgggcaatagtgattgtttttaaaaggcagtatactcttaccagtgcgaggtagctggggcctgtgatagtttttagagataagttcttcaggcaactgtgtattttacactagtcaagtaatcctagatatccgtggtttttcttaagaaagttggctcgtaatatgatttaatattcaaagtagagtcatctacctattagcttgctggcgtggtcctagtttatgcctgtttcagcatgattgttgagtaccctgtttcatccttagcattttcttgattttgttgttaaatgatgtatacccttatttccattgaatctgtgcttccacccccccaactgaagttgtcttccctttgcttggccacccttacagcctcttggatggtgtatcctacagtgtaagcactaaactgaagaggcagt

SEQ ID NO: 379406 - DNA, 3119 bp, Homo sapiens
cgcgagagcaggttaggagaggagaggaggccgcagtactgctcacacgctccgctcttctcccactctcggcctacctttacccgcccgcctgctcggcgaccagaacaccttccaccatgaccacctcagcaagttcccacttaaataaaggcatcaagcaggtgtacatgtccctgcctcagggtgagaaagtccaggccatgtatatctggatcgatggtactggagaaggactgcgctgcaagacccggaccctggacagtgagcccaagtgtgtggaagagttgcctgagtggaatttcgatggctccagtactttacagtctgagggttccaacagtgacatgtatctcgtgcctgctgccatgtttcgggaccccttccgtaaggaccctaacaagctggtgttatgtgaagttttcaagtacaatcgaaggcctgcagagaccaatttgaggcacacctgtaaacggataatggacatggtgagcaaccagcacccctggtttggcatggagcaggagtataccctcatggggacagatgggcacccctttggttggccttccaacggcttcccagggccccagggtccatattactgtggtgtgggagcagacagagcctatggcagggacatcgtggaggcccattaccgggcctgcttgtatgctggagtcaagattgcggggactaatgccgaggtcatgcctgcccagtgggaatttcagattggaccttgtgaaggaatcagcatgggagatcatctctgggtggcccgtttcatcttgcatcgtgtgtgtgaagactttggagtgatagcaacctttgatcctaagcccattcctgggaactggaatggtgcaggctgccataccaacttcagcaccaaggccatgcgggaggagaatggtctgaagtacatcgaggaggccattgagaaactaagcaagcggcaccagtaccacatccgtgcctatgatcccaagggaggcctggacaatgcccgacgtctaactggattccatgaaacctccaacatcaacgacttttctgctggtgtagccaatcgtagcgccagcatacgcattccccggactgttggccaggagaagaagggttactttgaagatcgtcgcccctctgccaactgcgaccccttttcggtgacagaagccctcatccgcacgtgtcttctcaatgaaaccggcgatgagcccttccagtacaaaaattaagtggactagacctccagctgttgagcccctcctagttcttcatcccactccaactcttccccctctcccagttgtcccgattgtaactcaaagggtggaatatcaaggtcgtttttttcattccatgtgcccagttaatcttgctttctttgtttggctgggatagaggggtcaagttattaatttcttcacacctaccctcctttttttccctatcactgaagctttttagtgcattagtggggaggagggtggggagacataaccactgcttccatttaatggggtgcacctgtccaataggcgtagctatccggacagagcacgtttgcagaagggggtctcttcttccaggtagctgaaaggggaagacctgacgtactctggttaggttaggacttgccctcgtggtggaaacttttcttaaaaagttataaccaacttttctattaaaagtgggaattaggagagaaggtaggggttgggaatcagagagaatggctttggtctcttgcttgtgggactagcctggcttgggactaaatgccctgctctgaacacgaagcttagtataaactgatggatatccctaccttgaaagaagaaaaggttcttactgcttggtccttgatttatcacacaaagcagaatagtatttttatatttaaatgtaaagacaaaaaactatatgtatggttttgtggattatgtgtgttttgctaaaggaaaaaaccatccaggtcacggggcaccaaatttgagacaaatagtcggattagaaataaagcatctcattttgagtagagagcaagggaagtggttcttagatggtgatctgggattaggccctcaagacccttttgggtttctgccctgcccaccctctggagaaggtgggcactggattagttaacagacgacacgttactagcagtcacttgatctccgtggctttggtttaaaagacacacttgtccacataggtttagagataagagttggctggtcaacttgagcatgttactgacagagggggtattggggttattttctggtaggaatagcatgtcactaaagcaggccttttgatattaaattttttaaaaagcaaaattatagaagtttagattttaatcaaatttgtagggtttctaggtaatttttacagaattgcttgtttgcttcaactgtctcctacctctgctcttggaggagatggggacagggctggagtcaaaacacttgtaattttgtatcttgatgtctttgttaagactgctgaagaattattttttttcttttataataaggaataaaccccacctttattccttcatttcatctaccattttctggttcttgtgttggctgtggcaggccagctgtggttttcttttgccatgacaacttctaattgccatgtacagtatgttcaaagtcaaataactcctcattgtaaacaaactgtgtaactgcccaaagcagcacttataaatcagcctaacataagaaaaaaaaaaaaaaaaaaaaaaaaaaaaaaaaaaaaaaaaaaaaaaaaaaaaaaaaaaaaaaaaaaaaaaaaaaaaaaaaaaaaaaaaaaaaaaaaaaaaaaaaaaaaaaaaaaaaaaaaaaataaaaaaaaaaatttagaaaataaaaacaaaaatattaaaaatataagtaaagtgggtgtatatcgcctatatgggttaaagtttaaattaaaacagcgttattagctaagagaataaaccgtaaatacacaggcttatgataaacataaaatggcttagaacaaattcacttttagacagtttgttcactttgcaaggagcacggaaatggtgacgcgtaaatattatgtaaaattcctagata

SEQ ID NO: 379407 - DNA, 2734 bp, Homo sapiens
  misc_feature (2707)..(2707): n is a, c, g, or t
cgcgagagcaggttaggagaggagaggaggccgcagtactgctcacacgctccgctcttctcccactctcggcctacctttacccgcccgcctgctcggcgaccagaacaccttccaccatgaccacctcagcaagttcccacttaaataaaggcatcaagcaggtgtacatgtccctgcctcagggtgagaaagtccaggccatgtatatctggatcgatggtactggagaaggactgcgctgcaagacccggaccctggacagtgagcccaagtgtgtggaagagttgcctgagtggaatttcgatggctccagtactttacagtctgagggttccaacagtgacatgtatctcgtgcctgctgccatgtttcgggaccccttccgtaaggaccctaacaagctggtgttatgtgaagttttcaagtacaatcgaaggcctgcagagaccaatttgaggcacacctgtaaacggataatggacatggtgagcaaccagcacccctggtttggcatggagcaggagtataccctcatggggacagatgggcacccctttggttggccttccaacggcttcccagggccccagggtccatattactgtggtgtgggagcagacagagcctatggcagggacatcgtggaggcccattaccgggcctgcttgtatgctggagtcaagattgcggggactaatgccgaggtcatgcctgcccagtgggaatttcagattggaccttgtgaaggaatcagcatgggagatcatctctgggtggcccgtttcatcttgcatcgtgtgtgtgaagactttggagtgatagcaacctttgatcctaagcccattcctgggaactggaatggtgcaggctgccataccaacttcagcaccaaggccatgcgggaggagaatggtctgaagtacatcgaggaggccattgagaaactaagcaagcggcaccagtaccacatccgtgcctatgatcccaagggaggcctggacaatgcccgacgtctaactggattccatgaaacctccaacatcaacgacttttctgctggtgtagccaatcgtagcgccagcatacgcattccccggactgttggccaggagaagaagggttactttgaagatcgtcgcccctctgccaactgcgaccccttttcggtgacagaagccctcatccgcacgtgtcttctcaatgaaaccggcgatgagcccttccagtacaaaaattaagtggactagacctccagctgttgagcccctcctagttcttcatcccactccaactcttccccctctcccagttgtcccgattgtaactcaaagggtggaatatcaaggtcgtttttttcattccatgtgcccagttaatcttgctttctttgtttggctgggatagaggggtcaagttattaatttcttcacacctaccctcctttttttccctatcactgaagctttttagtgcattagtggggaggagggtggggagacataaccactgcttccatttaatggggtgcacctgtccaataggcgtagctatccggacagagcacgtttgcagaagggggtctcttcttccaggtagctgaaaggggaagacctgacgtactctggttaggttaggacttgccctcgtggtggaaacttttcttaaaaagttataaccaacttttctattaaaagtgggaattaggagagaaggtaggggttgggaatcagagagaatggctttggtctcttgcttgtgggactagcctggcttgggactaaatgccctgctctgaacacgaagcttagtataaactgatggatatccctaccttgaaagaagaaaaggttcttactgcttggtccttgatttatcacacaaagcagaatagtatttttatatttaaatgtaaagacaaaaaactatatgtatggttttgtggattatgtgtgttttgctaaaggaaaaaaccatccaggtcacggggcaccaaatttgagacaaatagtcggattagaaataaagcatctcattttgagtagagagcaagggaagtggttcttagatggtgatctgggattaggccctcaagacccttttgggtttctgccctgcccaccctctggagaaggtgggcactggattagttaacagacgacacgttactagcagtcacttgatctccgtggctttggtttaaaagacacacttgtccacataggtttagagataagagttggctggtcaacttgagcatgttactgacagagggggtattggggttattttctggtaggaatagcatgtcactaaagcaggccttttgatattaaattttttaaaaagcaaaattatagaagtttagattttaatcaaatttgtagggtttctaggtaatttttacagaattgcttgtttgcttcaactgtctcctacctctgctcttggaggagatggggacagggctggagtcaaaacacttgtaattttgtatcttgatgtctttgttaagactgctgaagaattattttttttcttttataataaggaataaaccccacctttattccttcatttcatctaccattttctggttcttgtgttggctgtggcagggacagacttggacacaaaaccgatccatagaagggcttcccaaaccttgttttgcaacatcccaaattgtctccagttgaaggaaggncttatcagattatagtgagcttcattg

SEQ ID NO: 379408 - DNA, 2576 bp, Homo sapiens
cgcgagagcaggttaggagaggagaggaggccgcagtactgctcacacgctccgctcttctcccactctcggcctacctttacccgcccgcctgctcggcgaccagaacaccttccaccatgaccacctcagcaagttcccacttaaataaaggcatcaagcaggtgtacatgtccctgcctcagggtgagaaagtccaggccatgtatatctggatcgatggtactggagaaggactgcgctgcaagacccggaccctggacagtgagcccaagtgtgtggaagagttgcctgagtggaatttcgatggctccagtactttacagtctgagggttccaacagtgacatgtatctcgtgcctgctgccatgtttcgggaccccttccgtaaggaccctaacaagctggtgttatgtgaagttttcaagtacaatcgaaggcctgcagagaccaatttgaggcacacctgtaaacggataatggacatggtgagcaaccagcacccctggtttggcatggagcaggagtataccctcatggggacagatgggcacccctttggttggccttccaacggcttcccagggccccagggtccatattactgtggtgtgggagcagacagagcctatggcagggacatcgtggaggcccattaccgggcctgcttgtatgctggagtcaagattgcggggactaatgccgaggtcatgcctgcccagtgggaatttcagattggaccttgtgaaggaatcagcatgggagatcatctctgggtggcccgtttcatcttgcatcgtgtgtgtgaagactttggagtgatagcaacctttgatcctaagcccattcctgggaactggaatggtgcaggctgccataccaacttcagcaccaaggccatgcgggaggagaatggtctgaagtacatcgaggaggccattgagaaactaagcaagcggcaccagtaccacatccgtgcctatgatcccaagggaggcctggacaatgcccgacgtctaactggattccatgaaacctccaacatcaacgacttttctgctggtgtagccaatcgtagcgccagcatacgcattccccggactgttggccaggagaagaagggttactttgaagatcgtcgcccctctgccaactgcgaccccttttcggtgacagaagccctcatccgcacgtgtcttctcaatgaaaccggcgatgagcccttccagtacaaaaattaagtggactagacctccagctgttgagcccctcctagttcttcatcccactccaactcttccccctctcccagttgtcccgattgtaactcaaagggtggaatatcaaggtcgtttttttcattccatgtgcccagttaatcttgctttctttgtttggctgggatagaggggtcaagttattaatttcttcacacctaccctcctttttttccctatcactgaagctttttagtgcattagtggggaggagggtggggagacataaccactgcttccatttaatggggtgcacctgtccaataggcgtagctatccggacagagcacgtttgcagaagggggtctcttcttccaggtagctgaaaggggaagacctgacgtactctggttaggttaggacttgccctcgtggtggaaacttttcttaaaaagttataaccaacttttctattaaaagtgggaattaggagagaaggtaggggttgggaatcagagagaatggctttggtctcttgcttgtgggactagcctggcttgggactaaatgccctgctctgaacacgaagcttagtataaactgatggatatccctaccttgaaagaagaaaaggttcttactgcttggtccttgatttatcacacaaagcagaatagtatttttatatttaaatgtaaagacaaaaaactatatgtatggttttgtggattatgtgtgttttgctaaaggaaaaaaccatccaggtcacggggcaccaaatttgagacaaatagtcggattagaaataaagcatctcattttgagtagagagcaagggaagtggttcttagatggtgatctgggattaggccctcaagacccttttgggtttctgccctgcccaccctctggagaaggtgggcactggattagttaacagacgacacgttactagcagtcacttgatctccgtggctttggtttaaaagacacacttgtccacataggtttagagataagagttggctggtcaacttgagcatgttactgacagagggggtattggggttattttctggtaggaatagcatgtcactaaagcaggccttttgatattaaattttttaaaaagcaaaattatagaagtttagattttaatcaaatttgtagggtttctaggtaatttttacagaattgcttgtttgcttcaactgtctcctacctctgctcttggaggagatggggacagggctggagtcaaaacacttgtaattttgtatcttgatgtctttgttaagactgctgaagaattattttttttcttttataataaggaataaaccccacctttattccttc

SEQ ID NO: 379409 - DNA, 2004 bp, Homo sapiens
cgcgagagcaggttaggagaggagaggaggccgcagtactgctcacacgctccgctcttctcccactctcggcctacctttacccgcccgcctgctcggcgaagcggggatcctcccccagccgcaagtccacgaagaaagcaacgaatgaaaattatgaagacaacgagaagtcagactcctccgggtcgcgctccagctgcttcggcttcgtcgcctactctgtgaactccggggagagatctcgagtcaagattaagaccttaacccaccaacctgcctgttcggacaccccccgggccggccgctgtctgtccccttctccatcgccctctcccagaaagctccggtgcttggaccagctagagtctgagaaagaggagaggcgcgaacgccactccaaaaagagaagggttaaagagggcaaccctaacgatacgcttgactttctgtggctgggaacaccttccagtacaaaaattaagtggactagacctccagctgttgagcccctcctagttcttcatcccactccaactcttccccctctcccagttgtcccgattgtaactcaaagggtggaatatcaaggtcgtttttttcattccatgtgcccagttaatcttgctttctttgtttggctgggatagaggggtcaagttattaatttcttcacacctaccctcctttttttccctatcactgaagctttttagtgcattagtggggaggagggtggggagacataaccactgcttccatttaatggggtgcacctgtccaataggcgtagctatccggacagagcacgtttgcagaagggggtctcttcttccaggtagctgaaaggggaagacctgacgtactctggttaggttaggacttgccctcgtggtggaaacttttcttaaaaagttataaccaacttttctattaaaagtgggaattaggagagaaggtaggggttgggaatcagagagaatggctttggtctcttgcttgtgggactagcctggcttgggactaaatgccctgctctgaacacgaagcttagtataaactgatggatatccctaccttgaaagaagaaaaggttcttactgcttggtccttgatttatcacacaaagcagaatagtatttttatatttaaatgtaaagacaaaaaactatatgtatggttttgtggattatgtgtgttttgctaaaggaaaaaaccatccaggtcacggggcaccaaatttgagacaaatagtcggattagaaataaagcatctcattttgagtagagagcaagggaagtggttcttagatggtgatctgggattaggccctcaagacccttttgggtttctgccctgcccaccctctggagaaggtgggcactggattagttaacagacgacacgttactagcagtcacttgatctccgtggctttggtttaaaagacacacttgtccacataggtttagagataagagttggctggtcaacttgagcatgttactgacagagggggtattggggttattttctggtaggaatagcatgtcactaaagcaggccttttgatattaaattttttaaaaagcaaaattatagaagtttagattttaatcaaatttgtagggtttctaggtaatttttacagaattgcttgtttgcttcaactgtctcctacctctgctcttggaggagatggggacagggctggagtcaaaacacttgtaattttgtatcttgatgtctttgttaagactgctgaagaattattttttttcttttataataaggaataaaccccacctttattccttcatttcatctaccattttctggttcttgtgttggctgtggcaggccagctgtggttttcttttgccatgacaacttctaattgccatgtacagtatgttcaaagtcaaataactcctcattgtaaacaaactgtgtaactgcccaaagcagcacttataaatcagcctaacataagaaaaaaaaaa

SEQ ID NO: 379410 - DNA, 2008 bp, Homo sapiens
cgcgagagcaggttaggagaggagaggaggccgcagtactgctcacacgctccgctcttctcccactctcggcctacctttacccgcccgcctgctcggcgaccagaacaccttccaccatgaccacctcagcaagttcccacttaaataaaggcatcaagcaggtgtacatgtccctgcctcagggtgagaaagtccaggccatgtatatctggatcgatggtactggagaaggactgcgctgcaagacccggaccctggacagtgagcccaagtgtgtggaagagttgcctgagtggaatttcgatggctccagtactttacagtctgagggttccaacagtgacatgtatctcgtgcctgctgccatgtttcgggaccccttccgtaaggaccctaacaagctggtgttatgtgaagttttcaagtacaatcgaaggcctgcagagaccaatttgaggcacacctgtaaacggataatggacatggtgagcaaccagcacccctggtttggcatggagcaggagtataccctcatggggacagatgggcacccctttggttggccttccaacggcttcccagggccccagggtccatattactgtggtgtgggagcagacagagcctatggcagggacatcgtggaggcccattaccgggcctgcttgtatgctggagtcaagattgcggggactaatgccgaggtcatgcctgcccagtgggaatttcagattggaccttgtgaaggaatcagcatgggagatcatctctgggtggcccgtttcatcttgcatcgtgtgtgtgaagactttggagtgatagcaacctttgatcctaagcccattcctgggaactggaatggtgcaggctgccataccaacttcagcaccaaggccatgcgggaggagaatggtctgaagtacatcgaggaggccattgagaaactaagcaagcggcaccagtaccacatccgtgcctatgatcccaagggaggcctggacaatgcccgacgtctaactggattccatgaaacctccaacatcaacgacttttctgctggtgtagccaatcgtagcgccagcatacgcattccccggactgttggccaggagaagaagggttactttgaagatcgtcgcccctctgccaactgcgaccccttttcggtgacagaagccctcatccgcacgtgtcttctcaatgaaaccggcgatgagcccttccagtacaaaaattaagtggactagacctccagctgttgagcccctcctagttcttcatcccactccaactcttccccctctcccagttgtcccgattgtaactcaaagggtggaatatcaaggtcgtttttttcattccatgtgcccagttaatcttgctttctttgtttggctgggatagaggggtcaagttattaatttcttcacacctaccctcctttttttccctatcactgaagctttttagtgcattagtggggaggagggtggggagacataaccactgcttccatttaatggggtgcacctgtccaataggcgtagctatccggacagagcacgtttgcagaagggggtctcttcttccaggtagctgaaaggggaagacctgacgtactctggttaggttaggacttgccctcgtggtggaaacttttcttaaaaagttataaccaacttttctattaaaagtgggaattaggagagaaggtaggggttgggaatcagagagaatggctttggtctcttgcttgtgggactagcctggcttgggactaaatgccctgctctgaacacgaagcttagtataaactgatggatatccctaccttgaaagaagaaaaggttcttactgcttggtccttgatttatcacacaaagcagaatagtatttttatatttaaatgtaaagacaaaaaactatatgtatggttttgtggattatgtgtgttttgctaaaggaaaaaaccatccagggttaaggccaccggagggatcctcag

SEQ ID NO: 379411 - DNA, 1708 bp, Homo sapiens
cgcgagagcaggttaggagaggagaggaggccgcagtactgctcacacgctccgctcttctcccactctcggcctacctttacccgcccgcctgctcggcgaccagaacaccttccaccatgaccacctcagcaagttcccacttaaataaaggcatcaagcaggtgtacatgtccctgcctcagggtgagaaagtccaggccatgtatatctggatcgatggtactggagaaggactgcgctgcaagacccggaccctggacagtgagcccaagtgtgtggaagagttgcctgagtggaatttcgatggctccagtactttacagtctgagggttccaacagtgacatgtatctcgtgcctgctgccatgtttcgggaccccttccgtaaggaccctaacaagctggtgttatgtgaagttttcaagtacaatcgaaggcctgcagagaccaatttgaggcacacctgtaaacggataatggacatggtgagcaaccagcacccctggtttggcatggagcaggagtataccctcatggggacagatgggcacccctttggttggccttccaacggcttcccagggccccagggtccatattactgtggtgtgggagcagacagagcctatggcagggacatcgtggaggcccattaccgggcctgcttgtatgctggagtcaagattgcggggactaatgccgaggtcatgcctgcccagtgggaatttcagattggaccttgtgaaggaatcagcatgggagatcatctctgggtggcccgtttcatcttgcatcgtgtgtgtgaagactttggagtgatagcaacctttgatcctaagcccattcctgggaactggaatggtgcaggctgccataccaacttcagcaccaaggccatgcgggaggagaatggtctgaagtacatcgaggaggccattgagaaactaagcaagcggcaccagtaccacatccgtgcctatgatcccaagggaggcctggacaatgcccgacgtctaactggattccatgaaacctccaacatcaacgacttttctgctggtgtagccaatcgtagcgccagcatacgcattccccggactgttggccaggagaagaagggttactttgaagatcgtcgcccctctgccaactgcgaccccttttcggtgacagaagccctcatccgcacgtgtcttctcaatgaaaccggcgatgagcctccaactcttccccctctcccagttgtcccgattgtaactcaaagggtggaatatcaaggtcgtttttttcattccatgtgcccagttaatcttgctttctttgtttggctgggatagaggggtcaagttattaatttcttcacacctaccctcctttttttccctatcactgaagctttttagtgcattagtggggaggagggtggggagacataaccactgcttccatttaatggggtgcacctgtccaataggcgtagctatccggacagagcacgtttgcagaagggggtctcttcttccaggtagctgaaaggggaagacctgacgtactctggttagtccgtccttggcctctccgtggacccttcctcacacggtataccccttctctcttcaatgtggcctctagctcaacggccgccctctccttcctctcctctgcttcctccctcatccctctcctcttctctcctcacttctcc

SEQ ID NO: 379412 - DNA, 1583 bp, Homo sapiens
  misc_feature (1431)..(1431): n is a, c, g, or t
  misc_feature (1535)..(1535): n is a, c, g, or t
cgcgagagcaggttaggagaggagaggaggccgcagtactgctcacacgctccgctcttctcccactctcggcctacctttacccgcccgcctgctcggcgaccagaacaccttccaccatgaccacctcagcaagttcccacttaaataaaggcatcaagcaggtgtacatgtccctgcctcagggtgagaaagtccaggccatgtatatctggatcgatggtactggagaaggactgcgctgcaagacccggaccctggacagtgagcccaagtgtgtggaagagttgcctgagtggaatttcgatggctccagtactttacagtctgagggttccaacagtgacatgtatctcgtgcctgctgccatgtttcgggaccccttccgtaaggaccctaacaagctggtgttatgtgaagttttcaagtacaatcgaaggcctgcagagaccaatttgaggcacacctgtaaacggataatggacatggtgagcaaccagcacccctggtttggcatggagcaggagtataccctcatggggacagatgggcacccctttggttggccttccaacggcttcccagggccccagggtccatattactgtggtgtgggagcagacagagcctatggcagggacatcgtggaggcccattaccgggcctgcttgtatgctggagtcaagattgcggggactaatgccgaggtcatgcctgcccagtgggaatttcagattggaccttgtgaaggaatcagcatgggagatcatctctgggtggcccgtttcatcttgcatcgtgtgtgtgaagactttggagtgatagcaacctttgatcctaagcccattcctgggaactggaatggtgcaggctgccataccaacttcagcaccaaggccatgcgggaggagaatggtctgaagtacatcgaggaggccattgagaaactaagcaagcggcaccagtaccacatccgtgcctatgatcccaagggaggcctggacaatgcccgacgtctaactggattccatgaaacctccaacatcaacgacttttctgctggtgtagccaatcgtagcgccagcatacgcattccccggactgttggccaggagaagaagggttactttgaagatcgtcgcccctctgccaactgcgaccccttttcggtgacagaagccctcatccgcacgtgtcttctcaatgaaaccggcgatgagcctccaactcttccccctctcccagttgtcccgattgtaactcaaagggtggaatatcaaggtcgtttttttcattccatgtgcccagttaatcttgctttctttgtttggctgggatagaggggtcaagttattaatttcttcacacctaccctcctttttttccctatcactgaagctttttagtgcattagtggggaggtctgcccanccccacctaaccccctcttccctctacctgcaattcccccacctctccgcgctgctttcctgccgccccccagtcccccccccccgctctcgcgctgggggatnttcccgcaggtcccacgccctcccctcgcccagcctctcatttctcta

SEQ ID NO: 379413 - DNA, 5004 bp, Homo sapiens
  misc_feature (107)..(107): n is a, c, g, or t
gtttagtgttaacctcagctacactgaaggaatagaccttagtcctcacaagtataagttctagcttggaagcctgggttctgcagtagctgtggaacttaagcctntgagctcagggatgcagaggcattgagttactaccaagggcctgatcttttctttagcaggcatctgtgttaattgtttcaaaaggtggtgatcagttttacagcctattataaaggagatttttgcctactataaaactaatccccctgaaagagtgagtaaacataactttttgtgtgttgacttccacaagggaaggagttggcacttacactctgacttttgattcagtcgtccttcttgagccatttttgcaggggatcagtttggagtgggcgttaacaatgttattctttttttcttctccagaacaccttccaccatgaccacctcagcaagttcccacttaaataaaggcatcaagcaggtgtacatgtccctgcctcagggtgagaaagtccaggccatgtatatctggatcgatggtactggagaaggactgcgctgcaagacccggaccctggacagtgagcccaagtgtgtggaagagttgcctgagtggaatttcgatggctccagtactttacagtctgagggttccaacagtgacatgtatctcgtgcctgctgccatgtttcgggaccccttccgtaaggaccctaacaagctggtgttatgtgaagttttcaagtacaatcgaaggcctgcaggtgtgttatagcacagctatggatacccctcctcaatctgtgaatgctgtgaaggggagggagaagacattctgaaatcagcattgggaagactaggcaatttcagcactattttaagaatctgagtgattcttttccctgaacttctgctttgaggaagagataatatggcccatctttctatggtcttctctgttggttgcataaaatagcattggatttgtccagatctgtttgccggtcttggagtccccagtaacagccttcctgcctggaatgtaggccaggacaaatgtaaaccaatggacaaatgtttctcaaaaattatagaatggctccaagtgcctgagaaatgaagaataaatctgacaaccagaagcagctgtcttgtgaatagagggttaagtgcctggcatttggtgcttgggaggtggccagaatgcagataaggtgaaagttgccctgttctaaatccactcccatgtgacttggttgtaactgagtttagttaaaactgaagtctttcagagtcttcctacagatgtacaattaacagcttctctcatttttctgactcggtgatcccaagaaggcctatactgggtcagttcataccatagtgcacacctcagttgtatagaatccaaggactattctcccatcagcatcggtattcagcatctatgtctttagatccctgatggcgtattattgactcttttttctagagaccaatttgaggcacacctgtaaacggataatggacatggtgagcaaccagcacccctggtttggcatggagcaggagtataccctcatggggacagatgggcacccctttggttggccttccaacggcttcccagggccccagggtaagtctccttgggttagaggtgaaattcccagaagtgtctaactgtgcaggaatgccccttcccagggatgggaatgactttcagaatcaagaagcaaaataatacagtaaaggcgaaacagccctcacatcaccaaagtccaaaaatggatatgaatatataaagtaaggttttagggggaacgtttggccccactgaagctgtggtgaagaggaactcccctattgcccctcccctgccccgcacctgcagatgaaggcaaggatagtgattcaagagggcaaggcttaagggccttctgatctctgactttgggattctctggatttcttgactcttagtgttttgtcctgatgcttctgtaggtccatattactgtggtgtgggagcagacagagcctatggcagggacatcgtggaggcccattaccgggcctgcttgtatgctggagtcaagattgcggggactaatgccgaggtcatgcctgcccaggtaagtatagctccaatccatcaatgaagaagggtaggtaggtgtacataggacttttgctagtaagggctgctgatacaccactcactaacccaaaacctaagaacgggttggagtacaggtgagaagagaacaggtttaggagattctgagttggagtgagcagttagctttgttttaatggccaagcttctcgtt[450 bp omitted]ataatttatataatatatattagtcatatatcattatataaatatatatcgatatatatatttgtgacatatgtcatggtgacagggaaaagttgacaaattcatgcatttgaaaatcttttagaactaaattagtaacaatacaggcatgtggataagcttaatgcttatgagggggagaaagtttcaaatgattagtcttttcaacaaacagtaactttgtactgcttgtcgggcactgttctcaccactgagacacacaggtaagaagatgcagccactgccctcatgaagtatttgttctactggtatcatattttggtgcacttcattcttggctccatacctggagacaaggttggactgccatcttttctgtttactctaggtacatcgaggaggccattgagaaactaagcaagcggcaccagtaccacatccgtgcctatgatcccaagggaggcctggacaatgcccgacgtctaactggattccatgaaacctccaacatcaacgacttttctgctggtgtagccaatcgtagcgccagcatacgcattccccggactgttggccaggagaagaagggttactttgaagatcgtcgcccctctgccaactgcgaccccttttcggtgacagaagccctcatccgcacgtgtcttctcaatgaaaccggcgatgagcccttccagtacaaaaattaagtggactagacctccagctgttgagcccctcctagttcttcatcccactccaactcttccccctctcccagttgtcccgattgtaactcaaagggtggaatatcaaggtcgtttttttcattccatgtgcccagttaatcttgctttctttgtttggctgggatagaggggtcaagttattaatttcttcacacctaccctcctttttttccctatcactgaagctttttagtgcattagtggggaggagggtggggagacataaccactgcttccatttaatggggtgcacctgtccaataggcgtagctatccggacagagcacgtttgcagaagggggtctcttcttccaggtagctgaaaggggaagacctgacgtactctggttaggttaggacttgccctcgtggtggaaacttttcttaaaaagttataaccaacttttctattaaaagtgggaattaggagagaaggtaggggttgggaatcagagagaatggctttggtctcttgcttgtgggactagcctggcttgggactaaatgccctgctctgaacacgaagcttagtataaactgatggatatccctaccttgaaagaagaaaaggttcttactgcttggtccttgatttatcacacaaagcagaatagtatttttatatttaaatgtaaagacaaaaaactatatgtatggttttgtggattatgtgtgttttgctaaaggaaaaaaccatccaggtcacggggcaccaaatttgagacaaatagtcggattagaaataaagcatctcattttgagtagagagcaagggaagtggttcttagatggtgatctgggattaggccctcaagacccttttgggtttctgccctgcccaccctctggagaaggtgggcactggattagttaacagacgacacgttactagcagtcacttgatctccgtggctttggtttaaaagacacacttgtccacataggtttagagataagagttggctggtcaacttgagcatgttactgacagagggggtattggggttattttctggtaggaatagcatgtcactaaagcaggccttttgatattaaattttttaaaaagcaaaattatagaagtttagattttaatcaaatttgtagggtttctaggtaatttttacagaattgcttgtttgcttcaactgtctcctacctctgctcttggaggagatggggacagggctggagtcaaaacacttgtaattttgtatcttgatgtctttgttaagactgctgaagaattattttttttcttttataataaggaataaaccccacctttattccttcatttcatctaccattttctggttcttgtgttggctgtggcaggccagctgtggttttcttttgccatgacaacttctaattgccatgtacagtatgttcaaagtcaaataactcctcattgtaaacaaactgtgtaactgcccaaagcagcacttataaatcagcctaacataagaaaaaaaaaa

SEQ ID NO: 379414 - DNA, 3340 bp, Homo sapiens
cgcgagagcaggttaggagaggagaggaggccgcagtactgctcacacgctccgctcttctcccactctcggcctacctttacccgcccgcctgctcggcgaccagaacaccttccaccatgaccacctcagcaagttcccacttaaataaaggcatcaagcaggtgtacatgtccctgcctcagggtgagaaagtccaggccatgtatatctggatcgatggtactggagaaggactgcgctgcaagacccggaccctggacagtgagcccaagtgtgtggaagagttgcctgagtggaatttcgatggctccagtactttacagtctgagggttccaacagtgacatgtatctcgtgcctgctgccatgtttcgggaccccttccgtaaggaccctaacaagctggtgttatgtgaagttttcaagtacaatcgaaggcctgcagagaccaatttgaggcacacctgtaaacggataatggacatggtgagcaaccagcacccctggtttggcatggagcaggagtataccctcatggggacagatgggcacccctttggttggccttccaacggcttcccagggccccagggtccatattactgtggtgtgggagcagacagagcctatggcagggacatcgtggaggcccattaccgggcctgcttgtatgctggagtcaagattgcggggactaatgccgaggtcatgcctg[450 bp omitted]ataatttatataatatatattagtcatatatcattatataaatatatatcgatatatatatttgtgacatatgtcatggtgacagggaaaagttgacaaattcatgcatttgcttatgagggggagaaagtttcaaatgattagtcttttcaacaaacagtaactttgtactgcttgtcgggcactgttctcaccactgagacacacaggtaagaagatgcagccactgccctcatgaagtatttgttctactggtatcatattttggtgcacttcattcttggctccatacctggagacaaggttggactgccatcttttctgtttactctaggtacatcgaggaggccattgagaaactaagcaagcggcaccagtaccacatccgtgcctatgatcccaagggaggcctggacaatgcccgacgtctaactggattccatgaaacctccaacatcaacgacttttctgctggtgtagccaatcgtagcgccagcatacgcattccccggactgttggccaggagaagaagggttactttgaagatcgtcgcccctctgccaactgcgaccccttttcggtgacagaagccctcatccgcacgtgtcttctcaatgaaaccggcgatgagcccttccagtacaaaaattaagtggactagacctccagctgttgagcccctcctagttcttcatcccactccaactcttccccctctcccagttgtcccgattgtaactcaaagggtggaatatcaaggtcgtttttttcattccatgtgcccagttaatcttgctttctttgtttggctgggatagaggggtcaagttattaatttcttcacacctaccctcctttttttccctatcactgaagctttttagtgcattagtggggaggagggtggggagacataaccactgcttccatttaatggggtgcacctgtccaataggcgtagctatccggacagagcacgtttgcagaagggggtctcttcttccaggtagctgaaaggggaagacctgacgtactctggttaggttaggacttgccctcgtggtggaaacttttcttaaaaagttataaccaacttttctattaaaagtgggaattaggagagaaggtaggggttgggaatcagagagaatggctttggtctcttgcttgtgggactagcctggcttgggactaaatgccctgctctgaacacgaagcttagtataaactgatggatatccctaccttgaaagaagaaaaggttcttactgcttggtccttgatttatcacacaaagcagaatagtatttttatatttaaatgtaaagacaaaaaactatatgtatggttttgtggattatgtgtgttttgctaaaggaaaaaaccatccaggtcacggggcaccaaatttgagacaaatagtcggattagaaataaagcatctcattttgagtagagagcaagggaagtggttcttagatggtgatctgggattaggccctcaagacccttttgggtttctgccctgcccaccctctggagaaggtgggcactggattagttaacagacgacacgttactagcagtcacttgatctccgtggctttggtttaaaagacacacttgtccacataggtttagagataagagttggctggtcaacttgagcatgttactgacagagggggtattggggttattttctggtaggaatagcatgtcactaaagcaggccttttgatattaaattttttaaaaagcaaaattatagaagtttagattttaatcaaatttgtagggtttctaggtaatttttacagaattgcttgtttgcttcaactgtctcctacctctgctcttggaggagatggggacagggctggagtcaaaacacttgtaattttgtatcttgatgtctttgttaagactgctgaagaattattttttttcttttataataaggaataaaccccacctttattccttcatttcatctaccattttctggttcttgtgttggctgtggcaggccagctgtggttttcttttgccatgacaacttctaattgccatgtacagtatgttcaaagtcaaataactcctcattgtaaacaaactgtgtaactgcccaaagcagcacttataaatcagcctaacataagaaaaaaaaaa

SEQ ID NO: 379415 - DNA, 2707 bp, Homo sapiens
cgcgagagcaggttaggagaggagaggaggccgcagtactgctcacacgctccgctcttctcccactctcggcctacctttacccgcccgcctgctcggcgaccagaacaccttccaccatgaccacctcagcaagttcccacttaaataaaggcatcaagcaggtgtacatgtccctgcctcagggtgagaaagtccaggccatgtatatctggatcgatggtactggagaaggactgcgctgcaagacccggaccctggacagtgagcccaagtgtgtggaagagttgcctgagtggaatttcgatggctccagtactttacagtctgagggttccaacagtgacatgtatctcgtgcctgctgccatgtttcgggaccccttccgtaaggaccctaacaagctggtgttatgtgaagttttcaagtacaatcgaaggcctgcagagaccaatttgaggcacacctgtaaacggataatggacatggtgagcaaccagcacccctggtttggcatggagcaggagtataccctcatggggacagatgggcacccctttggttggccttccaacggcttcccagggccccagggtccatattactgtggtgtgggagcagacagagcctatggcagggacatcgtggaggcccattaccgggcctgcttgtatgctggagtcaagattgcggggactaatgccgaggtcatgcctgcccagtgggaatttcagattggaccttgtgaaggaatcagcatgggagatcatctctgggtggcccgtttcatcttgcatcgtgtgtgtgaagactttggagtgatagcaacctttgatcctaagcccattcctgggaactggaatggtgcaggctgccataccaacttcagcaccaaggccatgcgggaggagaatggtctgaagtacatcgaggaggccattgagaaactaagcaagcggcaccagtaccacatccgtgcctatgatcccaagggaggcctggacaatgcccgacgtctaactggattccatgaaacctccaacatcaacgacttttctgctggtgtagccaatcgtagcgccagcatacgcattccccggactgttggccaggagaagaagggttactttgaagatcgtcgcccctctgccaactgcgaccccttttcggtgacagaagccctcatccgcacgtgtcttctcaatgaaaccggcgatgagcccttccagtacaaaaattaagtggactagacctccagctgttgagcccctcctagttcttcatcccactccaactcttccccctctcccagttgtcccgattgtaactcaaagggtggaatatcaaggtcgtttttttcattccatgtgcccagttaatcttgctttctttgtttggctgggatagaggggtcaagttattaatttcttcacacctaccctcctttttttccctatcactgaagctttttagtgcattagtggggaggagggtggggagacataaccactgcttccatttaatggggtgcacctgtccaataggcgtagctatccggacagagcacgtttgcagaagggggtctcttcttccaggtagctgaaaggggaagacctgacgtactctggttaggttaggacttgccctcgtggtggaaacttttcttaaaaagttataaccaacttttctattaaaagtgggaattaggagagaaggtaggggttgggaatcagagagaatggctttggtctcttgcttgtgggactagcctggcttgggactaaatgccctgctctgaacacgaagcttagtataaactgatggatatccctaccttgaaagaagaaaaggttcttactgcttggtccttgatttatcacacaaagcagaatagtatttttatatttaaatgtaaagacaaaaaactatatgtatggttttgtggattatgtgtgttttgctaaaggaaaaaaccatccaggtcacggggcaccaaatttgagacaaatagtcggattagaaataaagcatctcattttgagtagagagcaagggaagtggttcttagatggtgatctgggattaggccctcaagacccttttgggtttctgccctgcccaccctctggagaaggtgggcactggattagttaacagacgacacgttactagcagtcacttgatctccgtggctttggtttagcatgttactgacagagggggtattggggttattttctggtaggaatagcatgtcactaaagcaggccttttgatattaaattttttaaaaagcaaaattatagaagtttagattttaatcaaatttgtagggtttctaggtaatttttacagaattgcttgtttgcttcaactgtctcctacctctgctcttggaggagatggggacagggctggagtcaaaacacttgtaattttgtatcttgatgtctttgttaagactgctgaagaattattttttttcttttataataaggaataaaccccacctttattccttcatttcatctaccattttctggttcttgtgttggctgtggcaggccagctgtggttttcttttgccatgacaacttctaattgccatgtacagtatgttcaaagtcaaataactcctcattgtaaacaaactgtgtaactgcccaaagcagcacttataaatcagcctaacataagaaaaaaaaaa

SEQ ID NO: 379416 - DNA, 2694 bp, Homo sapiens
cgcgagagcaggttaggagaggagaggaggccgcagtactgctcacacgctccgctcttctcccactctcggcctacctttacccgcccgcctgctcggcgaccagaacaccttccaccatgaccacctcagcaagttcccacttaaataaaggcatcaagcaggtgtacatgtccctgcctcagggtgagaaagtccaggccatgtatatctggatcgatggtactggagaaggactgcgctgcaagacccggaccctggacagtgagcccaagtgtgtggaagagttgcctgagtggaatttcgatggctccagtactttacagtctgagggttccaacagtgacatgtatctcgtgcctgctgccatgtttcgggaccccttccgtaaggaccctaacaagctggtgttatgtgaagttttcaagtacaatcgaaggcctgcagagaccaatttgaggcacacctgtaaacggataatggacatggtgagcaaccagcacccctggtttggcatggagcaggagtataccctcatggggacagatgggcacccctttggttggccttccaacggcttcccagggccccagggtccatattactgtggtgtgggagcagacagagcctatggcagggacatcgtggaggcccattaccgggcctgcttgtatgctggagtcaagattgcggggactaatgccgaggtcatgcctgcccagtgggaatttcagattggaccttgtgaaggaatcagcatgggagatcatctctgggtggcccgtttcatcttgcatcgtgtgtgtgaagactttggagtgatagcaacctttgatcctaagcccattcctgggaactggaatggtgcaggctgccataccaacttcagcaccaaggccatgcgggaggagaatggtctgaagtacatcgaggaggccattgagaaactaagcaagcggcaccagtaccacatccgtgcctatgatcccaagggaggcctggacaatgcccgacgtctaactggattccatgaaacctccaacatcaacgacttttctgctggtgtagccaatcgtagcgccagcatacgcattccccggactgttggccaggagaagaagggttactttgaagatcgtcgcccctctgccaactgcgaccccttttcggtgacagaagccctcatccgcacgtgtcttctcaatgaaaccggcgatgagcctccaactcttccccctctcccagttgtcccgattgtaactcaaagggtggaatatcaaggtcgtttttttcattccatgtgcccagttaatcttgctttctttgtttggctgggatagaggggtcaagttattaatttcttcacacctaccctcctttttttccctatcactgaagctttttagtgcattagtggggaggagggtggggagacataaccactgcttccatttaatggggtgcacctgtccaataggcgtagctatccggacagagcacgtttgcagaagggggtctcttcttccaggtagctgaaaggggaagacctgacgtactctggttaggttaggacttgccctcgtggtggaaacttttcttaaaaagttataaccaacttttctattaaaagtgggaattaggagagaaggtaggggttgggaatcagagagaatggctttggtctcttgcttgtgggactagcctggcttgggactaaatgccctgctctgaacacgaagcttagtataaactgatggatatccctaccttgaaagaagaaaaggttcttactgcttggtccttgatttatcacacaaagcagaatagtatttttatatttaaatgtaaagacaaaaaactatatgtatggttttgtggattatgtgtgttttgctaaaggaaaaaaccatccaggtcacggggcaccaaatttgagacaaatagtcggattagaaataaagcatctcattttgagtagagagcaagggaagtggttcttagatggtgatctgggattaggccctcaagacccttttgggtttctgccctgcccaccctctggagaaggtgggcactggattagttaacagacgacacgttactagcagtcacttgatctccgtggctttggtttaaaagacacacttgtccacataggtttagagataagagttggctggtcaacttgagcatgttactgacagagggggtattggggttattttctggtaggaatagcatgtcactaaagcaggccttttgatattaaattttttaaaaagcaaaattatagaagtttagattttaatcaaatttgtagggtttctaggtaatttttacagaattgcttgtttgcttcaactgtctcctacctctgctcttggaggagatggggacagggctggagtcaaaacacttgtaattttgtatcttgatgtctttgttaagactgctgaagaattattttttttcttttataataaggaataaaccccacctttattccttcatttcatctaccattttctggttcttgtgttggctgtggcaggccagctgtggttttcttttgccatgacaacttctaattgccatgtacagtatgttcaaagtcaaataactcctcattgtaaacaaactgtgtaactgcccaaagcagcacttataaatcagcctaacataagaaaaaaaaaa

SEQ ID NO: 379417 - DNA, 2758 bp, Homo sapiens
  misc_feature (2708)..(2708): n is a, c, g, or t
cgcgagagcaggttaggagaggagaggaggccgcagtactgctcacacgctccgctcttctcccactctcggcctacctttacccgcccgcctgctcggcgaccagaacaccttccaccatgaccacctcagcaagttcccacttaaataaaggcatcaagcaggtgtacatgtccctgcctcagggtgagaaagtccaggccatgtatatctggatcgatggtactggagaaggactgcgctgcaagacccggaccctggacagtgagcccaagtgtgtggaagagttgcctgagtggaatttcgatggctccagtactttacagtctgagggttccaacagtgacatgtatctcgtgcctgctgccatgtttcgggaccccttccgtaaggaccctaacaagctggtgttatgtgaagttttcaagtacaatcgaaggcctgcagagaccaatttgaggcacacctgtaaacggataatggacatggtgagcaaccagcacccctggtttggcatggagcaggagtataccctcatggggacagatgggcacccctttggttggccttccaacggcttcccagggccccagggtccatattactgtggtgtgggagcagacagagcctatggcagggacatcgtggaggcccattaccgggcctgcttgtatgctggagtcaagattgcggggactaatgccgaggtcatgcctgcccagtgggaatttcagattggaccttgtgaaggaatcagcatgggagatcatctctgggtggcccgtttcatcttgcatcgtgtgtgtgaagactttggagtgatagcaacctttgatcctaagcccattcctgggaactggaatggtgcaggctgccataccaacttcagcaccaaggccatgcgggaggagaatggtctgaagtacatcgaggaggccattgagaaactaagcaagcggcaccagtaccacatccgtgcctatgatcccaagggaggcctggacaatgcccgacgtctaactggattccatgaaacctccaacatcaacgacttttctgctggtgtagccaatcgtagcgccagcatacgcattccccggactgttggccaggagaagaagggttactttgaagatcgtcgcccctctgccaactgcgaccccttttcggtgacagaagccctcatccgcacgtgtcttctcaatgaaaccggcgatgagcccttccagtacaaaaattaagtggactagacctccagctgttgagcccctcctagttcttcatcccactccaactcttccccctctcccagttgtcccgattgtaactcaaagggtggaatatcaaggtcgtttttttcattccatgtgcccagttaatcttgctttctttgtttggctgggatagaggggtcaagttattaatttcttcacacctaccctcctttttttccctatcactgaagctttttagtgcattagtggggaggagggtggggagacataaccactgcttccatttaatggggtgcacctgtccaataggcgtagctatccggacagagcacgtttgcagaagggggtctcttcttccaggtagctgaaaggggaagacctgacgtactctggttaggttaggacttgccctcgtggtggaaacttttcttaaaaagttataaccaacttttctattaaaagtgggaattaggagagaaggtaggggttgggaatcagagagaatggctttggtctcttgcttgtgggactagcctggcttgggactaaatgccctgctctgaacacgaagcttagtataaactgatggatatccctaccttgaaagaagaaaaggttcttactgcttggtccttgatttatcacacaaagcagaatagtatttttatatttaaatgtaaagacaaaaaactatatgtatggttttgtggattatgtgtgttttgctaaaggaaaaaaccatccaggtcacggggcaccaaatttgagacaaatagtcggattagaaataaagcatctcattttgagtagagagcaagggaagtggttcttagatggtgatctgggattaggccctcaagacccttttgggtttctgccctgcccaccctctggagaaggtgggcactggattagttaacagacgacacgttactagcagtcacttgatctccgtggctttggtttaaaagacacacttgtccacataggtttagagataagagttggctggtcaacttgagcatgttactgacagagggggtattggggttattttctggtaggaatagcatgtcactaaagcaggccttttgatattaaattttttaaaaagcaaaattatagaagtttagattttaatcaaatttgtagggtttctaggtaatttttacagaattgcttgtttgcttcaactgtctcctacctctgctcttggaggagatggggacagggctggagtcaaaacacttgtaattttgtatcttgatgtctttgttaagactgctgaagaattattttttttcttttataataaggaataaaccccacctttattccttcatttcatctaccattttctggttcttgtgttggctgtggcaggccagctgtggttttcttttgccatgacaacttctaattgccatgtacagtatgttcaaagtcaataactctcatgtaacaacttggtantggcaagaggattataatagttaataaaaaaaaagggggggcaaaaaacg

SEQ ID NO: 379418 - DNA, 2707 bp, Homo sapiens
cgcgagagcaggttaggagaggagaggaggccgcagtactgctcacacgctccgctcttctcccactctcggcctacctttacccgcccgcctgctcggcgaccagaacaccttccaccatgaccacctcagcaagttcccacttaaataaaggcatcaagcaggtgtacatgtccctgcctcagggtgagaaagtccaggccatgtatatctggatcgatggtactggagaaggactgcgctgcaagacccggaccctggacagtgagcccaagtgtgtggaagagttgcctgagtggaatttcgatggctccagtactttacagtctgagggttccaacagtgacatgtatctcgtgcctgctgccatgtttcgggaccccttccgtaaggaccctaacaagctggtgttatgtgaagttttcaagtacaatcgaaggcctgcagagaccaatttgaggcacacctgtaaacggataatggacatggtgagcaaccagcacccctggtttggcatggagcaggagtataccctcatggggacagatgggcacccctttggttggccttccaacggcttcccagggccccagggtccatattactgtggtgtgggagcagacagagcctatggcagggacatcgtggaggcccattaccgggcctgcttgtatgctggagtcaagattgcggggactaatgccgaggtcatgcctgcccagtgggaatttcagattggaccttgtgaaggaatcagcatgggagatcatctctgggtggcccgtttcatcttgcatcgtgtgtgtgaagactttggagtgatagcaacctttgatcctaagcccattcctgggaactggaatggtgcaggctgccataccaacttcagcaccaaggccatgcgggaggagaatggtctgaagtacatcgaggaggccattgagaaactaagcaagcggcaccagtaccacatccgtgcctatgatcccaagggaggcctggacaatgcccgacgtctaactggattccatgaaacctccaacatcaacgacttttctgctggtgtagccaatcgtagcgccagcatacgcattccccggactgttggccaggagaagaagggttactttgaagatcgtcgcccctctgccaactgcgaccccttttcggtgacagaagccctcatccgcacgtgtcttctcaatgaaaccggcgatgagcccttccagtacaaaaattaagtggactagacctccagctgttgagcccctcctagttcttcatcccactccaactcttccccctctcccagttgtcccgattgtaactcaaagggtggaatatcaaggtcgtttttttcattccatgtgcccagttaatcttgctttctttgtttggctgggatagaggggtcaagttattaatttcttcacacctaccctcctttttttccctatcactgaagctttttagtgcattagtggggaggagggtggggagacataaccactgcttccatttaatggggtgcacctgtccaataggcgtagctatccggacagagcacgtttgcagaagggggtctcttcttccaggtagctgaaaggggaagacctgacgtactctggttaggttaggacttgccctcgtggtggaaacttttcttaaaaagttataaccaacttttctattaaaagtgggaattaggagagaaggtaggggttgggaatcagagagaatggctttggtctcttgcttgtgggactagcctggcttgggactaaatgccctgctctgaacacgaagcttagtataaactgatggatatccctaccttgaaagaagaaaaggttcttactgcttggtccttgatttatcacacaaagcagaatagtatttttatatttaaatgtaaagacaaaaaactatatgtatggttttgtggattatgtgtgttttgctaaaggaaaaaaccatccaggtcacggggcaccaaatttgagacaaatagtcggattagaaataaagcatctcattttgagtagagagcaagggaagtggttcttagatggtgatctgggattaggccctcaagacccttttgggtttctgccctgcccaccctctggagaaggtgggcactggattagttaacagacgacacgttactagcagtcacttgatctccgtggctttggtttaaaagacacacttgtccacataggtttagagataagagttggctggtcaacttgagcatgttactgacagagggggtattggggttattttctggtaggaatagcatgtcactaaagcaggccttttgatattaaattttttaaaaagctacagaattgcttgtttgcttcaactgtctcctacctctgctcttggaggagatggggacagggctggagtcaaaacacttgtaattttgtatcttgatgtctttgttaagactgctgaagaattattttttttcttttataataaggaataaaccccacctttattccttcatttcatctaccattttctggttcttgtgttggctgtggcaggccagctgtggttttcttttgccatgacaacttctaattgccatgtacagtatgttcaaagtcaaataactcctcattgtaaacaaactgtgtaactgcccaaagcagcacttataaatcagcctaacataagaaaaaaaaaa

SEQ ID NO: 379419 - DNA, 2066 bp, Homo sapiens
cgcgagagcaggttaggagaggagaggaggccgcagtactgctcacacgctccgctcttctcccactctcggcctacctttacccgcccgcctgctcggcgaccagaacaccttccaccatgaccacctcagcaagttcccacttaaataaaggcatcaagcaggtgtacatgtccctgcctcagggtgagaaagtccaggccatgtatatctggatcgatggtactggagaaggactgcgctgcaagacccggaccctggacagtgagcccaagtgtgtggaagagttgcctgagtggaatttcgatggctccagtactttacagtctgagggttccaacagtgacatgtatctcgtgcctgctgccatgtttcgggaccccttccgtaaggaccctaacaagctggtgttatgtgaagttttcaagtacaatcgaaggcctgcagagaccaatttgaggcacacctgtaaacggataatggacatggtgagcaaccagcacccctggtttggcatggagcaggagtataccctcatggggacagatgggcacccctttggttggccttccaacggcttcccagggccccagctccaactcttccccctctcccagttgtcccgattgtaactcaaagggtggaatatcaaggtcgtttttttcattccatgtgcccagttaatcttgctttctttgtttggctgggatagaggggtcaagttattaatttcttcacacctaccctcctttttttccctatcactgaagctttttagtgcattagtggggaggagggtggggagacataaccactgcttccatttaatggggtgcacctgtccaataggcgtagctatccggacagagcacgtttgcagaagggggtctcttcttccaggtagctgaaaggggaagacctgacgtactctggttaggttaggacttgccctcgtggtggaaacttttcttaaaaagttataaccaacttttctattaaaagtgggaattaggagagaaggtaggggttgggaatcagagagaatggctttggtctcttgcttgtgggactagcctggcttgggactaaatgccctgctctgaacacgaagcttagtataaactgatggatatccctaccttgaaagaagaaaaggttcttactgcttggtccttgatttatcacacaaagcagaatagtatttttatatttaaatgtaaagacaaaaaactatatgtatggttttgtggattatgtgtgttttgctaaaggaaaaaaccatccaggtcacggggcaccaaatttgagacaaatagtcggattagaaataaagcatctcattttgagtagagagcaagggaagtggttcttagatggtgatctgggattaggccctcaagacccttttgggtttctgccctgcccaccctctggagaaggtgggcactggattagttaacagacgacacgttactagcagtcacttgatctccgtggctttggtttaaaagacacacttgtccacataggtttagagataagagttggctggtcaacttgagcatgttactgacagagggggtattggggttattttctggtaggaatagcatgtcactaaagcaggccttttgatattaaattttttaaaaagcaaaattatagaagtttagattttaatcaaatttgtagggtttctaggtaatttttacagaattgcttgtttgcttcaactgtctcctacctctgctcttggaggagatggggacagggctggagtcaaaacacttgtaattttgtatcttgatgtctttgttaagactgctgaagaattattttttttcttttataataaggaataaaccccacctttattccttcatttcatctaccattttctggttcttgtgttggctgtggcaggccagctgtggttttcttttgccatgacaacttctaattgccatgtacagtatgttcaaagtcaaataactcctcattgtaaacaaactgtgtaactgcccaaagcagcacttataaatcagcctaacataagaaaaaaaaaa

SEQ ID NO: 379420 - DNA, 1822 bp, Homo sapiens
  misc_feature (1732)..(1732): n is a, c, g, or t
  misc_feature (1743)..(1743): n is a, c, g, or t
  misc_feature (1748)..(1748): n is a, c, g, or t
  misc_feature (1755)..(1755): n is a, c, g, or t
  misc_feature (1761)..(1761): n is a, c, g, or t
  misc_feature (1769)..(1769): n is a, c, g, or t
  misc_feature (1776)..(1776): n is a, c, g, or t
  misc_feature (1780)..(1781): n is a, c, g, or t
  misc_feature (1798)..(1798): n is a, c, g, or t
  misc_feature (1800)..(1800): n is a, c, g, or t
  misc_feature (1807)..(1807): n is a, c, g, or t
cgcgagagcaggttaggagaggagaggaggccgcagtactgctcacacgctccgctcttctcccactctcggcctacctttacccgcccgcctgctcggcgaccagaacaccttccaccatgaccacctcagcaagttcccacttaaataaaggcatcaagcaggtgtacatgtccctgcctcagggtgagaaagtccaggccatgtatatctggatcgatggtactggagaaggactgcgctgcaagacccggaccctggacagtgagcccaagtgtgtggaagagttgcctgagtggaatttcgatggctccagtactttacagtctgagggttccaacagtgacatgtatctcgtgcctgctgccatgtttcgggaccccttccgtaaggaccctaacaagctggtgttatgtgaagttttcaagtacaatcgaaggcctgcagagaccaatttgaggcacacctgtaaacggataatggacatggtgagcaaccagcacccctggtttggcatggagcaggagtataccctcatggggacagatgggcacccctttggttggccttccaacggcttcccagggccccagggtccatattactgtggtgtgggagcagacagagcctatggcagggacatcgtggaggcccattaccgggcctgcttgtatgctggagtcaagattgcggggactaatgccgaggtcatgcctgcccagtgggaatttcagattggaccttgtgaaggaatcagcatgggagatcatctctgggtggcccgtttcatcttgcatcgtgtgtgtgaagactttggagtgatagcaacctttgatcctaagcccattcctgggaactggaatggtgcaggctgccataccaacttcagcaccaaggccatgcgggaggagaatggtctgaagtacatcgaggaggccattgagaaactaagcaagcggcaccagtaccacatccgtgcctatgatcccaagggaggcctggacaatgcccgacgtctaactggattccatgaaacctccaacatcaacgacttttctgctggtgtagccaatcgtagcgccagcatacgcattccccggactgttggccaggagaagaagggttactttgaagatcgtcgcccctctgccaactgcgaccccttttcggtgacagaagccctcatccgcacgtgtcttctcaatgaaaccggcgatgagcccttccagtacaaaaattaagtggactagacctccagctgttgagcccctcctagttcttcatcccactccaactcttccccctctcccagttgtcccgattgtaactcaaagggtggaatatcaaggtcgtttttttcattccatgtgcccagttaatcttgctttctttgtttggctgggatagaggggtcaagttattaatttcttcacacctaccctcctttttttccctatcactgaagctttttagtgcattagtggggaggagggtggggagacataaccactgcttccatttaatggggtgcacctgtccaataggcgtagctatccggacagagcacgtttgcagaagggggtctcttcttccaggtagctgaaaggggaagacctgacgtactctggttaggttaggacttgccctcgtggtggaaacttttcttaaaaagttataaccaacttttctattaaaagtgggaattaggagagaaggtagggatatccatcantttatactaancttcntgttcanagcagngcatttantcccaanccannctagtcccacaagcaananaccaaanccattctctctgaac

SEQ ID NO: 379421 - DNA, 1269 bp, Homo sapiens
  misc_feature (1222)..(1222): n is a, c, g, or t
  misc_feature (1224)..(1224): n is a, c, g, or t
cgcgagagcaggttaggagaggagaggaggccgcagtactgctcacacgctccgctcttctcccactctcggcctacctttacccgcccgcctgctcggcgaccagaacaccttccaccatgaccacctcagcaagttcccacttaaataaaggcatcaagcaggtgtacatgtccctgcctcagggtgagaaagtccaggccatgtatatctggatcgatggtactggagaaggactgcgctgcaagacccggaccctggacagtgagcccaagtgtgtggaagagttgcctgagtggaatttcgatggctccagtactttacagtctgagggttccaacagtgacatgtatctcgtgcctgctgccatgtttcgggaccccttccgtaaggaccctaacaagctggtgttatgtgaagttttcaagtacaatcgaaggcctgcagagaccaatttgaggcacacctgtaaacggataatggacatggtgagcaaccagcacccctggtttggcatggagcaggagtataccctcatggggacagatgggcacccctttggttggccttccaacggcttcccagggccccagggtccatattactgtggtgtgggagcagacagagcctatggcagggacatcgtggaggcccattaccgggcctgcttgtatgctggagtcaagattgcggggactaatgccgaggtcatgcctgcccaggtaagtatagctccaatccatcaatgaagaagggtaggtaggtgtacataggacttttgctagtaagggctgctgatacaccactcactaacccaaaacctaagaacgggttggagtacaggtgagaagagaacaggtttaggagattctgagttggagtgagcagttagctttgttttaatggccaagcttctcgtttctagtgggaatttcagattggaccttgtgaaggaatcagcatgggagatcatctctgggtggcccgtttcatcttgcatcgtgtgtgtgaagactttggagtgatagcaacctttgatcctaagcccattcctgggaactggaatggtgcaggctgccataccaacttcagcaccaaggccatgcgggaggagaatggtctgaagtgagtacattctgctgggccatctaatctcctcgtcggctagaaacttgggacgcgagtcatagctatctccccgctaatctcgtctgccggttananctgctatcctgttctctaacactgcctcaccgtgattgctgtctc

SEQ ID NO: 379422 - DNA, 2091 bp, Homo sapiens
agcggacctgatctgcggctgtcgaggccgctgaggcagtggaggctgaggctatgatggcggccatggcgacggctcgagtgcggatggggccgcggtgcgcccaggcgctctggcgcatgccgtggctgccggtgtttttgtcgttggcggcggcggcggcggcggcagcggcggagcagcaggtcccgctggtgctgtggtcgagtgaccgggacttgtgggctcctgcggccgacactcatgaaggccacatcaccagcgacttgcagctctctacctacttagatcccgccctggagctgggtcccaggaatgtgctgctgttcctgcaggacaagctgagcattgaggatttcacagcatatggcggtgtgtttggaaacaagcaggacagcgccttttctaacctagagaatgccctggacctggccccctcctcactggtgcttcctgccgtcgactggtatgcagtcagcactctgaccacttacctgcaggagaagctcggggccagccccttgcatgtggacctggccaccctgcgggagctgaagctcaatgccagcctccctgctctgctgctcattcgcctgccctacacagccagctctggtctgatggcacccagggaagtcctcacaggcaacgatgaggtcatcgggcaggtcctgagcacactcaagtccgaagatgtcccatacacagcggccctcacagcggtccgcccttccagggtggcccgtgatgtagccgtggtggccggagggctaggtcgccagctgctacaaaaacagccagtatcacctgtgatccatcctcctgtgagttacaatgacaccgctccccggatcctgttctgggcccaaaacttctctgtggcgtacaaggaccagtgggaggacctgactcccctcacctttggggtgcaggaactcaacctgactggctccttctggaatgactcctttgccaggctctcactgacctatgaacgactctttggtaccacagtgacattcaagttcattctggccaaccgcctctacccagtgtctgcccggcactggtttaccatggagcgcctcgaagtccacagcaatggctccgtcgcctacttcaatgcttcccaggtcacagggcccagcatctactccttccactgcgagtatgtcagcagcctgagcaagaagggtagtctcctcgtggcccgcacgcagccctctccctggcagatgatgcttcaggacttccagatccaggctttcaacgtaatgggggagcagttctcctacgccagcgactgtgccagcttcttctcccccggcatctggatggggctgctcacctccctgttcatgctcttcatcttcacctatggcctgcacatgatcctcagcctcaagaccatggatcgctttgatgaccacaagggccccactatttctttgacccagattgtgtgaccctgtgccagtgggggggttgagggtgggacggtgtccgtgttgttgctttcccaccctgcagcgcactggactgaagagcttccctcttcctactgcagcatgaactgcaagctcccctcagcccatcttgctccctcttcagcccgctgaggagctttcttgggctgcccccatctctcccaacaaggtgtacatattctgcgtagatgctagaccaaccagcttcccagggttcgtcgctgtgaggcgtaagggacatgaattctagggtctcctttctccttatttattcttgtggctacatcatccctggctgtggatagtgcttttgtgtagcaaatgctccctccttaaggttatagggctccctgagtttgggagtgtggaagtactacttaactgtctgtcctgcttggctgtcgttatcgttttctggtgatgttgtgctaacaataagaagtacacgggtttatttctgtggcctgagaaggaagggacctccacgacaggtgggctgggtgcgatcgccggctgtttggcatgttcccaccgggagtgccgggcaggagcatggggtgcttggttgtttccttcctaataaaataaacgcgggtcgccatgc

SEQ ID NO: 379423 - DNA, 2824 bp, Homo sapiens
cctcaggaagctgacattcttgtgagggtggccagtaaatactaagtcggtataggatatgatgtcagtgttacggcctttagggaaggaagcaggctaaggggacagagtgactgggatgctattttagataagggtggtcaggccaggcctcattgaggaggtgatatatgagcagcgatcttaatggagggagggagccgtttggggaaggacattcctggaacagcaaatgcgagggtcctgggcgaggtgtgctcttggccagctcaaggaagagctggtgtggctggagcacagtgagtgagagaaaggggtaggagatgtaggagatggtttgcaggtggctaggcgatgaagtaggaccttgtagcccatgagggggaaggtcagttgcagttcgaaatgtgtgagaaagccttgggtaacgtggagcagggagtggtgtgatttctcaattaaagaaagcccacaggacccaccagcagttcctgggctttccgactgagaaccccggtggccaaacagcagcaaggtcctgcccacaagggaggggaggctgggcgagtgtgtataccaaacaggttagggaagctgattaaaatctcctcagggcctaactgggaagggccagaggaagctggggatgggagtggagggtaggagcaaaaggacaaaggacatctgtaggttgtggagaaaaagggatggggtcggggccactgtggtcctaagagctcaaaagacttcaatgctcgatgcttcctccagcatgttctgagatcctcacctctccccttccgccaaaagcaggtggggggagggtcccgtccagactggacatagccgactctccttttctctggctgggaggcctgccacaaatgctcttggctgccccaccccctccccgcagcttccctgttccctccccagttcctcttgtctgtagggtgggcaaggcggctgactcctactcctgagttaccacaagtcagctgcctgcagatctccccaccccatgactgccttccatgtcttctcaccctgccctgagagtgctggagggaagagctgagcattgaggatttcacagcatatggcggtgtgtttggaaacaagcaggacagcgccttttctaacctagagaatgccctggacctggccccctcctcactggtgcttcctgccgtcgactggtatgcagtcagcactctgaccacttacctgcaggagaagctcggggccagccccttgcatgtggacctggccaccctgcgggagctgaagctcaatgccagcctccctgctctgctgctcattcgcctgccctacacagccagctctggtctgatggcacccagggaagtcctcacaggcaacgatgaggtcatcgggcaggtcctgagcacactcaagtccgaagatgtcccatacacagcggccctcacagcggtccgcccttccagggtggcccgtgatgtagccgtggtggccggagggctaggtcgccagctgctacaaaaacagccagtatcacctgtgatccatcctcctgtgagttacaatgacaccgctccccggatcctgttctgggcccaaaacttctctgtggcgtacaaggaccagtgggaggacctgactcccctcacctttggggtgcaggaactcaacctgactggctccttctggaatgactcctttgccaggctctcactgacctatgaacgactctttggtaccacagtgacattcaagttcattctggccaaccgcctctacccagtgtctgcccggcactggtttaccatggagcgcctcgaagtccacagcaatggctccgtcgcctacttcaatgcttcccaggtcacagggcccagcatctactccttccactgcgagtatgtcagcagcctgagcaagaagggtagtctcctcgtggcccgcacgcagccctctccctggcagatgatgcttcaggacttccagatccaggctttcaacgtaatgggggagcagttctcctacgccagcgactgtgccagcttcttctcccccggcatctggatggggctgctcacctccctgttcatgctcttcatcttcacctatggcctgcacatgatcctcagcctcaagaccatggatcgctttgatgaccacaagggccccactatttctttgacccagattgtgtgaccctgtgccagtgggggggttgagggtgggacggtgtccgtgttgttgctttcccaccctgcagcgcactggactgaagagcttccctcttcctactgcagcatgaactgcaagctcccctcagcccatcttgctccctcttcagcccgctgaggagctttcttgggctgcccccatctctcccaacaaggtgtacatattctgcgtagatgctagaccaaccagcttcccagggttcgtcgctgtgaggcgtaagggacatgaattctagggtctcctttctccttatttattcttgtggctacatcatccctggctgtggatagtgcttttgtgtagcaaatgctccctccttaaggttatagggctccctgagtttgggagtgtggaagtactacttaactgtctgtcctgcttggctgtcgttatcgttttctggtgatgttgtgctaacaataagaagtacacgggtttatttctgtggcctgagaaggaagggacctccacgacaggtgggctgggtgcgatcgccggctgtttggcatgttcccaccgggagtgccgggcaggagcatggggtgcttggttgtttccttcctaataaaataaacgcgggtcgccatgc

SEQ ID NO: 379424 - DNA, 617 bp, Homo sapiens
taaacaggcacagaactaacgcaaggtacattctttaaagaggtgctcattctcagggctacacttgcacgtagctgcctcacctgcctagtcccagctctgctgctctggaaagtctcgggagcacatttttctccagtaatacgtgtggcctacattatcatttccaaatgaagaaatttgagactgggattcatcaaaatcacctaggaggctttttctaactactgtgctcgtgccgaattcggcacgatgaattctagggtctcctttctccttatttattcttgtggctacatcatccctggctgtggatagtgcttttgtgtagcaaatgctccctccttaaggttatagggctccctgagtttgggagtgtggaagtactacttaactgtctgtcctgcttggctgtcgttatcgttttctggtgatgttgtgctaacaataagaagtacacgggtttatttctgtggcctgagaaggaagggacctccacgacaggtgggctgggtgcgatcgccggctgtttggcatgttcccaccgggagtgccgggcaggagcatggggtgcttggttgtttccttcctaataaaataaacgcgggtcgccatgc

SEQ ID NO: 379425 - DNA, 2097 bp, Homo sapiens
gatcctcacctacacccactccaccagcaccttggctgtgagccgctgtatgggaggctatgatggcggccatggcgacggctcgagtgcggatggggccgcggtgcgcccaggcgctctggcgcatgccgtggctgccggtgtttttgtcgttggcggcggcggcggcggcggcagcggcggagcagcaggtcccgctggtgctgtggtcgagtgaccgggacttgtgggctcctgcggccgacactcatgaaggccacatcaccagcgacttgcagctctctacctacttagatcccgccctggagctgggtcccaggaatgtgctgctgttcctgcaggacaagctgagcattgaggatttcacagcatatggcggtgtgtttggaaacaagcaggacagcgccttttctaacctagagaatgccctggacctggccccctcctcactggtgcttcctgccgtcgactggtatgcagtcagcactctgaccacttacctgcaggagaagctcggggccagccccttgcatgtggacctggccaccctgcgggagctgaagctcaatgccagcctccctgctctgctgctcattcgcctgccctacacagccagctctggtctgatggcacccagggaagtcctcacaggcaacgatgaggtcatcgggcaggtcctgagcacactcaagtccgaagatgtcccatacacagcggccctcacagcggtccgcccttccagggtggcccgtgatgtagccgtggtggccggagggctaggtcgccagctgctacaaaaacagccagtatcacctgtgatccatcctcctgtgagttacaatgacaccgctccccggatcctgttctgggcccaaaacttctctgtggcgtacaaggaccagtgggaggacctgactcccctcacctttggggtgcaggaactcaacctgactggctccttctggaatgactcctttgccaggctctcactgacctatgaacgactctttggtaccacagtgacattcaagttcattctggccaaccgcctctacccagtgtctgcccggcactggtttaccatggagcgcctcgaagtccacagcaatggctccgtcgcctacttcaatgcttcccaggtcacagggcccagcatctactccttccactgcgagtatgtcagcagcctgagcaagaagggtagtctcctcgtggcccgcacgcagccctctccctggcagatgatgcttcaggacttccagatccaggctttcaacgtaatgggggagcagttctcctacgccagcgactgtgccagcttcttctcccccggcatctggatggggctgctcacctccctgttcatgctcttcatcttcacctatggcctgcacatgatcctcagcctcaagaccatggatcgctttgatgaccacaagggccccactatttctttgacccagattgtgtgaccctgtgccagtgggggggttgagggtgggacggtgtccgtgttgttgctttcccaccctgcagcgcactggactgaagagcttccctcttcctactgcagcatgaactgcaagctcccctcagcccatcttgctccctcttcagcccgctgaggagctttcttgggctgcccccatctctcccaacaaggtgtacatattctgcgtagatgctagaccaaccagcttcccagggttcgtcgctgtgaggcgtaagggacatgaattctagggtctcctttctccttatttattcttgtggctacatcatccctggctgtggatagtgcttttgtgtagcaaatgctccctccttaaggttatagggctccctgagtttgggagtgtggaagtactacttaactgtctgtcctgcttggctgtcgttatcgttttctggtgatgttgtgctaacaataagaagtacacgggtttatttctgtggcctgagaaggaagggacctccacgacaggtgggctgggtgcgatcgccggctgtttggcatgttcccaccgggagtgccgggcaggagcatggggtgcttggttgtttccttcctaataaaataaacgcgggtcgccatgc

SEQ ID NO: 379426 - DNA, 2131 bp, Homo sapiens
agcggacctgatctgcggctgtcgaggccgctgaggcagtggaggctgaggctatgatggcggccatggcgacggctcgagtgcggatggggccgcggtgcgcccaggcgctctggcgcatgccgtggctgccggtgtttttgtcgttggcggcggcggcggcggcggcagcggcggagcagcaggtcccgctggtgctgtggtcgagtgaccgggacttgtgggctcctgcggccgacactcatgaaggccacatcaccagcgacttgcagctctctacctacttagatcccgccctggagctgggtcccaggaatgtgctgctgttcctgcaggacaagctgagcattgaggatttcacagcatatggcggtgtgtttggaaacaagcaggacagcgccttttctaacctagagaatgccctggacctggccccctcctcactggtgcttcctgccgtcgactggtatgcagtcagcactctgaccacttacctgcaggagaagctcggggccagccccttgcatgtggacctggccaccctgcgggagctgaagctcaatgccagcctccctgctctgctgctcattcgcctgccctacacagccagctctggtctgatggcacccagggaagtcctcacaggcaacgatgaggtcatcgggcaggtcctgagcacactcaagtccgaagatgtcccatacacagcggccctcacagcggtccgcccttccagggtggcccgtgatgtagccgtggtggccggagggctaggtcgccagctgctacaaaaacagccagtatcacctgtgatccatcctcctgtgagttacaatgacaccgctccccggatcctgttctgggcccaaaacttctctgtggcgtacaaggaccagtgggaggacctgactcccctcacctttggggtgcaggaactcaacctgactggctccttctggaatgactcctttgccaggctctcactgacctatgaacgactctttggtaccacagtgacattcaagttcattctggccaaccgcctctacccagtgtctgcccggcactggtttaccatggagcgcctcgaagtccacagcaatggctccgtcgcctacttcaatgcttcccaggtcacagggcccagcatctactccttccactgcgagtatgtcagcagcctgagcaagaagggtagtctcctcgtggcccgcacgcagccctctccctggcagatgatgcttcaggacttccagatccaggctttcaacgtaatgggggagcagttctcctacgccagcgactgtgccagcttcttctcccccggcatctggatggggctgctcacctccctgttcatgctcttcatcttcacctatggcctgcacatgatcctcagcctcaagaccatggatcgctttgatgaccacaagggccccactatttctttgacccagattgtgtgaccctgtgccagtgggggggttgagggtgggacggtgtccgtgttgttgctttcccaccctgcagcgcactggactgaagagcttccctcttcctactgcagcatgaactgcaagctcccctcagcccatcttgctccctcttcagcccgctgaggagctttcttgggctgcccccatctctcccaacaaggtgtacatattctgcgtagatgctagaccaaccagcttcccagggttcgtcgctgtgaggcgtaagggacatgaattctagggtctcctttctccttatttattcttgtggctacatcatccctggctgtggatagtgcttttgtgtagcaaatgctccctccttaaggttatagggctccctgagtttgggagtgtggaagtactacttaactgtctgtcctgcttggctgtcgttatcgttttctggtgatgttgtgctaacaataagaagtacacgggtttatttctgtttccttcctaataaaatacacgcgggtcgcccatgcaaaaacacaacaacacaccaacacacacaaacacccttccacgcccccatcgcgcccctgaaaacccttcacaacaccccccctaggccccccgcgccccatggccatcactcgcacccggcgccaacccgtgtcccccggggaccc

SEQ ID NO: 379427 - DNA, 1836 bp, Homo sapiens
agcggacctgatctgcggctgtcgaggccgctgaggcagtggaggctgaggctatgatggcggccatggcgacggctcgagtgcggatggggccgcggtgcgcccaggcgctctggcgcatgccgtggctgccggtgtttttgtcgttggcggcggcggcggcggcggcagcggcggagcagcaggtcccgctggtgctgtggtcgagtgaccgggacttgtgggctcctgcggccgacactcatgaaggccacatcaccagcgacttgcagctctctacctacttagatcccgccctggagctgggtcccaggaatgtgctgctgttcctgcaggacaagctgagcattgaggatttcacagcatatggcggtgtgtttggaaacaagcaggacagcgccttttctaacctagagaatgccctggacctggccccctcctcactggtgcttcctgccgtcgactggtatgcagtcagcactctgaccacttacctgcaggagaagctcggggccagccccttgcatgtggacctggccaccctgcgggagctgaagctcaatgccagcctccctgctctgctgctcattcgcctgccctacacagccagctctggtctgatggcacccagggaagtcctcacaggcaacgatgaggtcatcgggcaggtcctgagcacactcaagtccgaagatgtcccatacacagcggccctcacagcggtccgcccttccagggtggcccgtgatgtagccgtggtggccggagggctaggtcgccagctgctacaaaaacagccagtatcacctgtgatccatcctcctgtgagttacaatgacaccgctccccggatcctgttctgggcccaaaacttctctgtggcgtacaaggaccagtgggaggacctgactcccctcacctttggggtgcaggaactcaacctgactggctccttctggaatgactcctttgccaggctctcactgacctatgaacgactctttggtaccacagtgacattcaagttcattctggccaaccgcctctacccagtgtctgcccggcactggtttaccatggagcgcctcgaagtccacagcaatggctccgtcgcctacttcaatgcttcccaggtcacagggcccagcatctactccttccactgcgagtatgtcagcagcctgagcaagaagggtagtctcctcgtggcccgcacgcagccctctccctggcagatgatgcttcaggacttccagatccaggctttcaacgtaatgggggagcagttctcctacgccagcgactgtgccagcttcttctcccccggcatctggatggggctgctcacctccctgttcatgctcttcatcttcacctatggcctgcacatgatcctcagcctcaagaccatggatcgctttgatgaccacaagggccccactatttctttgacccagattgtgtgaccctgtgccagtgggggggttgagggtgggacggtgtccgtgttgttgctttcccaccctgcagcgcactggactgaagagcttccctcttcctactgcagcatgaactgcaagctcccctcagcccatcttgctccctcttcagcccgctgaggagctttcttgggctgcccccatctctcccaacaaggtgtacatattctgcgtagatgctagaccaaccagcttcccagggttcgtcgctgtgaggcgtaagggacatgaattctagggtctcctttctccttatttattcttgtggctacatcatccctggctgtcgggctagtcggggctgtcgggctagtcggggctgtcgggctagtcgggg

SEQ ID NO: 379428 - DNA, 1962 bp, Homo sapiens
gattcagcagcctcccccttgagccccctcgcttcccggcagcggcggagcagcaggtcccgctggtgctgtggtcgagtgaccgggacttgtgggctcctgcggccgacactcatgaaggccacatcaccagcgacttgcagctctctacctacttagatcccgccctggagctgggtcccaggaatgtgctgctgttcctgcaggacaagctgagcattgaggatttcacagcatatggcggtgtgtttggaaacaagcaggacagcgccttttctaacctagagaatgccctggacctggccccctcctcactggtgcttcctgccgtcgactggtatgcagtcagcactctgaccacttacctgcaggagaagctcggggccagccccttgcatgtggacctggccaccctgcgggagctgaagctcaatgccagcctccctgctctgctgctcattcgcctgccctacacagccagctctggtctgatggcacccagggaagtcctcacaggcaacgatgaggtcatcgggcaggtcctgagcacactcaagtccgaagatgtcccatacacagcggccctcacagcggtccgcccttccagggtggcccgtgatgtagccgtggtggccggagggctaggtcgccagctgctacaaaaacagccagtatcacctgtgatccatcctcctgtgagttacaatgacaccgctccccggatcctgttctgggcccaaaacttctctgtggcgtacaaggaccagtgggaggacctgactcccctcacctttggggtgcaggaactcaacctgactggctccttctggaatgactcctttgccaggctctcactgacctatgaacgactctttggtaccacagtgacattcaagttcattctggccaaccgcctctacccagtgtctgcccggcactggtttaccatggagcgcctcgaagtccacagcaatggctccgtcgcctacttcaatgcttcccaggtcacagggcccagcatctactccttccactgcgagtatgtcagcagcctgagcaagaagggtagtctcctcgtggcccgcacgcagccctctccctggcagatgatgcttcaggacttccagatccaggctttcaacgtaatgggggagcagttctcctacgccagcgactgtgccagcttcttctcccccggcatctggatggggctgctcacctccctgttcatgctcttcatcttcacctatggcctgcacatgatcctcagcctcaagaccatggatcgctttgatgaccacaagggccccactatttctttgacccagattgtgtgaccctgtgccagtgggggggttgagggtgggacggtgtccgtgttgttgctttcccaccctgcagcgcactggactgaagagcttccctcttcctactgcagcatgaactgcaagctcccctcagcccatcttgctccctcttcagcccgctgaggagctttcttgggctgcccccatctctcccaacaaggtgtacatattctgcgtagatgctagaccaaccagcttcccagggttcgtcgctgtgaggcgtaagggacatgaattctagggtctcctttctccttatttattcttgtggctacatcatccctggctgtggatagtgcttttgtgtagcaaatgctccctccttaaggttatagggctccctgagtttgggagtgtggaagtactacttaactgtctgtcctgcttggctgtcgttatcgttttctggtgatgttgtgctaacaataagaagtacacgggtttatttctgtggcctgagaaggaagggacctccacgacaggtgggctgggtgcgatcgccggctgtttggcatgttcccaccgggagtgccgggcaggagcatggggtgcttggttgtttccttcctaataaaataaacgcgggtcgccatgc

SEQ ID NO: 379429 - DNA, 1996 bp, Homo sapiens
gaccaggagttcacagtcaaatcaaagggtgctggtggtcaaggcaaagtggcatccaagattgtgggcccctcgggtgcagcggtgccctgcaaggtggagccaggcctgggggctgacaacagtgtggtgcgcttcctgccccgtgaggaagggccctatgaggtggaggtgacctatgacggcgtgcccgtgcctggcagcccctttcctctggaagctgtggcccccaccaagcctagcaagctgagcattgaggatttcacagcatatggcggtgtgtttggaaacaagcaggacagcgccttttctaacctagagaatgccctggacctggccccctcctcactggtgcttcctgccgtcgactggtatgcagtcagcactctgaccacttacctgcaggagaagctcggggccagccccttgcatgtggacctggccaccctgcgggagctgaagctcaatgccagcctccctgctctgctgctcattcgcctgccctacacagccagctctggtctgatggcacccagggaagtcctcacaggcaacgatgaggtcatcgggcaggtcctgagcacactcaagtccgaagatgtcccatacacagcggccctcacagcggtccgcccttccagggtggcccgtgatgtagccgtggtggccggagggctaggtcgccagctgctacaaaaacagccagtatcacctgtgatccatcctcctgtgagttacaatgacaccgctccccggatcctgttctgggcccaaaacttctctgtggcgtacaaggaccagtgggaggacctgactcccctcacctttggggtgcaggaactcaacctgactggctccttctggaatgactcctttgccaggctctcactgacctatgaacgactctttggtaccacagtgacattcaagttcattctggccaaccgcctctacccagtgtctgcccggcactggtttaccatggagcgcctcgaagtccacagcaatggctccgtcgcctacttcaatgcttcccaggtcacagggcccagcatctactccttccactgcgagtatgtcagcagcctgagcaagaagggtagtctcctcgtggcccgcacgcagccctctccctggcagatgatgcttcaggacttccagatccaggctttcaacgtaatgggggagcagttctcctacgccagcgactgtgccagcttcttctcccccggcatctggatggggctgctcacctccctgttcatgctcttcatcttcacctatggcctgcacatgatcctcagcctcaagaccatggatcgctttgatgaccacaagggccccactatttctttgacccagattgtgtgaccctgtgccagtgggggggttgagggtgggacggtgtccgtgttgttgctttcccaccctgcagcgcactggactgaagagcttccctcttcctactgcagcatgaactgcaagctcccctcagcccatcttgctccctcttcagcccgctgaggagctttcttgggctgcccccatctctcccaacaaggtgtacatattctgcgtagatgctagaccaaccagcttcccagggttcgtcgctgtgaggcgtaagggacatgaattctagggtctcctttctccttatttattcttgtggctacatcatccctggctgtggatagtgcttttgtgtagcaaatgctccctccttaaggttatagggctccctgagtttgggagtgtggaagtactacttaactgtctgtcctgcttggctgtcgttatcgttttctggtgatgttgtgctaacaataagaagtacacgggtttatttctgtggcctgagaaggaagggacctccacgacaggtgggctgggtgcgatcgccggctgtttggcatgttcccaccgggagtgccgggcaggagcatggggtgcttggttgtttccttcctaataaaataaacgcgggtcgccatgc

SEQ ID NO: 379430 - DNA, 1987 bp, Homo sapiens
agcggacctgatctgcggctgtcgaggccgctgaggcagtggaggctgaggctatgatggcggccatggcgacggctcgagtgcggatggggccgcggtgcgcccaggcgctctggcgcatgccgtggctgccggtgtttttgtcgttggcggcggcggcggcggcggcagcggcggagcagcaggtcccgctggtgctgtggtcgagtgaccgggacttgtgggctcctgcggccgacactcatgaaggccacatcaccagcgacttgcagctctctacctacttagatcccgccctggagctgggtcccaggaatgtgctgctgttcctgcaggacaagctgagcattgaggatttcacagcatatggcggtgtgtttggaaacaagcaggacagcgccttttctaacctagagcttgcatgtggacctggccaccctgcgggagctgaagctcaatgccagcctccctgctctgctgctcattcgcctgccctacacagccagctctggtctgatggcacccagggaagtcctcacaggcaacgatgaggtcatcgggcaggtcctgagcacactcaagtccgaagatgtcccatacacagcggccctcacagcggtccgcccttccagggtggcccgtgatgtagccgtggtggccggagggctaggtcgccagctgctacaaaaacagccagtatcacctgtgatccatcctcctgtgagttacaatgacaccgctccccggatcctgttctgggcccaaaacttctctgtggcgtacaaggaccagtgggaggacctgactcccctcacctttggggtgcaggaactcaacctgactggctccttctggaatgactcctttgccaggctctcactgacctatgaacgactctttggtaccacagtgacattcaagttcattctggccaaccgcctctacccagtgtctgcccggcactggtttaccatggagcgcctcgaagtccacagcaatggctccgtcgcctacttcaatgcttcccaggtcacagggcccagcatctactccttccactgcgagtatgtcagcagcctgagcaagaagggtagtctcctcgtggcccgcacgcagccctctccctggcagatgatgcttcaggacttccagatccaggctttcaacgtaatgggggagcagttctcctacgccagcgactgtgccagcttcttctcccccggcatctggatggggctgctcacctccctgttcatgctcttcatcttcacctatggcctgcacatgatcctcagcctcaagaccatggatcgctttgatgaccacaagggccccactatttctttgacccagattgtgtgaccctgtgccagtgggggggttgagggtgggacggtgtccgtgttgttgctttcccaccctgcagcgcactggactgaagagcttccctcttcctactgcagcatgaactgcaagctcccctcagcccatcttgctccctcttcagcccgctgaggagctttcttgggctgcccccatctctcccaacaaggtgtacatattctgcgtagatgctagaccaaccagcttcccagggttcgtcgctgtgaggcgtaagggacatgaattctagggtctcctttctccttatttattcttgtggctacatcatccctggctgtggatagtgcttttgtgtagcaaatgctccctccttaaggttatagggctccctgagtttgggagtgtggaagtactacttaactgtctgtcctgcttggctgtcgttatcgttttctggtgatgttgtgctaacaataagaagtacacgggtttatttctgtggcctgagaaggaagggacctccacgacaggtgggctgggtgcgatcgccggctgtttggcatgttcccaccgggagtgccgggcaggagcatggggtgcttggttgtttccttcctaataaaataaacgcgggtcgccatgc

SEQ ID NO: 379431 - DNA, 1526 bp, Homo sapiens
  misc_feature (16)..(16): n is a, c, g, or t
  misc_feature (48)..(48): n is a, c, g, or t
tcgatctagaggatcncgggatgaggaacgtcactctacacagccagntctggtctgatggcacccaggaagtctcacaggcaacgatgaggtcatcgggcaggtcctgagcacactcaagtccgaagatgtcccatacacagcggccctcacagcggtccgcccttccagggtggcccgtgatgtagccgtggtggccggagggctaggtcgccagctgctacaaaaacagccagtatcacctgtgatccatcctcctgtgagttacaatgacaccgctccccggatcctgttctgggcccaaaacttctctgtggcgtacaaggaccagtgggaggacctgactcccctcacctttggggtgcaggaactcaacctgactggctccttctggaatgactcctttgccaggctctcactgacctatgaacgactctttggtaccacagtgacattcaagttcattctggccaaccgcctctacccagtgtctgcccggcactggtttaccatggagcgcctcgaagtccacagcaatggctccgtcgcctacttcaatgcttcccaggtcacagggcccagcatctactccttccactgcgagtatgtcagcagcctgagcaagaagggtagtctcctcgtggcccgcacgcagccctctccctggcagatgatgcttcaggacttccagatccaggctttcaacgtaatgggggagcagttctcctacgccagcgactgtgccagcttcttctcccccggcatctggatggggctgctcacctccctgttcatgctcttcatcttcacctatggcctgcacatgatcctcagcctcaagaccatggatcgctttgatgaccacaagggccccactatttctttgacccagattgtgtgaccctgtgccagtgggggggttgagggtgggacggtgtccgtgttgttgctttcccaccctgcagcgcactggactgaagagcttccctcttcctactgcagcatgaactgcaagctcccctcagcccatcttgctccctcttcagcccgctgaggagctttcttgggctgcccccatctctcccaacaaggtgtacatattctgcgtagatgctagaccaaccagcttcccagggttcgtcgctgtgaggcgtaagggacatgaattctagggtctcctttctccttatttattcttgtggctacatcatccctggctgtggatagtgcttttgtgtagcaaatgctccctccttaaggttatagggctccctgagtttgggagtgtggaagtactacttaactgtctgtcctgcttggctgtcgttatcgttttctggtgatgttgtgctaacaataagaagtacacgggtttatttctgtggcctgagaaggaagggacctccacgacaggtgggctgggtgcgatcgccggctgtttggcatgttcccaccgggagtgccgggcaggagcatggggtgcttggttgtttccttcctaataaaataaacgcgggtcgccatgc

SEQ ID NO: 379432 - DNA, 1110 bp, Homo sapiens
agcggacctgatctgcggctgtcgaggccgctgaggcagtggaggctgaggctatgatggcggccatggcgacggctcgagtgcggatggggccgcggtgcgcccaggcgctctggcgcatgccgtggctgccggtgtttttgtcgttggcggcggcggcggcggcggcagcggcggagcagcaggtcccgctggtgctgtggtcgagtgaccgggacttgtgggctcctgcggccgacactcatgaaggccacatcaccagcgacttgcagctctctacctacttagatcccgccctggagctgggtcccaggaatgtgctgctgttcctgcaggacaagctgagcattgaggatttcacagcatatggcggtgtgtttggaaacaagcaggacagcgccttttctaacctagagaatgccctggacctggccccctcctcactggtgcttcctgccgtcgactggtatgcagtcagcactctgaccacttacctgcaggagaagctcggggccagccccttgcatgtggacctggccaccctgcgggagctgaagctcaatgccagcctccctgctctgctgctcattcgcctgccctacacagccagctctggtctgatggcacccagggaagtcctcacaggcaacgatgaggtcatcgggcaggtcctgagcacactcaagtccgaagatgtcccatacacagcggccctcacagcggtccgcccttccagggtggcccgtgatgtagccgtggtggccggagggctaggtcgccagctgctacaaaaacagccagtatcacctgtgatccatcctcctgtgagttacaatgacaccgctccccggatcctgttctgggcccaaaacttctctgtggcgtacaaggaccagtgggaggacctgactcccctcacctttggggtgcaggaactcaacctgactggctccttctggaatgactcctttgccaggctctcactgacctatgaacgactctttggtaccacagtgacattcaagttcattctggccaaccgcctctacccagtgagcatggggtgcttggttgtttccttcctaataaaataaacgcgggtcgccatgc

SEQ ID NO: 379433 - DNA, 1315 bp, Homo sapiens
tttcttttgttttgttttgttttgttttgttttaaggctccccttacacaccctcctttaagctttgggttttggatcctgttctgggcccaaaacttctctgtggcgtacaaggaccagtgggaggacctgactcccctcacctttggggtgcaggaactcaacctgactggctccttctggaatgactcctttgccaggctctcactgacctatgaacgactctttggtaccacagtgacattcaagttcattctggccaaccgcctctacccagtgtctgcccggcactggtttaccatggagcgcctcgaagtccacagcaatggctccgtcgcctacttcaatgcttcccaggtcacagggcccagcatctactccttccactgcgagtatgtcagcagcctgagcaagaagggtagtctcctcgtggcccgcacgcagccctctccctggcagatgatgcttcaggacttccagatccaggctttcaacgtaatgggggagcagttctcctacgccagcgactgtgccagcttcttctcccccggcatctggatggggctgctcacctccctgttcatgctcttcatcttcacctatggcctgcacatgatcctcagcctcaagaccatggatcgctttgatgaccacaagggccccactatttctttgacccagattgtgtgaccctgtgccagtgggggggttgagggtgggacggtgtccgtgttgttgctttcccaccctgcagcgcactggactgaagagcttccctcttcctactgcagcatgaactgcaagctcccctcagcccatcttgctccctcttcagcccgctgaggagctttcttgggctgcccccatctctcccaacaaggtgtacatattctgcgtagatgctagaccaaccagcttcccagggttcgtcgctgtgaggcgtaagggacatgaattctagggtctcctttctccttatttattcttgtggctacatcatccctggctgtggatagtgcttttgtgtagcaaatgctccctccttaaggttatagggctccctgagtttgggagtgtggaagtactacttaactgtctgtcctgcttggctgtcgttatcgttttctggtgatgttgtgctaacaataagaagtacacgggtttatttctgtggcctgagaaggaagggacctccacgacaggtgggctgggtgcgatcgccggctgtttggcatgttcccaccgggagtgccgggcaggagcatggggtgcttggttgtttccttcctaataaaataaacgcgggtcgccatgc

SEQ ID NO: 379434 - DNA, 1133 bp, Homo sapiens
aaggctagtggaggcggggttaaatcggccgagggaacgactctttggtaccacagtgacattcaagttcattctggccaaccgcctctacccagtgtctgcccggcactggtttaccatggagcgcctcgaagtccacagcaatggctccgtcgcctacttcaatgcttcccaggtcacagggcccagcatctactccttccactgcgagtatgtcagcagcctgagcaagaagggtagtctcctcgtggcccgcacgcagccctctccctggcagatgatgcttcaggacttccagatccaggctttcaacgtaatgggggagcagttctcctacgccagcgactgtgccagcttcttctcccccggcatctggatggggctgctcacctccctgttcatgctcttcatcttcacctatggcctgcacatgatcctcagcctcaagaccatggatcgctttgatgaccacaagggccccactatttctttgacccagattgtgtgaccctgtgccagtgggggggttgagggtgggacggtgtccgtgttgttgctttcccaccctgcagcgcactggactgaagagcttccctcttcctactgcagcatgaactgcaagctcccctcagcccatcttgctccctcttcagcccgctgaggagctttcttgggctgcccccatctctcccaacaaggtgtacatattctgcgtagatgctagaccaaccagcttcccagggttcgtcgctgtgaggcgtaagggacatgaattctagggtctcctttctccttatttattcttgtggctacatcatccctggctgtggatagtgcttttgtgtagcaaatgctccctccttaaggttatagggctccctgagtttgggagtgtggaagtactacttaactgtctgtcctgcttggctgtcgttatcgttttctggtgatgttgtgctaacaataagaagtacacgggtttatttctgtggcctgagaaggaagggacctccacgacaggtgggctgggtgcgatcgccggctgtttggcatgttcccaccgggagtgccgggcaggagcatggggtgcttggttgtttccttcctaataaaataaacgcgggtcgccatgc

SEQ ID NO: 379435 - DNA, 880 bp, Homo sapiens
agcggacctgatctgcggctgtcgaggccgctgaggcagtggaggctgaggctatgatggcggccatggcgacggctcgagtgcggatggggccgcggtgcgcccaggcgctctggcgcatgccgtggctgccggtgtttttgtcgttggcggcggcggcggcggcggcagcggcggagcagcaggtcccgctggtgctgtggtcgagtgaccgggacttgtgggctcctgcggccgacactcatgaaggccacatcaccagcgacttgcagctctctacctacttagatcccgccctggagctgggtcccaggaatgtgctgctgttcctgcaggacaagctgagcattgaggatttcacagcatatggcggtgtgtttggaaacaagcaggacagcgccttttctaacctagagaatgccctggacctggccccctcctcactggtgcttcctgccgtcgactggtatgcagtcagcactctgaccacttacctgcaggagaagctcggggccagccccttgcatgtggacctggccaccctgcgggagctgaagctcaatgccagcctccctgctctgctgctcattcgcctgccctacacagccagctctggtctgatggcacccagggaagtcctcacaggcaacgatgaggtcatcgggcaggtcctgagcacactcaagtccgaagatgtcccatacacagcggccctcacagcggtccgcccttccagggtggcccgtgatgtagccgtggtggccggagggctaggtcgccagctgctacaaaaacagccagtatcacctgtgatccatcctcctgtgagttacaatgacaccgctccccggggctcgtgccggggtcaggggtaccgagc

SEQ ID NO: 379436 - DNA, 450 bp, Homo sapiens
tactactactaaattcgcggccgcgtcgacgtagatgctagaccaaccagcttcccagggttcgtcgctgtgaggcgtaagggacatgaattctagggtctcctttctccttatttattcttgtggctacatcatccctggctgtggatagtgcttttgtgtagcaaatgctccctccttaaggttatagggctccctgagtttgggagtgtggaagtactacttaactgtctgtcctgcttggctgtcgttatcgttttctggtgatgttgtgctaacaataagaagtacacgggtttatttctgtggcctgagaaggaagggacctccacgacaggtgggctgggtgcgatcgccggctgtttggcatgttcccaccgggagtgccgggcaggagcatggggtgcttggttgtttccttcctaataaaataaacgcgggtcgccatgc

SEQ ID NO: 379437 - DNA, 188 bp, Homo sapiens
aatgggggtgggatgagaagtagctgctcctaaggatcctcagtggaaagtaaacacaccactttcagatggtctagaaggtttctaaagcagacagtggggagtgtttctttatgcagggtgcctggtgacctgagtctctgctctccttgttgaccctcagatgaggtcatcgggcaggtcctgag

SEQ ID NO: 379438 - DNA, 2163 bp, Homo sapiens
agcggacctgatctgcggctgtcgaggccgctgaggcagtggaggctgaggctatgatggcggccatggcgacggctcgagtgcggatggggccgcggtgcgcccaggcgctctggcgcatgccgtggctgccggtgtttttgtcgttggcggcggcggcggcggcggcagcggcggagcagcaggtcccgctggtgctgtggtcgagtgaccgggacttgtgggctcctgcggccgacactcatgaaggccacatcaccagcgacttgcagctctctacctacttagatcccgccctggagctgggtcccaggaatgtgctgctgttcctgcaggacaagctgagcattgaggatttcacagcatatggcggtgtgtttggaaacaagcaggacagcgccttttctaacctagagaatgccctggacctggccccctcctcactggtgcttcctgccgtcgactggtatgcagtcagcactctgaccacttacctgcaggagaagctcggggccagccccttgcatgtggacctggccaccctgcgggagctgaagctcaatgccagcctccctgctctgctgctcattcgcctgccctacacagccagctctggtctgatggcacccagggaagtcctcacaggcaacgatgaggtcatcgggcaggtcctgagcacactcaagtccgaagatgtcccatacacagcggccctcacagcggtccgcccttccagggtggcccgtgatgtagccgtggtggccggagggctaggtcgccagctgctacaaaaacagccagtatcacctgtgatccatcctcctgtgagttacaatgacaccgctccccggatcctgttctgggcccaaaacttctctgtggcgtacaaggaccagtgggaggacctgactcccctcacctttggggtgcaggaactcaacctgactggctccttctggaatgactcctttgccaggctctcactgacctatgaacgactctttggtaccacagtgacattcaagttcattctggccaaccgcctctacccagtgtctgcccggcactggtttaccatggagcgcctcgaagtccacagcaatggctccgtcgcctacttcaatgcttcccaggtcacagggcccagcatctactccttccactgcgagtatgtcagcagcctgagcaagaagggtagtctcctcgtggcccgcacgcagccctctccctggcagatgatgcttcaggacttccagatccaggctttcaacgtaatgggggagcagttctcctacgccagcgactgtgccagcttcttctcccccggcatctggatggggctgctcacctccctgttcatgctcttcatcttcacctatggcctgcacatgatcctcagcctcaagaccatggatcgctttgatgaccacaagggccccactatttctttgacccagattgtgtgaccctgtgccagtgggggggttgagggtgggacggtgtccgtgttgttgctttcccaccctgcagcgcactggactgaagagcttccctcttcctactgcagcatgaactgcaagctcccctcagcccatcttgctccctcttcagcccgctgaggagctttcttgggctgcccccatctctcccaacaaggtgtacatattctgcgtagatgctagaccaaccagcttcccagggttcgtcgctgtgaggcgtaagggacatgaattctagggtctcctttctccttatttattcttgtggctacatcatccctggctgtggatagtgcttttgtgtagcaaatgctccctccttaaggttatagggctccctgagtttgggagtgtggaagtactacttaactgtctgtcctgcttggctgtcgttatcgttttctggtgatgttgtgctaacaataagaagtacacgggtttatttctgtggcctgagaaggaagggacctccacgacaggtgggctgggtgcgatcgccggctgtttggcatgttcccaccgggagtgccgggcaggagcatggggtgcttggttgtttccttcctaataaaataaacgcgggtcgccatgcaaaaaaaaaaaggggggcgccaaaatattccgagggccagttaactacccgttttgtaaagggccctagggc

SEQ ID NO: 379439 - DNA, 2096 bp, Homo sapiens
aggacccaacattgtctatgtgaggccgcgtggtattttggccgaggtgtatgaggctatgatggcggccatggcgacggctcgagtgcggatggggccgcggtgcgcccaggcgctctggcgcatgccgtggctgccggtgtttttgtcgttggcggcggcggcggcggcggcagcggcggagcagcaggtcccgctggtgctgtggtcgagtgaccgggacttgtgggctcctgcggccgacactcatgaaggccacatcaccagcgacttgcagctctctacctacttagatcccgccctggagctgggtcccaggaatgtgctgctgttcctgcaggacaagctgagcattgaggatttcacagcatatggcggtgtgtttggaaacaagcaggacagcgccttttctaacctagagaatgccctggacctggccccctcctcactggtgcttcctgccgtcgactggtatgcagtcagcactctgaccacttacctgcaggagaagctcggggccagccccttgcatgtggacctggccaccctgcgggagctgaagctcaatgccagcctccctgctctgctgctcattcgcctgccctacacagccagctctggtctgatggcacccagggaagtcctcacaggcaacgatgaggtcatcgggcaggtcctgagcacactcaagtccgaagatgtcccatacacagcggccctcacagcggtccgcccttccagggtggcccgtgatgtagccgtggtggccggagggctaggtcgccagctgctacaaaaacagccagtatcacctgtgatccatcctcctgtgagttacaatgacaccgctccccggatcctgttctgggcccaaaacttctctgtggcgtacaaggaccagtgggaggacctgactcccctcacctttggggtgcaggaactcaacctgactggctccttctggaatgactcctttgccaggctctcactgacctatgaacgactctttggtaccacagtgacattcaagttcattctggccaaccgcctctacccagtgtctgcccggcactggtttaccatggagcgcctcgaagtccacagcaatggctccgtcgcctacttcaatgcttcccaggtcacagggcccagcatctactccttccactgcgagtatgtcagcagcctgagcaagaagggtagtctcctcgtggcccgcacgcagccctctccctggcagatgatgcttcaggacttccagatccaggctttcaacgtaatgggggagcagttctcctacgccagcgactgtgccagcttcttctcccccggcatctggatggggctgctcacctccctgttcatgctcttcatcttcacctatggcctgcacatgatcctcagcctcaagaccatggatcgctttgatgaccacaagggccccactatttctttgacccagattgtgtgaccctgtgccagtgggggggttgagggtgggacggtgtccgtgttgttgctttcccaccctgcagcgcactggactgaagagcttccctcttcctactgcagcatgaactgcaagctcccctcagcccatcttgctccctcttcagcccgctgaggagctttcttgggctgcccccatctctcccaacaaggtgtacatattctgcgtagatgctagaccaaccagcttcccagggttcgtcgctgtgaggcgtaagggacatgaattctagggtctcctttctccttatttattcttgtggctacatcatccctggctgtggatagtgcttttgtgtagcaaatgctccctccttaaggttatagggctccctgagtttgggagtgtggaagtactacttaactgtctgtcctgcttggctgtcgttatcgttttctggtgatgttgtgctaacaataagaagtacacgggtttatttctgtggcctgagaaggaagggacctccacgacaggtgggctgggtgcgatcgccggctgtttggcatgttcccaccgggagtgccgggcaggagcatggggtgcttggttgtttccttcctaataaaataaacgcgggtcgccatgc

SEQ ID NO: 379440 - DNA, 2098 bp, Homo sapiens
tccaccccccccacccggcgaacgtaggctagtacgagccgggtggttaattcggaggctatgatggcggccatggcgacggctcgagtgcggatggggccgcggtgcgcccaggcgctctggcgcatgccgtggctgccggtgtttttgtcgttggcggcggcggcggcggcggcagcggcggagcagcaggtcccgctggtgctgtggtcgagtgaccgggacttgtgggctcctgcggccgacactcatgaaggccacatcaccagcgacttgcagctctctacctacttagatcccgccctggagctgggtcccaggaatgtgctgctgttcctgcaggacaagctgagcattgaggatttcacagcatatggcggtgtgtttggaaacaagcaggacagcgccttttctaacctagagaatgccctggacctggccccctcctcactggtgcttcctgccgtcgactggtatgcagtcagcactctgaccacttacctgcaggagaagctcggggccagccccttgcatgtggacctggccaccctgcgggagctgaagctcaatgccagcctccctgctctgctgctcattcgcctgccctacacagccagctctggtctgatggcacccagggaagtcctcacaggcaacgatgaggtcatcgggcaggtcctgagcacactcaagtccgaagatgtcccatacacagcggccctcacagcggtccgcccttccagggtggcccgtgatgtagccgtggtggccggagggctaggtcgccagctgctacaaaaacagccagtatcacctgtgatccatcctcctgtgagttacaatgacaccgctccccggatcctgttctgggcccaaaacttctctgtggcgtacaaggaccagtgggaggacctgactcccctcacctttggggtgcaggaactcaacctgactggctccttctggaatgactcctttgccaggctctcactgacctatgaacgactctttggtaccacagtgacattcaagttcattctggccaaccgcctctacccagtgtctgcccggcactggtttaccatggagcgcctcgaagtccacagcaatggctccgtcgcctacttcaatgcttcccaggtcacagggcccagcatctactccttccactgcgagtatgtcagcagcctgagcaagaagggtagtctcctcgtggcccgcacgcagccctctccctggcagatgatgcttcaggacttccagatccaggctttcaacgtaatgggggagcagttctcctacgccagcgactgtgccagcttcttctcccccggcatctggatggggctgctcacctccctgttcatgctcttcatcttcacctatggcctgcacatgatcctcagcctcaagaccatggatcgctttgatgaccacaagggccccactatttctttgacccagattgtgtgaccctgtgccagtgggggggttgagggtgggacggtgtccgtgttgttgctttcccaccctgcagcgcactggactgaagagcttccctcttcctactgcagcatgaactgcaagctcccctcagcccatcttgctccctcttcagcccgctgaggagctttcttgggctgcccccatctctcccaacaaggtgtacatattctgcgtagatgctagaccaaccagcttcccagggttcgtcgctgtgaggcgtaagggacatgaattctagggtctcctttctccttatttattcttgtggctacatcatccctggctgtggatagtgcttttgtgtagcaaatgctccctccttaaggttatagggctccctgagtttgggagtgtggaagtactacttaactgtctgtcctgcttggctgtcgttatcgttttctggtgatgttgtgctaacaataagaagtacacgggtttatttctgtggcctgagaaggaagggacctccacgacaggtgggctgggtgcgatcgccggctgtttggcatgttcccaccgggagtgccgggcaggagcatggggtgcttggttgtttccttcctaataaaataaacgcgggtcgccatgc

SEQ ID NO: 379441 - DNA, 2454 bp, Homo sapiens
agcggacctgatctgcggctgtcgaggccgctgaggcagtggaggctgaggctatgatggcggccatggcgacggctcgagtgcggatggggccgcggtgcgcccaggcgctctggcgcatgccgtggctgccggtgtttttgtcgttggcggcggcggcggcggcggcagcggcggagcagcaggtcccgctggtgctgtggtcgagtgaccgggacttgtgggctcctgcggccgacactcatgaaggccacatcaccagcgacttgcagctctctacctacttagatcccgccctggagctgggtcccaggaatgtgctgctgttcctgcaggacaagctgagcattgaggatttcacagcatatggcggtgtgtttggaaacaagcaggacagcgccttttctaacctagagaatgccctggacctggccccctcctcactggtgcttcctgccgtcgactggtatgcagtcagcactctgaccacttacctgcaggagaagctcggggccagccccttgcatgtggacctggccaccctgcgggagctgaagctcaatgccagcctccctgctctgctgctcattcgcctgccctacacagccagctctggtctgatggcacccagggaagtcctcacaggcaacgatgaggtcatcgggcaggtcctgagcacactcaagtccgaagatgtcccatacacagcggccctcacagcggtccgcccttccagggtggcccgtgatgtagccgtggtggccggagggctaggtcgccagctgctacaaaaacagccagtatcacctgtgatccatcctcctgtgagttacaatgacaccgctccccggatcctgttctgggcccaaaacttctctgtggcgtacaaggaccagtgggaggacctgactcccctcacctttggggtgcaggaactcaacctgactggctccttctggaatgactcctttgccaggctctcactgacctatgaacgactctttggtaccacagtgacattcaagttcattctggccaaccgcctctacccagtgtctgcccggcactggtttaccatggagcgcctcgaagtccacagcaatggctccgtcgcctacttcaatgcttcccaggtcacagggcccagcatctactccttccactgcgagtatgtcagcagcctgagcaagaagggtagtctcctcgtggcccgcacgcagccctctccctggcagatgatgcttcaggacttccagatccaggctttcaacgtaatgggggagcagttctcctacgccagcgactgtgccagcttcttctcccccggcatctggatggggctgctcacctccctgttcatgctcttcatcttcacctatggcctgcacatgatcctcagcctcaagaccatggatcgctttgatgaccacaagggccccactatttctttgacccagattgtgtgaccctgtgccagtgggggggttgagggtgggacggtgtccgtgttgttgctttcccaccctgcagcgcactggactgaagagcttccctcttcctactgcagcatgaactgcaagctcccctcagcccatcttgctccctcttcagcccgctgaggagctttcttgggctgcccccatctctcccaacaaggtgtacatattctgcgtagatgctagaccaaccagcttcccagggttcgtcgctgtgaggcgtaagggacatgaattctagggtctcctttctccttatttattcttgtggctacatcatccctggctgtggatagtgcttttgtgtagcaaatgctccctccttaaggttatagggctccctgagtttgggagtgtggaagtactacttaactgtctgtcctgcttggctgtcgttatcgttttctggtgatgttgtgctaacaataagaagtacacgggtttatttctgtggcctgagaaggaagggacctccacgacaggtgggctgggtgcgatcgccggctgtttggcatgttcccaccgggagtgccgggcaggagcatggggtgcttggttgtttccttcctaataaaataaacgcgggtcgccatgcaaaaaaaaaaaaaaaaaaacaaaaaaaacttttgggggcggcctgggccctggaaaaagttttttaacaccattcgttttgggggcggggccccatgggttaattgcaaccttggcccctgacgcgtggtcccgaggaaagaatccgcggtcgagagacacacagcggccgtggagttttccacccaattaaaaagaacgccgcgggggcagagcggagggggttctgggaacacaccagagaggggggtccgggaagcacaacgagggctcctaccccacgggtccgcaggagccgataatcattagcgcccgcgggtgcaaaggagtaaagagagagagagagagaggaacagaacagaaa

SEQ ID NO: 379442 - DNA, 2090 bp, Homo sapiens
agcggacctgatctgcggctgtcgaggccgctgaggcagtggaggctgaggctatgatggcggccatggcgacggctcgagtgcggatggggccgcggtgcgcccaggcgctctggcgcatgccgtggctgccggtgtttttgtcgttggcggcggcggcggcggcggcagcggcggagcagcaggtcccgctggtgctgtggtcgagtgaccgggacttgtgggctcctgcggccgacactcatgaaggccacatcaccagcgacttgcagctctctacctacttagatcccgccctggagctgggtcccaggaatgtgctgctgttcctgcaggacaagctgagcattgaggatttcacagcatatggcggtgtgtttggaaacaagcaggacagcgccttttctaacctagagaatgccctggacctggccccctcctcactggtgcttcctgccgtcgactggtatgcagtcagcactctgaccacttacctgcaggagaagctcggggccagccccttgcatgtggacctggccaccctgcgggagctgaagctcaatgccagcctccctgctctgctgctcattcgcctgccctacacagccagctctggtctgatggcacccagggaagtcctcacaggcaacgatgaggtcatcgggcaggtcctgagcacactcaagtccgaagatgtcccatacacagcggccctcacagcggtccgcccttccagggtggcccgtgatgtagccgtggtggccggagggctaggtcgccagctgctacaaaaacagccagtatcacctgtgatccatcctcctgtgagttacaatgacaccgctccccggatcctgttctgggcccaaaacttctctgtggcgtacaaggaccagtgggaggacctgactcccctcacctttggggtgcaggaactcaacctgactggctccttctggaatgactcctttgccaggctctcactgacctatgaacgactctttggtaccacagtgacattcaagttcattctggccaaccgcctctacccagtgtctgcccggcactggtttaccatggagcgcctcgaagtccacagcaatggctccgtcgcctacttcaatgcttcccaggtcacagggcccagcatctactccttccactgcgagtatgtcagcagcctgagcaagaagggtagtctcctcgtggcccgcacgcagccctctccctggcagatgatgcttcaggacttccagatccaggctttcaacgtaatgggggagcagttctcctacgccagcgactgtgccagcttcttctcccccggcatctggatggggctgctcacctccctgttcatgctcttcatcttcacctatggcctgcacatgatcctcagcctcaagaccatggatcgctttgatgaccacaagggccccactatttctttgacccagattgtgtgaccctgtgccagtgggggggttgagggtgggacggtgtccgtgttgttgctttcccaccctgcagcgcactggactgaagagcttccctcttcctactgcagcatgaactgcaagctcccctcagcccatcttgctccctcttcagcccgctgaggagctttcttgggctgcccccatctctcccaacaaggtgtacatattctgcgtagatgctagaccaaccagcttcccagggttcgtcgctgtgaggcgtaagggacatgaattctagggtctcctttctccttatttattcttgtggctacatcatccctggctgtggatagtgcttttgtgtagcaaatgctccctccttaaggttatagggctccctgagtttgggagtgtggaagtactacttaactgtctgtcctgcttggctgtcgttatcgttttctggtgatgttgtgctaacaataagaaataaaccccaagatttccatgaagaaaatcagttgtcttcattcaagaattggggacatgttcccgatttgaggtgaaaccatgaagagaaaatagaatacttaataatgcttttccgcaaccgcttcttgctactgcaggctgaggctcacaaaggccagc

SEQ ID NO: 379443 - DNA, 1991 bp, Homo sapiens
agcggacctgatctgcggctgtcgaggccgctgaggcagtggaggctgaggctatgatggcggccatggcgacggctcgagtgcggatggggccgcggtgcgcccaggcgctctggcgcatgccgtggctgccggtgtttttgtcgttggcggcggcggcggcggcggcagcggcggagcagcaggtcccgctggtgctgtggtcgagtgaccgggacttgtgggctcctgcggccgacactcatgaaggccacatcaccagcgacttgcagctctctacctacttagatcccgccctggagctgggtcccaggaatgtgctgctgttcctgcaggacaagctgagcattgaggatttcacagcatatggcggtgtgtttggaaacaagcaggacagcgccttttctaacctagagaatgccctggacctggccccctcctcactggtgcttcctgccgtcgactggtatgcagtcagcactctgaccacttacctgcaggagaagctcggggccagccccttgcatgtggacctggccaccctgcgggagctgaagctcaatgccagcctccctgctctgctgctcattcgcctgccctacacagccagctctggtctgatggcacccagggaagtcctcacaggcaacgatgaggtcatcgggcaggtcctgagcacactcaagtccgaagatgtcccatacacagcggccctcacagcggtccgcccttccagggtggcccgtgatgtagccgtggtggccggagggctaggtcgccagctgctacaaaaacagccagtatcacctgtgatccatcctcctgtgagttacaatgacaccgctccccggatcctgttctgggcccaaaacttctctgtggcgtacaaggaccagtgggaggacctgactcccctcacctttggggtgcaggaactcaacctgactggctccttctggaatgactcctttgccaggctctcactgacctatgaacgactctttggtaccacagtgacattcaagttcattctggccaaccgcctctacccagtgtctgcccggcactggtttaccatggagcgcctcgaagtccacagcaatggctccgtcgcctacttcaatgcttcccaggtcacagggcccagcatctactccttccactgcgagtatgtcagcagcctgagcaagaagggtagtctcctcgtggcccgcacgcagccctctccctggcagatgatgcttcaggacttccagatccaggctttcaacgtaatgggggagcagttctcctacgccagcgactgtgccagcttcttctcccccggcatctggatggggctgctcacctccctgttcatgctcttcatcttcacctatggcctgcacatgatcctcagcctcaagaccatggatcgctttgatgaccacaagggccccactatttctttgacccagattgtgtgaccctgtgccagtgggggggttgagggtgggacggtgtccgtgttgttgctttcccaccctgcagcgcactggactgaagagcttccctcttcctactgcagcatgaactgcaagctcccctcagcccatcttgctccctcttcagcccgctgaggagctttcttgggctgcccccatctctcccaacaaggtgtacatattctgcgtagatgctagaccaaccagcttcccagggttcgtcgctgtgaggcgtaagggactatagggctccctgagtttgggagtgtggaagtactacttaactgtctgtcctgcttggctgtcgttatcgttttctggtgatgttgtgctaacaataagaagtacacgggtttatttctgtggcctgagaaggaagggacctccacgacaggtgggctgggtgcgatcgccggctgtttggcatgttcccaccgggagtgccgggcaggagcatggggtgcttggttgtttccttcctaataaaataaacgcgggtcgccatgc

SEQ ID NO: 379444 - DNA, 2086 bp, Homo sapiens
ccaggaagtagtagcaggacggtcccgctgtatttcgtccagggcggtactatgcgtacatagtggaccgttcgcgtgcggatggggccgcggtgcgcccaggcgctctggcgcatgccgtggctgccggtgtttttgtcgttggcggcggcggcggcggcggcagcggcggagcagcaggtcccgctggtgctgtggtcgagtgaccgggacttgtgggctcctgcggccgacactcatgaaggccacatcaccagcgacttgcagctctctacctacttagatcccgccctggagctgggtcccaggaatgtgctgctgttcctgcaggacaagctgagcattgaggatttcacagcatatggcggtgtgtttggaaacaagcaggacagcgccttttctaacctagagaatgccctggacctggccccctcctcactggtgcttcctgccgtcgactggtatgcagtcagcactctgaccacttacctgcaggagaagctcggggccagccccttgcatgtggacctggccaccctgcgggagctgaagctcaatgccagcctccctgctctgctgctcattcgcctgccctacacagccagctctggtctgatggcacccagggaagtcctcacaggcaacgatgaggtcatcgggcaggtcctgagcacactcaagtccgaagatgtcccatacacagcggccctcacagcggtccgcccttccagggtggcccgtgatgtagccgtggtggccggagggctaggtcgccagctgctacaaaaacagccagtatcacctgtgatccatcctcctgtgagttacaatgacaccgctccccggatcctgttctgggcccaaaacttctctgtggcgtacaaggaccagtgggaggacctgactcccctcacctttggggtgcaggaactcaacctgactggctccttctggaatgactcctttgccaggctctcactgacctatgaacgactctttggtaccacagtgacattcaagttcattctggccaaccgcctctacccagtgtctgcccggcactggtttaccatggagcgcctcgaagtccacagcaatggctccgtcgcctacttcaatgcttcccaggtcacagggcccagcatctactccttccactgcgagtatgtcagcagcctgagcaagaagggtagtctcctcgtggcccgcacgcagccctctccctggcagatgatgcttcaggacttccagatccaggctttcaacgtaatgggggagcagttctcctacgccagcgactgtgccagcttcttctcccccggcatctggatggggctgctcacctccctgttcatgctcttcatcttcacctatggcctgcacatgatcctcagcctcaagaccatggatcgctttgatgaccacaagggccccactatttctttgacccagattgtgtgaccctgtgccagtgggggggttgagggtgggacggtgtccgtgttgttgctttcccaccctgcagcgcactggactgaagagcttccctcttcctactgcagcatgaactgcaagctcccctcagcccatcttgctccctcttcagcccgctgaggagctttcttgggctgcccccatctctcccaacaaggtgtacatattctgcgtagatgctagaccaaccagcttcccagggttcgtcgctgtgaggcgtaagggacatgaattctagggtctcctttctccttatttattcttgtggctacatcatccctggctgtggatagtgcttttgtgtagcaaatgctccctccttaaggttatagggctccctgagtttgggagtgtggaagtactacttaactgtctgtcctgcttggctgtcgttatcgttttctggtgatgttgtgctaacaataagaagtacacgggtttatttctgtggcctgagaaggaagggacctccacgacaggtgggctgggtgcgatcgccggctgtttggcatgttcccaccgggagtgccgggcaggagcatggggtgcttggttgtttccttcctaataaaataaacgcgggtcgccatgc

SEQ ID NO: 379445 - DNA, 1812 bp, Homo sapiens
cccaacacccccctccaccaaatatggcaaggataaggccgtggttaaggtggagggaagagctgagcattgaggatttcacagcatatggcggtgtgtttggaaacaagcaggacagcgccttttctaacctagagaatgccctggacctggccccctcctcactggtgcttcctgccgtcgactggtatgcagtcagcactctgaccacttacctgcaggagaagctcggggccagccccttgcatgtggacctggccaccctgcgggagctgaagctcaatgccagcctccctgctctgctgctcattcgcctgccctacacagccagctctggtctgatggcacccagggaagtcctcacaggcaacgatgaggtcatcgggcaggtcctgagcacactcaagtccgaagatgtcccatacacagcggccctcacagcggtccgcccttccagggtggcccgtgatgtagccgtggtggccggagggctaggtcgccagctgctacaaaaacagccagtatcacctgtgatccatcctcctgtgagttacaatgacaccgctccccggatcctgttctgggcccaaaacttctctgtggcgtacaaggaccagtgggaggacctgactcccctcacctttggggtgcaggaactcaacctgactggctccttctggaatgactcctttgccaggctctcactgacctatgaacgactctttggtaccacagtgacattcaagttcattctggccaaccgcctctacccagtgtctgcccggcactggtttaccatggagcgcctcgaagtccacagcaatggctccgtcgcctacttcaatgcttcccaggtcacagggcccagcatctactccttccactgcgagtatgtcagcagcctgagcaagaagggtagtctcctcgtggcccgcacgcagccctctccctggcagatgatgcttcaggacttccagatccaggctttcaacgtaatgggggagcagttctcctacgccagcgactgtgccagcttcttctcccccggcatctggatggggctgctcacctccctgttcatgctcttcatcttcacctatggcctgcacatgatcctcagcctcaagaccatggatcgctttgatgaccacaagggccccactatttctttgacccagattgtgtgaccctgtgccagtgggggggttgagggtgggacggtgtccgtgttgttgctttcccaccctgcagcgcactggactgaagagcttccctcttcctactgcagcatgaactgcaagctcccctcagcccatcttgctccctcttcagcccgctgaggagctttcttgggctgcccccatctctcccaacaaggtgtacatattctgcgtagatgctagaccaaccagcttcccagggttcgtcgctgtgaggcgtaagggacatgaattctagggtctcctttctccttatttattcttgtggctacatcatccctggctgtggatagtgcttttgtgtagcaaatgctccctccttaaggttatagggctccctgagtttgggagtgtggaagtactacttaactgtctgtcctgcttggctgtcgttatcgttttctggtgatgttgtgctaacaataagaagtacacgggtttatttctgtggcctgagaaggaagggacctccacgacaggtgggctgggtgcgatcgccggctgtttggcatgttcccaccgggagtgccgggcaggagcatggggtgcttggttgtttccttcctaataaaataaacgcgggtcgccatgc

SEQ ID NO: 379446 - DNA, 1831 bp, Homo sapiens
agcggacctgatctgcggctgtcgaggccgctgaggcagtggaggctgaggctatgatggcggccatggcgacggctcgagtgcggatggggccgcggtgcgcccaggcgctctggcgcatgccgtggctgccggtgtttttgtcgttggcggcggcggcggcggcggcagcggcggagcagcaggtcccgctggtgctgtggtcgagtgaccgggacttgtgggctcctgcggccgacactcatgaaggccacatcaccagcgacttgcagctctctacctacttagatcccgccctggagctgggtcccaggaatgtgctgctgttcctgcaggacaagctgagcattgaggatttcacagcatatggcggtgtgtttggaaacaagcaggacagcgccttttctaacctagagcacactcaagtccgaagatgtcccatacacagcggccctcacagcggtccgcccttccagggtggcccgtgatgtagccgtggtggccggagggctaggtcgccagctgctacaaaaacagccagtatcacctgtgatccatcctcctgtgagttacaatgacaccgctccccggatcctgttctgggcccaaaacttctctgtggcgtacaaggaccagtgggaggacctgactcccctcacctttggggtgcaggaactcaacctgactggctccttctggaatgactcctttgccaggctctcactgacctatgaacgactctttggtaccacagtgacattcaagttcattctggccaaccgcctctacccagtgtctgcccggcactggtttaccatggagcgcctcgaagtccacagcaatggctccgtcgcctacttcaatgcttcccaggtcacagggcccagcatctactccttccactgcgagtatgtcagcagcctgagcaagaagggtagtctcctcgtggcccgcacgcagccctctccctggcagatgatgcttcaggacttccagatccaggctttcaacgtaatgggggagcagttctcctacgccagcgactgtgccagcttcttctcccccggcatctggatggggctgctcacctccctgttcatgctcttcatcttcacctatggcctgcacatgatcctcagcctcaagaccatggatcgctttgatgaccacaagggccccactatttctttgacccagattgtgtgaccctgtgccagtgggggggttgagggtgggacggtgtccgtgttgttgctttcccaccctgcagcgcactggactgaagagcttccctcttcctactgcagcatgaactgcaagctcccctcagcccatcttgctccctcttcagcccgctgaggagctttcttgggctgcccccatctctcccaacaaggtgtacatattctgcgtagatgctagaccaaccagcttcccagggttcgtcgctgtgaggcgtaagggacatgaattctagggtctcctttctccttatttattcttgtggctacatcatccctggctgtggatagtgcttttgtgtagcaaatgctccctccttaaggttatagggctccctgagtttgggagtgtggaagtactacttaactgtctgtcctgcttggctgtcgttatcgttttctggtgatgttgtgctaacaataagaagtacacgggtttatttctgtggcctgagaaggaagggacctccacgacaggtgggctgggtgcgatcgccggctgtttggcatgttcccaccgggagtgccgggcaggagcatggggtgcttggttgtttccttcctaataaaataaacgcgggtcgccatgc

SEQ ID NO: 379447 - DNA, 1663 bp, Homo sapiens
  misc_feature (130)..(130): n is a, c, g, or t
accctacgcgtcggtgccacgtcgttcggctgggagaagctctggggccggtcccttggcatgtggacctgtggcagccttgacggagacgcgtgaagcatcaactgccatgcctcgcctggctcttgcnggcttcgagtttgctgcgcgtgcctcgtacacgatgctcagcttctggtcttgaatggcacccatgggataggtccgtcacgatggcaatcggatgaggtcatcgggcaggtcctgagcacactcaagtccgaagatgtcccatacacagcggccctcacagcggtccgcccttccagggtggcccgtgatgtagccgtggtggccggagggctaggtcgccagctgctacaaaaacagccagtatcacctgtgatccatcctcctgtgagttacaatgacaccgctccccggatcctgttctgggcccaaaacttctctgtggcgtacaaggaccagtgggaggacctgactcccctcacctttggggtgcaggaactcaacctgactggctccttctggaatgactcctttgccaggctctcactgacctatgaacgactctttggtaccacagtgacattcaagttcattctggccaaccgcctctacccagtgtctgcccggcactggtttaccatggagcgcctcgaagtccacagcaatggctccgtcgcctacttcaatgcttcccaggtcacagggcccagcatctactccttccactgcgagtatgtcagcagcctgagcaagaagggtagtctcctcgtggcccgcacgcagccctctccctggcagatgatgcttcaggacttccagatccaggctttcaacgtaatgggggagcagttctcctacgccagcgactgtgccagcttcttctcccccggcatctggatggggctgctcacctccctgttcatgctcttcatcttcacctatggcctgcacatgatcctcagcctcaagaccatggatcgctttgatgaccacaagggccccactatttctttgacccagattgtgtgaccctgtgccagtgggggggttgagggtgggacggtgtccgtgttgttgctttcccaccctgcagcgcactggactgaagagcttccctcttcctactgcagcatgaactgcaagctcccctcagcccatcttgctccctcttcagcccgctgaggagctttcttgggctgcccccatctctcccaacaaggtgtacatattctgcgtagatgctagaccaaccagcttcccagggttcgtcgctgtgaggcgtaagggacatgaattctagggtctcctttctccttatttattcttgtggctacatcatccctggctgtggatagtgcttttgtgtagcaaatgctccctccttaaggttatagggctccctgagtttgggagtgtggaagtactacttaactgtctgtcctgcttggctgtcgttatcgttttctggtgatgttgtgctaacaataagaagtacacgggtttatttctgtggcctgagaaggaagggacctccacgacaggtgggctgggtgcgatcgccggctgtttggcatgttcccaccgggagtgccgggcaggagcatggggtgcttggttgtttccttcctaataaaataaacgcgggtcgccatgc

SEQ ID NO: 379448 - DNA, 1874 bp, Homo sapiens
agcggacctgatctgcggctgtcgaggccgctgaggcagtggaggctgaggctatgatggcggccatggcgacggctcgagtgcggatggggccgcggtgcgcccaggcgctctggcgcatgccgtggctgccggtgtttttgtcgttggcggcggcggcggcggcggcagcggcggagcagcaggtcccgctggtgctgtggtcgagtgaccgggacttgtgggctcctgcggccgacactcatgaaggccacatcaccagcgacttgcagctctctacctacttagatcccgccctggagctgggtcccaggaatgtgctgctgttcctgcaggacaagctgagcattgaggatttcacagcatatggcggtgtgtttggaaacaagcaggacagcgccttttctaacctagagaatgccctggacctggccccctcctcactggtgcttcctgccgtcgactggtatgcagtcagcactctgaccacttacctgcaggagaagctcggggccagcccgtggcccgtgatgtagccgtggtggccggagggctaggtcgccagctgctacaaaaacagccagtatcacctgtgatccatcctcctgtgagttacaatgacaccgctccccggatcctgttctgggcccaaaacttctctgtggcgtacaaggaccagtgggaggacctgactcccctcacctttggggtgcaggaactcaacctgactggctccttctggaatgactcctttgccaggctctcactgacctatgaacgactctttggtaccacagtgacattcaagttcattctggccaaccgcctctacccagtgtctgcccggcactggtttaccatggagcgcctcgaagtccacagcaatggctccgtcgcctacttcaatgcttcccaggtcacagggcccagcatctactccttccactgcgagtatgtcagcagcctgagcaagaagggtagtctcctcgtggcccgcacgcagccctctccctggcagatgatgcttcaggacttccagatccaggctttcaacgtaatgggggagcagttctcctacgccagcgactgtgccagcttcttctcccccggcatctggatggggctgctcacctccctgttcatgctcttcatcttcacctatggcctgcacatgatcctcagcctcaagaccatggatcgctttgatgaccacaagggccccactatttctttgacccagattgtgtgaccctgtgccagtgggggggttgagggtgggacggtgtccgtgttgttgctttcccaccctgcagcgcactggactgaagagcttccctcttcctactgcagcatgaactgcaagctcccctcagcccatcttgctccctcttcagcccgctgaggagctttcttgggctgcccccatctctcccaacaaggtgtacatattctgcgtagatgctagaccaaccagcttcccagggttcgtcgctgtgaggcgtaagggacatgaattctagggtctcctttctccttatttattcttgtggctacatcatccctggctgtggatagtgcttttgtgtagcaaatgctccctccttaaggttatagggctccctgagtttgggagtgtggaagtactacttaactgtctgtcctgcttggctgtcgttatcgttttctggtgatgttgtgctaacaataagaagtacacgggtttatttctgtggcctgagaaggaagggacctccacgacaggtgggctgggtgcgatcgccggctgtttggcatgttcccaccgggagtgccgggcaggagcatggggtgcttggttgtttccttcctaataaaataaacgcgggtcgccatgc

SEQ ID NO: 379449 - DNA, 1198 bp, Homo sapiens
aatgatacgaatcgagctggtacccctagtttgagaagttacaatagcagctctactaaaatatgcaaagcaactcaaaggtgataagaacgaaattcaaaagttggttcaaatggcgagtggacatttgtaaatgacagtctcgtgcaccacctatgtcactgccagtgtggaaccagagaatcatagacagtagcagtgatgtatctcgctaggacgttggtgcaaatttagaaatacaagcaatggacctccaagacccatgtataggagatggtgggagcagagaggtcaaggtgccgggagtcccgagggtcgccccaaccgccctctccctggcagatgatgcttcaggacttccagatccaggctttcaacgtaatgggggagcagttctcctacgccagcgactgtgccagcttcttctcccccggcatctggatggggctgctcacctccctgttcatgctcttcatcttcacctatggcctgcacatgatcctcagcctcaagaccatggatcgctttgatgaccacaagggccccactatttctttgacccagattgtgtgaccctgtgccagtgggggggttgagggtgggacggtgtccgtgttgttgctttcccaccctgcagcgcactggactgaagagcttccctcttcctactgcagcatgaactgcaagctcccctcagcccatcttgctccctcttcagcccgctgaggagctttcttgggctgcccccatctctcccaacaaggtgtacatattctgcgtagatgctagaccaaccagcttcccagggttcgtcgctgtgaggcgtaagggacatgaattctagggtctcctttctccttatttattcttgtggctacatcatccctggctgtggatagtgcttttgtgtagcaaatgctccctccttaaggttatagggctccctgagtttgggagtgtggaagtactacttaactgtctgtcctgcttggctgtcgttatcgttttctggtgatgttgtgctaacaataagaagtacacgggtttatttctgtggcctgagaaggaagggacctccacgacaggtgggctgggtgcgatcgccggctgtttggcatgttcccaccgggagtgccgggcaggagcatggggtgcttggttgtttccttcctaataaaataaacgcgggtcgccatgc

SEQ ID NO: 379450 - DNA, 1096 bp, Homo sapiens
agcggacctgatctgcggctgtcgaggccgctgaggcagtggaggctgaggctatgatggcggccatggcgacggctcgagtgcggatggggccgcggtgcgcccaggcgctctggcgcatgccgtggctgccggtgtttttgtcgttggcggcggcggcggcggcggcagcggcggagcagcaggtcccgctggtgctgtggtcgagtgaccgggacttgtgggctcctgcggccgacactcatgaaggccacatcaccagcgacttgcagctctctacctacttagatcccgccctggagctgggtcccaggaatgtgctgctgttcctgcaggacaagctgagcattgaggatttcacagcatatggcggtgtgtttggaaacaagcaggacagcgccttttctaacctagagaatagccctagaacctaaaccccctaccacatcagatatgaaccatccggcaggcatgcaggattcaggacaggcagcacgattgcgcagcaaagccattctagagaattgccgttgtcatgccccagatcataagtgctcattgccacccagcagtatgcgaaatgccttccatttgcagccagcccgacggcaaacaaattgccattgcggcctaccccgttgccacagggtcgaggccatcatgtgacaagagaagcatcgcccaattggagcaaaccacagcaggatttgccgaaagatggctcactgttcgcaaaaaaccgttgctctcgggcaacagatcgccatcgcatcagaccctaatccggcggttgtccccgagcgcattcgggatcacctcgagccgtcaaaaggctcgctcgggagaaaagccccgcaaggcatggcccaggaaaagccaaaatacccggcccggccttgccagaccaaggctgggcagttcgcttttgcggcggccattggaaattccatgactctaggctattcgaagtttcttcttgctgcggcacccgagcatccccgaaagtcccgggcttccaatttcctcgcgagcttgtgctctttgattgtagcctttctctcccagttagcggaagaaagccataaacatctcctac

SEQ ID NO: 379451 - DNA, 458 bp, Homo sapiens
gcggccgcctactattactactgctcgaattcaagcttctaacgatgtacggggacatggccacaccccaccccacttctcccccaaaaccagagccacctgccagcctcgctgggcagggctggccgtagccagaccccaagctggcccactggtcccctctctggctctgtgggtccctgggctctggacaagcactgggggacgtgcccccagagccacccacttctcatcccaaacccagtttccctgccccctgacgctgctgattcgggctgtggcctccacgtatttatgcagtacagtctgcctgacgccagccctgcctctgggccctgggggctgggctgtagaagagttgttggggaaggagggagctgaggagggggcatctcccaacttctcccttttggaccctgccgaagctccctgcctttaataaactggccaagtgtgga

SEQ ID NO: 379452 - DNA, 3138 bp, Homo sapiens
ccccaccccgggggcggggcccttgcagtgacacgtcggacagctgcggccgcggctgaggctccagtgccgagcgcaagaaccctgcgcagcccagagcagctgctggaggggaatcgaggcgcggctccggggattcggctcgggccgctggctctgctctgcggggagggagcgggcccgcccgcggggcccgagccctccggatccgccccctccccggtcccgccccctcggagactcctctggctgctctgggggttcgccggggccggggacccgcggtccgggcgccatgcgggcatcgctgctgctgatcagagaatgacctttggccttgggggccccccctgggtccaaggggggggcccccctggtttggggggcccccggggtttggggtggcaattcttccccgttgtgggggccttttcaacgccatagaatgcccgtagcttcaaggcggttcaccttggggttggacggatgccgtgcggcccaggcccgccccaacctggagactctgagctgccgccgcgcggcaacaccaacgcggcgcgccggcccaactcggtgcagcccggagcggagcgcgagaagcccggggccggcgaaggcgccggggagaattgggagccgcgcgtcttgccctaccaccctgcacagcccggccaggccgccaaaaaggccgtcaggacccgctacatcagcacggagctgggcatcaggcagaggctgctggtggcggtgctgacctctcagaccacgctgcccacgctgggcgtggccgtgaaccgcacgctggggcaccggctggagcgtgtggtgttcctgacgggcgcacggggccgccgggccccacctggcatggcagtggtgacgctgggcgaggagcgacccattggacacctgcacctggcgctgcgccacctgctggagcagcacggcgacgactttgactggttcttcctggtgcctgacaccacctacaccgaggcgcacggcctggcacgcctaactggccacctcagcctggcctccgccgcccacctgtacctgggccggccccaggacttcatcggcggagagcccacccccggccgctactgccacggaggctttggggtgctgctgtcgcgcatgctgctgcaacaactgcgcccccacctggaaggctgccgcaacgacatcgtcagtgcgcgccctgacgagtggctgggtcgctgcattctcgatgccaccggggtgggctgcactggtgaccacgagggggtgcactatagccatctggagctgagccctggggagccagtgcaggagggggaccctcatttccgaagtgccctgacagcccaccctgtgcgtgaccctgtgcacatgtaccagctgcacaaagctttcgcccgagctgaactggaacgcacgtaccaggagatccaggagttacagtgggagatccagaataccagccatctggccgttgatggggaccgggcagctgcttggcccgtgggtattccagcaccatcccgcccggcctcccgctttgaggtgctgcgctgggactacttcacggagcagcacgctttctcctgcgccgatggctcaccccgctgcccactgcgtggggctgaccgggctgatgtggccgatgttctggggacagctctagaggagctgaaccgccgctaccacccggccttgcggctccagaagcagcagctggtgaatggctaccgacgctttgatccggcccggggtatggaatacacgctggacttgcagctggaggcactgaccccccagggaggccgccggcccctcactcgccgagtgcagctgctccggccgctgagccgcgtggagatcttgcctgtgccctatgtcactgaggcctcacgtctcactgtgctgctgcctctagctgcggctgagcgtgacctggcccctggcttcttggaggcctttgccactgcagcactggagcctggtgatgctgcggcagccctgaccctgctgctactgtatgagccgcgccaggcccagcgcgtggcccatgcagatgtcttcgcacctgtcaaggcccacgtggcagagctggagcggcgtttccccggtgcccgggtgccatggctcagtgtgcagacagccgcaccctcaccactgcgcctcatggatctactctccaagaagcacccgctggacacactgttcctgctggccgggccagacacggtgctcacgcctgacttcctgaaccgctgccgcatgcatgccatctccggctggcaggccttctttcccatgcatttccaagccttccacccagctgtggccccaccacaagggcctgggcccccagagctgggccgtgacactggccgctttgatcgccaggcagccagcgaggcctgcttctacaactccgactacgtggcagcccgtgggcgcctggcggcagcctcagaacaagaagaggagctgctggagagcctggatgtgtacgagctgttcctccacttctccagtctgcatgtgctgcgggcggtggagccggcgctgctgcagcgctaccgggcccagacgtgcagcgcgaggctcagtgaggacctgtaccaccgctgcctccagagcgtgcttgagggcctcggctcccgaacccagctggccatgctactctttgaacaggagcagggcaacagcacctgaccccaccctgtccccgtgggccgtggcatggccacaccccaccccacttctcccccaaaaccagagccacctgccagcctcgctgggcagggctggccgtagccagaccccaagctggcccactggtcccctctctggctctgtgggtccctgggctctggacaagcactgggggacgtgcccccagagccacccacttctcatcccaaacccagtttccctgccccctgacgctgctgattcgggctgtggcctccacgtatttatgcagtacagtctgcctgacgccagccctgcctctgggccctgggggctgggctgtagaagagttgttggggaaggagggagctgaggagggggcatctcccaacttctcccttttggaccctgccgaagctccctgcctttaataaactggccaagtgtgga

SEQ ID NO: 379453 - DNA, 2974 bp, Homo sapiens
ccccaccccgggggcggggcccttgcagtgacacgtcggacagctgcggccgcggctgaggctccagtgccgagcgcaagaaccctgcgcagcccagagcagctgctggaggggaatcgaggcgcggctccggggattcggctcgggccgctggctctgctctgcggggagggagcgggcccgcccgcggggcccgagccctccggatccgccccctccccggtcccgccccctcggagactcctctggctgctctgggggttcgccggggccggggacccgcggtccgggcgccatgcgggcatcgctgctgctgtcggtgctgcggcccgcagggcccgtggccgtgggcatctccctgggcttcaccctgagcctgctcagcgtcacctgggtggaggagccgtgcggcccaggcccgccccaacctggagactctgagctgccgccgcgcggcaacaccaacgcggcgcgccggcccaactcggtgcagcccggagcggagcgcgagaagcccggggccggcgaaggcgccggggagaattgggagccgcgcgtcttgccctaccaccctgcacagcccggccaggccgccaaaaaggccgtcaggacccgctacatcagcacggagctgggcatcaggcagaggctgctggtggcggtgctgacctctcagaccacgctgcccacgctgggcgtggccgtgaaccgcacgctggggcaccggctggagcgtgtggtgttcctgacgggcgcacggggccgccgggccccacctggcatggcagtggtgacgctgggcgaggagcgacccattggacacctgcacctggcgctgcgccacctgctggagcagcacggcgacgactttgactggttcttcctggtgcctgacaccacctacaccgaggcgcacggcctggcacgcctaactggccacctcagcctggcctccgccgcccacctgtacctgggccggccccaggacttcatcggcggagagcccacccccggccgctactgccacggaggctttggggtgctgctgtcgcgcatgctgctgcaacaactgcgcccccacctggaaggctgccgcaacgacatcggggtgcactatagccatctggagctgagccctggggagccagtgcaggagggggaccctcatttccgaagtgccctgacagcccaccctgtgcgtgaccctgtgcacatgtaccagctgcacaaagctttcgcccgagctgaactggaacgcacgtaccaggagatccaggagttacagtgggagatccagaataccagccatctggccgttgatggggaccgggcagctgcttggcccgtgggtattccagcaccatcccgcccggcctcccgctttgaggtgctgcgctgggactacttcacggagcagcacgctttctcctgcgccgatggctcaccccgctgcccactgcgtggggctgaccgggctgatgtggccgatgttctggggacagctctagaggagctgaaccgccgctaccacccggccttgcggctccagaagcagcagctggtgaatggctaccgacgctttgatccggcccggggtatggaatacacgctggacttgcagctggaggcactgaccccccagggaggccgccggcccctcactcgccgagtgcagctgctccggccgctgagccgcgtggagatcttgcctgtgccctatgtcactgaggcctcacgtctcactgtgctgctgcctctagctgcggctgagcgtgacctggcccctggcttcttggaggcctttgccactgcagcactggagcctggtgatgctgcggcagccctgaccctgctgctactgtatgagccgcgccaggcccagcgcgtggcccatgcagatgtcttcgcacctgtcaaggcccacgtggcagagctggagcggcgtttccccggtgcccgggtgccatggctcagtgtgcagacagccgcaccctcaccactgcgcctcatggatctactctccaagaagcacccgctggacacactgttcctgctggccgggccagacacggtgctcacgcctgacttcctgaaccgctgccgcatgcatgccatctccggctggcaggccttctttcccatgcatttccaagccttccacccagctgtggccccaccacaagggcctgggcccccagagctgggccgtgacactggccgctttgatcgccaggcagccagcgaggcctgcttctacaactccgactacgtggcagcccgtgggcgcctggcggcagcctcagaacaagaagaggagctgctggagagcctggatgtgtacgagctgttcctccacttctccagtctgcatgtgctgcgggcggtggagccggcgctgctgcagcgctaccgggcccagacgtgcagcgcgaggctcagtgaggacctgtaccaccgctgcctccagagcgtgcttgagggcctcggctcccgaacccagctggccatgctactctttgaacaggagcagggcaacagcacctgaccccaccctgtccccgtgggccgtggcatggccacaccccaccccacttctcccccaaaaccagagccacctgccagcctcgctgggcagggctggccgtagccagaccccaagctggcccactggtcccctctctggctctgtgggtccctgggctctggacaagcactgggggacgtgcccccagagccacccacttctcatcccaaacccagtttccctgccccctgacgctgctgattcgggctgtggcctccacgtatttatgcagtacagtctgcctgacgccagccctgcctctgggccctgggggctgggctgtagaagagttgttggggaaggagggagctgaggagggggcatctcccaacttctcccttttggaccctgccgaagctccctgcctttaataaactggccaagtgtgga

SEQ ID NO: 379454 - DNA, 3264 bp, Homo sapiens
ccccaccccgggggcggggcccttgcagtgacacgtcggacagctgcggccgcggctgaggctccagtgccgagcgcaagaaccctgcgcagcccagagcagctgctggaggggaatcgaggcgcggctccggggattcggctcgggccgctggctctgctctgcggggagggagcgggcccgcccgcggggcccgagccctccggatccgccccctccccggtcccgccccctcggagactcctctggctgctctgggggttcgccggggccggggacccgcggtccgggcgccatgcgggcatcgctgctgctgtcggtgctgcggcccgcagggcccgtggccgtgggcatctccctgggcttcaccctgagcctgctcagcgtcacctgggtggaggagccgtgcggcccaggcccgccccaacctggagactctgagctgccgccgcgcggcaacaccaacgcggcgcgccggcccaactcggtgcagcccggagcggagcgcgagaagcccggggccggcgaaggcgccggggagaattgggagccgcgcgtcttgccctaccaccctgcacagcccggccaggccgccaaaaaggccgtcaggacccgctacatcagcacggagctgggcatcaggcagaggctgctggtggcggtgctgacctctcagaccacgctgcccacgctgggcgtggccgtgaaccgcacgctggggcaccggctggagcgtgtggtgttcctgacgggcgcacggggccgccgggccccacctggcatggcagtggtgacgctgggcgaggagcgacccattggacacctgcacctggcgctgcgccacctgctggagcagcacggcgacgactttgactggttcttcctggtgcctgacaccacctacaccgaggcgcacggcctggcacgcctaactggccacctcagcctggcctccgccgcccacctgtacctgggccggccccaggacttcatcggcggagagcccacccccggccgctactgccacggaggctttggggtgctgctgtcgcgcatgctgctgcaacaactgcgcccccacctggaaggctgccgcaacgacatcgtcagtgcgcgccctgacgagtggctgggtcgctgcattctcgatgccaccggggtgggctgcactggtgaccacgagggggtgcactatagccatctggagctgagccctggggagccagtgcaggagggggaccctcatttccgaagtgccctgacagcccaccctgtgcgtgaccctgtgcacatgtaccagctgcacaaagctttcgcccgagctgaactggaacgcacgtaccaggagatccaggagttacagtgggagatccagaataccagccatctggccgttgatggggaccgggcagctgcttggcccgtgggtattccagcaccatcccgcccggcctcccgctttgaggtgctgcgctgggactacttcacggagcagcacgctttctcctgcgccgatggctcaccccgctgcccactgcgtggggctgaccgggctgatgtggccgatgttctggggacagctctagaggagctgaaccgccgctaccacccggccttgcggctccagaagcagcagctggtgaatggctaccgacgctttgatccggcccggggtatggaatacacgctggacttgcagctggaggcactgaccccccagggaggccgccggcccctcactcgccgagtgcagctgctccggccgctgagccgcgtggagatcttgcctgtgccctatgtcactgaggcctcacgtctcactgtgctgctgcctctagctgcggctgagcgtgacctggcccctggcttcttggaggcctttgccactgcagcactggagcctggtgatgctgcggcagccctgaccctgctgctactgtatgagccgcgccaggcccagcgcgtggcccatgcagatgtcttcgcacctgtcaaggcccacgtggcagagctggagcggcgtttccccggtgcccgggtgccatggctcagtgtgcagacagccgcaccctcaccactgcgcctcatggatctactctccaagaagcacccgctggacacactgttcctgctggccgggccagacacggtgctcacgcctgacttcctgaaccgctgccgcatgcatgccatctccggctggcaggccttctttcccatgcatttccaagccttccacccagctgtggccccaccacaagggcctgggcccccagagctgggccgtgacactggccgctttgatcgccaggcagccagcgaggcctgcttctacaactccgactacgtggcagcccgtgggcgcctggcggcagcctcagaacaagaagaggagctgctggagagcctggatgtgtacgagctgttcctccacttctccagtctgcatgtgctgcgggcggtggagccggcgctgctgcagcgctaccgggcccagacgtgcagcgcgaggctcagtgaggacctgtaccaccgctgcctccagagcgtgcttgagggcctcggctcccgaacccagctggccatgctactctttgaacaggagcagggcaacagcacctgaccccaccctgtccccgtgggccgtggcatggccacaccccaccccacttctcccccaaaaccagagccacctgccagcctcgctgggcagggctggccgtagccagaccccaagctggcccactggtcccctctctggctctgtgggtccctgggctctggacaagcactgggggacgtgcccccagagccacccacttctcatcccaaacccagtttccctgccccatttgaaagaaaggactctggggtttttactgttacctgatcaatgacagagccttctgaggacattccaagacagtatacagtcctgtggtctccttggaaatccgtctagttaacatttcaagggcaataccgtgttggttttgactggatattcatataaactttttaaagagttgagtgatagagctaacccttatctgtaagttttgaatttatattgtttcatcccatgtacaaaaccattttttcctacaaatagtttgggttttgttgttgtttcttttttttgttttgtttttgtttttttttttttttgcgttcgtggggttgtaaaagaaaagaaagcagaatgttttatcatggtttttgcttcagcggctttaggacaaattaaaagtcaactctggtgcc

SEQ ID NO: 379455 - DNA, 1962 bp, Homo sapiens
atgccactggtgtttatcgatgccactggtgtttatctgatgccactggtgtttatcgatgccaccggggtgggctgcactggtgaccacgagggggtgcactatagccatctggagctgagccctggggagccagtgcaggagggggaccctcatttccgaagtgccctgacagcccaccctgtgcgtgaccctgtgcacatgtaccagctgcacaaagctttcgcccgagctgaactggaacgcacgtaccaggagatccaggagttacagtgggagatccagaataccagccatctggccgttgatggggaccgggcagctgcttggcccgtgggtattccagcaccatcccgcccggcctcccgctttgaggtgctgcgctgggactacttcacggagcagcacgctttctcctgcgccgatggctcaccccgctgcccactgcgtggggctgaccgggctgatgtggccgatgttctggggacagctctagaggagctgaaccgccgctaccacccggccttgcggctccagaagcagcagctggtgaatggctaccgacgctttgatccggcccggggtatggaatacacgctggacttgcagctggaggcactgaccccccagggaggccgccggcccctcactcgccgagtgcagctgctccggccgctgagccgcgtggagatcttgcctgtgccctatgtcactgaggcctcacgtctcactgtgctgctgcctctagctgcggctgagcgtgacctggcccctggcttcttggaggcctttgccactgcagcactggagcctggtgatgctgcggcagccctgaccctgctgctactgtatgagccgcgccaggcccagcgcgtggcccatgcagatgtcttcgcacctgtcaaggcccacgtggcagagctggagcggcgtttccccggtgcccgggtgccatggctcagtgtgcagacagccgcaccctcaccactgcgcctcatggatctactctccaagaagcacccgctggacacactgttcctgctggccgggccagacacggtgctcacgcctgacttcctgaaccgctgccgcatgcatgccatctccggctggcaggccttctttcccatgcatttccaagccttccacccagctgtggccccaccacaagggcctgggcccccagagctgggccgtgacactggccgctttgatcgccaggcagccagcgaggcctgcttctacaactccgactacgtggcagcccgtgggcgcctggcggcagcctcagaacaagaagaggagctgctggagagcctggatgtgtacgagctgttcctccacttctccagtctgcatgtgctgcgggcggtggagccggcgctgctgcagcgctaccgggcccagacgtgcagcgcgaggctcagtgaggacctgtaccaccgctgcctccagagcgtgcttgagggcctcggctcccgaacccagctggccatgctactctttgaacaggagcagggcaacagcacctgaccccaccctgtccccgtgggccgtggcatggccacaccccaccccacttctcccccaaaaccagagccacctgccagcctcgctgggcagggctggccgtagccagaccccaagctggcccactggtcccctctctggctctgtgggtccctgggctctggacaagcactgggggacgtgcccccagagccacccacttctcatcccaaacccagtttccctgccccctgacgctgctgattcgggctgtggcctccacgtatttatgcagtacagtctgcctgacgccagccctgcctctgggccctgggggctgggctgtagaagagttgttggggaaggagggagctgaggagggggcatctcccaacttctcccttttggaccctgccgaagctccctgcctttaataaactggccaagtgtgga

SEQ ID NO: 379456 - DNA, 3559 bp, Homo sapiens
ccccaccccgggggcggggcccttgcagtgacacgtcggacagctgcggccgcggctgaggctccagtgccgagcgcaagaaccctgcgcagcccagagcagctgctggaggggaatcgaggcgcggctccggggattcggctcgggccgctggctctgctctgcggggagggagcgggcccgcccgcggggcccgagccctccggatccgccccctccccggtcccgccccctcggagactcctctggctgctctgggggttcgccggggccggggacccgcggtccgggcgccatgcgggcatcgctgctgctgtcggtgctgcggcccgcagggcccgtggccgtgggcatctccctgggcttcaccctgagcctgctcagcgtcacctgggtggaggagccgtgcggcccaggcccgccccaacctggagactctgagctgccgccgcgcggcaacaccaacgcggcgcgccggcccaactcggtgcagcccggagcggagcgcgagaagcccggggccggcgaaggcgccggggagaattgggagccgcgcgtcttgccctaccaccctgcacagcccggccaggccgccaaaaaggccgtcaggacccgctacatcagcacggagctgggcatcaggcagaggctgctggtggcggtgctgacctctcagaccacgctgcccacgctgggcgtggccgtgaaccgcacgctggggcaccggctggagcgtgtggtgttcctgacgggcgcacggggccgccgggccccacctggcatggcagtggtgacgctgggcgaggagcgacccattggacacctgcacctggcgctgcgccacctgctggagcagcacggcgacgactttgactggttcttcctggtgcctgacaccacctacaccgaggcgcacggcctggcacgcctaactggccacctcagcctggcctccgccgcccacctgtacctgggccggccccaggacttcatcggcggagagcccacccccggccgctactgccacggaggctttggggtgctgctgtcgcgcatgctgctgcaacaactgcgcccccacctggaaggctgccgcaacgacatcgtcagtgcgcgccctgacgagtggctgggtcgctgcattctcgatgccaccggggtgggctgcactggtgaccacgagggggtgcactatagccatctggagctgagccctggggagccagtgcaggagggggaccctcatttccgaagtgccctgacagcccaccctgtgcgtgaccctgtgcacatgtaccagctgcacaaagctttcgcccgagctgaactggaacgcacgtaccaggagatccaggagttacagtgggagatccagaataccagccatctggccgttgatggggaccgggcagctgcttggcccgtgggtattccagcaccatcccgcccggcctcccgctttgaggtgctgcgctgggactacttcacggagcagcacgctttctcctgcgccgatggctcaccccgctgcccactgcgtggggctgaccgggctgatgtggccgatgttctggggacagctctagaggagctgaaccgccgctaccacccggccttgcggctccagaagcagcagctggtgaatggctaccgacgctttgatccggcccggggtatggaatacacgctggacttgcagctggaggcactgaccccccagggaggccgccggcccctcactcgccgagtgcagctgctccggccgctgagccgcgtggagatcttgcctgtgccctatgtcactgaggcctcacgtctcactgtgctgctgcctctagctgcggctgagcgtgacctggcccctggcttcttggaggcctttgccactgcagcactggagcctggtgatgctgcggcagccctgaccctgctgctactgtatgagccgcgccaggcccagcgcgtggcccatgcagatgtcttcgcacctgtcaaggcccacgtggcagagctggagcggcgtttccccggtgcccgggtgccatggctcagtgtgcagacagccgcaccctcaccactgcgcctcatggatctactctccaagaagcacccgctggacacactgttcctgctggccgggccagacacggtgctcacgcctgacttcctgaaccgctgccgcatgcatgccatctccggctggcaggccttctttcccatgcatttccaagccttccacccagctgtggccccaccacaagggcctgggcccccagagctgggccgtgacactggccgctttgatcgccaggcagccagcgaggcctgcttctacaactccgactacgtggcagcccgtgggcgcctggcggcagcctcagaacaagaagaggagctgctggagagcctggatgtgtacgagctgttcctccacttctccagtctgcatgtgctgcgggcggtggagccggcgctgctgcagcgctaccgggcccagacgtgcagcgcgaggctcagtgaggacctgtaccaccgctgcctccagagcgtgcttgagggcctcggctcccgaacccagctggccatgctactctttgaacaggagcagggcaacagcacctgaccccaccctgtccccgtgggccgtggcatggccacaccccaccccacttctcccccaaaaccagagccacctgccagcctcgctgggcagggctggccgtagccagaccccaagctggcccactggtcccctctctggctctgtgggtccctgggctctggacaagcactgggggacgtgcccccagagccacccacttctcatcccaaacccagtttccctgccccctgacgctgctgattcgggctgtggcctccacgtatttatgcagtacagtctgcctgacgccagccctgcctctgggccctgggggctgggctgtagaagagttgttggggaaggagggagctgaggagggggcatctcccaacttctcccttttggaccctgccgaagctccctgcctttaataaactggccaagtgtggaaaaaaaaaaaaaaaaaaaaaaaaaaaaaaaaaacaaaacaagaggccagacacccaaacccaacatatactaagtcgagtaacattacaatgccctgcgctttacaacacaacgcctggaccataccgtgacccaactcaattgactcgcctcacatcccattttcgtcagttgacctagtatcaaagagaccaggcccgatcggattgcccaacacatgagcagcccagacggcaagtggcatgtcagaagcggagctattatgttgcctgtctcgacccattagtatataaatgaatagactcgactgagattggagtgagttccagtccagatcatgactccactactctaataacggaacgtgcaccgcaacaagggcgaggcgaccgtctcatatgtcagggggaccactccacttaaccgatcccttaccctagtcatttgctcttcgagcagccgtgccggaactaaatgaaaccctaccgtgccccccccttgctggcg

SEQ ID NO: 379457 - DNA, 1707 bp, Homo sapiens
tggccatagccgattcctgagcgaaaaacgacggcaccaagacctgatcgatggaatggctgttccgctgcttggcccgtgggtattccagcaccatcccgcccggcctcccgctttgaggtgctgcgctgggactacttcacggagcagcacgctttctcctgcgccgatggctcaccccgctgcccactgcgtggggctgaccgggctgatgtggccgatgttctggggacagctctagaggagctgaaccgccgctaccacccggccttgcggctccagaagcagcagctggtgaatggctaccgacgctttgatccggcccggggtatggaatacacgctggacttgcagctggaggcactgaccccccagggaggccgccggcccctcactcgccgagtgcagctgctccggccgctgagccgcgtggagatcttgcctgtgccctatgtcactgaggcctcacgtctcactgtgctgctgcctctagctgcggctgagcgtgacctggcccctggcttcttggaggcctttgccactgcagcactggagcctggtgatgctgcggcagccctgaccctgctgctactgtatgagccgcgccaggcccagcgcgtggcccatgcagatgtcttcgcacctgtcaaggcccacgtggcagagctggagcggcgtttccccggtgcccgggtgccatggctcagtgtgcagacagccgcaccctcaccactgcgcctcatggatctactctccaagaagcacccgctggacacactgttcctgctggccgggccagacacggtgctcacgcctgacttcctgaaccgctgccgcatgcatgccatctccggctggcaggccttctttcccatgcatttccaagccttccacccagctgtggccccaccacaagggcctgggcccccagagctgggccgtgacactggccgctttgatcgccaggcagccagcgaggcctgcttctacaactccgactacgtggcagcccgtgggcgcctggcggcagcctcagaacaagaagaggagctgctggagagcctggatgtgtacgagctgttcctccacttctccagtctgcatgtgctgcgggcggtggagccggcgctgctgcagcgctaccgggcccagacgtgcagcgcgaggctcagtgaggacctgtaccaccgctgcctccagagcgtgcttgagggcctcggctcccgaacccagctggccatgctactctttgaacaggagcagggcaacagcacctgaccccaccctgtccccgtgggccgtggcatggccacaccccaccccacttctcccccaaaaccagagccacctgccagcctcgctgggcagggctggccgtagccagaccccaagctggcccactggtcccctctctggctctgtgggtccctgggctctggacaagcactgggggacgtgcccccagagccacccacttctcatcccaaacccagtttccctgccccctgacgctgctgattcgggctgtggcctccacgtatttatgcagtacagtctgcctgacgccagccctgcctctgggccctgggggctgggctgtagaagagttgttggggaaggagggagctgaggagggggcatctcccaacttctcccttttggaccctgccgaagctccctgcctttaataaactggccaagtgtgga

SEQ ID NO: 379458 - DNA, 2838 bp, Homo sapiens
ccccaccccgggggcggggcccttgcagtgacacgtcggacagctgcggccgcggctgaggctccagtgccgagcgcaagaaccctgcgcagcccagagcagctgctggaggggaatcgaggcgcggctccggggattcggctcgggccgctggctctgctctgcggggagggagcgggcccgcccgcggggcccgagccctccggatccgccccctccccggtcccgccccctcggagactcctctggctgctctgggggttcgccggggccggggacccgcggtccgggcgccatgcgggcatcgctgctgctgtcggtgctgcggcccgcagggcccgtggccgtgggcatctccctgggcttcaccctgagcctgctcagcgtcacctgggtggaggagccgtgcggcccaggcccgccccaacctggagactctgagctgccgccgcgcggcaacaccaacgcggcgcgccggcccaactcggtgcagcccggagcggagcgcgagaagcccggggccggcgaaggcgccggggagaattgggagccgcgcgtcttgccctaccaccctgcacagcccggccaggccgccaaaaaggccgtcaggacccgctacatcagcacggagctgggcatcaggcagaggctgctggtggcggtgctgacctctcagaccacgctgcccacgctgggcgtggccgtgaaccgcacgctggggcaccggctggagcgtgtggtgttcctgacgggcgcacggggccgccgggccccacctggcatggcagtggtgacgctgggcgaggagcgacccattggacacctgcacctggcgctgcgccacctgctggagcagcacggcgacgactttgactggttcttcctggtgcctgacaccacctacaccgaggcgcacggcctggcacgcctaactggccacctcagcctggcctccgccgcccacctgtacctgggccggccccaggacttcatcggcggagagcccacccccggccgctactgccacggaggctttggggtgctgctgtcgcgcatgctgctgcaacaactgcgcccccacctggaaggctgccgcaacgacatcgtcagtgcgcgccctgacgagtggctgggtcgctgcattctcgatgccaccggggtgggctgcactggtgaccacgagggggtgcactatagccatctggagctgagccctggggagccagtgcaggagggggaccctcatttccgaagtgccctgacagcccaccctgtgcgtgaccctgtgcacatgtaccagctgcacaaagctttcgcccgagctgaactggaacgcacgtaccaggagatccaggagttacagtgggagatccagaataccagccatctggccgttgatggggaccgggcagctgcttggcccgtgggtattccagcaccatcccgcccggcctcccgctttgaggtgctgcgctgggactacttcacggagcagcacgctttctcctgcgccgatggctcaccccgctgcccactgcgtggggctgaccgggctgatgtggccgatgttctggggacagctctagaggagctgaaccgccgctaccacccggccttgcggctccagaagcagcagctggtgaatggctaccgacgctttgatccggcccggggtatggaatacacgctggacttgcagctggaggcactgaccccccagggaggccgccggcccctcactcgccgagtgcagctgctccggccgctgagccgcgtggagatcttgcctgtgccctatgtcactgaggcctcacgtctcactgtgctgctgcctctagctgcggctgagcgtgacctggcccctggcttcttggaggcctttgccactgcagcactggagcctggtgatgctgcggcagccctgaccctgctgctactgtatgagccgcgccaggcccagcgcgtggcccatgcagatgtcttcgcacctgtcaaggcccacgtggcagagctggagcggcgtttccccggtgcccgggtgccatggctcagtgtgcagacagccgcaccctcaccactgcgcctcatggatctactctccaagaagcacccgctggacacactgttcctgctggccgggccagacacggtgctcacgcctgacttcctgaaccgctgccgcatgcatgccatctccggctggcaggccttctttcccatgcatttccaagccttccacccagctgtggccccaccacaagggcctgggcccccagagctgggccgtgacactggccgctttgatcgccaggcagccagcgaggcctgcttctacaactccgactacgtggcagcccgtgggcgcctggcggcagcctcagaacaagaagaggagctgctggagagcctggatgtgtacgagctgttcctccacttctccagtctgcatgtgctgcgggcggtggagccggcgctgctgcagcgctaccgggcccagacgtgcagcgcgaggctcagtgaggacctgtaccaccgctgcctccagagcgtgcttgagggcctcggctcccgaacccagctggccatgctactctttgaacaggagcagggcaacagcacctgaccccaccctgtccccgtgggccgtggcatggccacaccccaccccacttctcccccaaaaccagagccacctgccagccctgcctctgggccctgggggctgggctgtagaagagttgttggggaaggagggagctgaggagggggcatctcccaacttctcccttttggaccctgccgaagctccctgcctttaataaactggccaagtgtgga

SEQ ID NO: 379459 - DNA, 1310 bp, Homo sapiens
  misc_feature (17)..(18): n is a, c, g, or t
  misc_feature (25)..(25): n is a, c, g, or t
gggctaagtacgaggcnngggtgtngaatcggccgaggatcttgcctgtgccctatgtcactgaggcctcacgtctcactgtgctgctgcctctagctgcggctgagcgtgacctggcccctggcttcttggaggcctttgccactgcagcactggagcctggtgatgctgcggcagccctgaccctgctgctactgtatgagccgcgccaggcccagcgcgtggcccatgcagatgtcttcgcacctgtcaaggcccacgtggcagagctggagcggcgtttccccggtgcccgggtgccatggctcagtgtgcagacagccgcaccctcaccactgcgcctcatggatctactctccaagaagcacccgctggacacactgttcctgctggccgggccagacacggtgctcacgcctgacttcctgaaccgctgccgcatgcatgccatctccggctggcaggccttctttcccatgcatttccaagccttccacccagctgtggccccaccacaagggcctgggcccccagagctgggccgtgacactggccgctttgatcgccaggcagccagcgaggcctgcttctacaactccgactacgtggcagcccgtgggcgcctggcggcagcctcagaacaagaagaggagctgctggagagcctggatgtgtacgagctgttcctccacttctccagtctgcatgtgctgcgggcggtggagccggcgctgctgcagcgctaccgggcccagacgtgcagcgcgaggctcagtgaggacctgtaccaccgctgcctccagagcgtgcttgagggcctcggctcccgaacccagctggccatgctactctttgaacaggagcagggcaacagcacctgaccccaccctgtccccgtgggccgtggcatggccacaccccaccccacttctcccccaaaaccagagccacctgccagcctcgctgggcagggctggccgtagccagaccccaagctggcccactggtcccctctctggctctgtgggtccctgggctctggacaagcactgggggacgtgcccccagagccacccacttctcatcccaaacccagtttccctgccccctgacgctgctgattcgggctgtggcctccacgtatttatgcagtacagtctgcctgacgccagccctgcctctgggccctgggggctgggctgtagaagagttgttggggaaggagggagctgaggagggggcatctcccaacttctcccttttggaccctgccgaagctccctgcctttaataaactggccaagtgtgga

SEQ ID NO: 379460 - DNA, 997 bp, Homo sapiens
cgctggacacactgttcctgcgggtgcttcttggagaagtagatccatgaggcacccgctggacacactgttcctgctggccgggccagacacggtgctcacgcctgacttcctgaaccgctgccgcatgcatgccatctccggctggcaggccttctttcccatgcatttccaagccttccacccagctgtggccccaccacaagggcctgggcccccagagctgggccgtgacactggccgctttgatcgccaggcagccagcgaggcctgcttctacaactccgactacgtggcagcccgtgggcgcctggcggcagcctcagaacaagaagaggagctgctggagagcctggatgtgtacgagctgttcctccacttctccagtctgcatgtgctgcgggcggtggagccggcgctgctgcagcgctaccgggcccagacgtgcagcgcgaggctcagtgaggacctgtaccaccgctgcctccagagcgtgcttgagggcctcggctcccgaacccagctggccatgctactctttgaacaggagcagggcaacagcacctgaccccaccctgtccccgtgggccgtggcatggccacaccccaccccacttctcccccaaaaccagagccacctgccagcctcgctgggcagggctggccgtagccagaccccaagctggcccactggtcccctctctggctctgtgggtccctgggctctggacaagcactgggggacgtgcccccagagccacccacttctcatcccaaacccagtttccctgccccctgacgctgctgattcgggctgtggcctccacgtatttatgcagtacagtctgcctgacgccagccctgcctctgggccctgggggctgggctgtagaagagttgttggggaaggagggagctgaggagggggcatctcccaacttctcccttttggaccctgccgaagctccctgcctttaataaactggccaagtgtgga

SEQ ID NO: 379461 - DNA, 3052 bp, Homo sapiens
ccccaccccgggggcggggcccttgcagtgacacgtcggacagctgcggccgcggctgaggctccagtgccgagcgcaagaaccctgcgcagcccagagcagctgctggaggggaatcgaggcgcggctccggggattcggctcgggccgctggctctgctctgcggggagggagcgggcccgcccgcggggcccgagccctccggatccgccccctccccggtcccgccccctcggagactcctctggctgctctgggggttcgccggggccggggacccgcggtccgggcgccatgcgggcatcgctgctgctgtcggtgctgcggcccgcagggcccgtggccgtgggcatctccctgggcttcaccctgagcctgctcagcgtcacctgggtggaggagccgtgcggcccaggcccgccccaacctggagactctgagctgccgccgcgcggcaacaccaacgcggcgcgccggcccaactcggtgcagcccggagcggagcgcgagaagcccggggccggcgaaggcgccggggagaattgggagccgcgcgtcttgccctaccaccctgcacagcccggccaggccgccaaaaaggccgtcaggacccgctacatcagcacggagctgggcatcaggcagaggctgctggtggcggtgctgacctctcagaccacgctgcccacgctgggcgtggccgtgaaccgcacgctggggcaccggctggagcgtgtggtgttcctgacgggcgcacggggccgccgggccccacctggcatggcagtggtgacgctgggcgaggagcgacccattggacacctgcacctggcgctgcgccacctgctggagcagcacggcgacgactttgactggttcttcctggtgcctgacaccacctacaccgaggcgcacggcctggcacgcctaactggccacctcagcctggcctccgccgcccacctgtacctgggccggccccaggacttcatcggcggagagcccacccccggccgctactgccacggaggctttggggtgctgctgtcgcgcatgctgctgcaacaactgcgcccccacctggaaggctgccgcaacgacatcgtcagtgcgcgccctgacgagtggctgggtcgctgcattctcgatgccaccggggtgggctgcactggtgaccacgagggggtgcactatagccatctggagctgagccctggggagccagtgcaggagggggaccctcatttccgaagtgccctgacagcccaccctgtgcgtgaccctgtgcacatgtaccagctgcacaaagctttcgcccgagctgaactggaacgcacgtaccaggagatccaggagttacagtgggagatccagaataccagccatctggccgttgatggggaccgggcagctgcttggcccgtgggtattccagcaccatcccgcccggcctcccgctttgaggtgctgcgctgggactacttcacggagcagcacgctttctcctgcgccgatggctcaccccgctgcccactgcgtggggctgaccgggctgatgtggccgatgttctggggacagctctagaggagctgaaccgccgctaccacccggccttgcggctccagaagcagcagctggtgaatggctaccgacgctttgatccggcccggggtatggaatacacgctggacttgcagctggaggcactgaccccccagggaggccgccggcccctcactcgccgagtgcagctgctccggccgctgagccgcgtggagatcttgcctgtgccctatgtcactgaggcctcacgtctcactgtgctgctgcctctagctgcggctgagcgtgacctggcccctggcttcttggaggcctttgccactgcagcactggagcctggtgatgctgcggcagccctgaccctgctgctactgtatgagccgcgccaggcccagcgcgtggcccatgcagatgtcttcgcacctgtcaaggcccacgtggcagagctggagcggcgtttccccggtgcccgggtgccatggctcagtgtgcagacagccgcaccctcaccactgcgcctcatggatctactctccaagaagcacccgctggacacactgttcctgctggccgggccagacacggtgctcacgcctgacttcctgaaccgctgccgcatgcatgccatctccggctggcaggccttctttcccatgcatttccaagccttccacccagctgtggccccaccacaagggcctgggcccccagagctgggccgtgacactggccgctttgatcgccaggcagccagcgaggcctgcttctacaactccgactacgtggcagcccgtgggcgcctggcggcagcctcagaacaagaagaggagctgctggagagcctggatgtgtacgagctgttcctccacttctccagtctgcatgtgctgcgggcggtggagccggcgctgctgcagcgctaccgggcccagacgtgcagcgcgaggctcagtgaggacctgtaccaccgctgcctccagagcgtgcttgagggcctcggctcccgaacccagctggccatgctactctttgaacaggagcagggcaacagcacctgaccccaccctgtccccgtgggccgtggcatggccacaccccaccccacttctcccccaaaaccagagccacctgccagcctcgctgggcagggctggccgtagccagaccccaagctggcccactggtcccctctctggctctgtgggtccctgggctctggacaagcactgggggacgtgcccccagagccacccacttctcatcccaaacccagtttccctgccccctgacgctgctgattcgggctgtggcctccacgtatttatgcagtacagtctgcctgacgccagccctgcctctgggccctgggggctgggctgtagaagagttgttggggaaggagggagctgaggagggggcatctcccaacttctcccttttggaccctgccgaagctccctgcctttaataaactggccaagtgtgga

SEQ ID NO: 379462 - DNA, 3236 bp, Homo sapiens
ccccaccccgggggcggggcccttgcagtgacacgtcggacagctgcggccgcggctgaggctccagtgccgagcgcaagaaccctgcgcagcccagagcagctgctggaggggaatcgaggcgcggctccggggattcggctcgggccgctggctctgctctgcggggagggagcgggcccgcccgcggggcccgagccctccggatccgccccctccccggtcccgccccctcggagactcctctggctgctctgggggttcgccggggccggggacccgcggtccgggcgccatgcgggcatcgctgctgctgtcggtgctgcggcccgcagggcccgtggccgtgggcatctccctgggcttcaccctgagcctgctcagcgtcacctgggtggaggagccgtgcggcccaggcccgccccaacctggagactctgagctgccgccgcgcggcaacaccaacgcggcgcgccggcccaactcggtgcagcccggagcggagcgcgagaagcccggggccggcgaaggcgccggggagaattgggagccgcgcgtcttgccctaccaccctgcacagcccggccaggccgccaaaaaggccgtcaggacccgctacatcagcacggagctgggcatcaggcagaggctgctggtggcggtgctgacctctcagaccacgctgcccacgctgggcgtggccgtgaaccgcacgctggggcaccggctggagcgtgtggtgttcctgacgggcgcacggggccgccgggccccacctggcatggcagtggtgacgctgggcgaggagcgacccattggacacctgcacctggcgctgcgccacctgctggagcagcacggcgacgactttgactggttcttcctggtgcctgacaccacctacaccgaggcgcacggcctggcacgcctaactggccacctcagcctggcctccgccgcccacctgtacctgggccggccccaggacttcatcggcggagagcccacccccggccgctactgccacggaggctttggggtgctgctgtcgcgcatgctgctgcaacaactgcgcccccacctggaaggctgccgcaacgacatcgtcagtgcgcgccctgacgagtggctgggtcgctgcattctcgatgccaccggggtgggctgcactggtgaccacgagggggtgcactatagccatctggagctgagccctggggagccagtgcaggagggggaccctcatttccgaagtgccctgacagcccaccctgtgcgtgaccctgtgcacatgtaccagctgcacaaagctttcgcccgagctgaactggaacgcacgtaccaggagatccaggagttacagtgggagatccagaataccagccatctggccgttgatggggaccgggcagctgcttggcccgtgggtattccagcaccatcccgcccggcctcccgctttgaggtgctgcgctgggactacttcacggagcagcacgctttctcctgcgccgatggctcaccccgctgcccactgcgtggggctgaccgggctgatgtggccgatgttctggggacagctctagaggagctgaaccgccgctaccacccggccttgcggctccagaagcagcagctggtgaatggctaccgacgctttgatccggcccggggtatggaatacacgctggacttgcagctggaggcactgaccccccagggaggccgccggcccctcactcgccgagtgcagctgctccggccgctgagccgcgtggagatcttgcctgtgccctatgtcactgaggcctcacgtctcactgtgctgctgcctctagctgcggctgagcgtgacctggcccctggcttcttggaggcctttgccactgcagcactggagcctggtgatgctgcggcagccctgaccctgctgctactgtatgagccgcgccaggcccagcgcgtggcccatgcagatgtcttcgcacctgtcaaggcccacgtggcagagctggagcggcgtttccccggtgcccgggtgccatggctcagtgtgcagacagccgcaccctcaccactgcgcctcatggatctactctccaagaagcacccgctggacacactgttcctgctggccgggccagacacggtgctcacgcctgacttcctgaaccgctgccgcatgcatgccatctccggctggcaggccttctttcccatgcatttccaagccttccacccagctgtggccccaccacaagggcctgggcccccagagctgggccgtgacactggccgctttgatcgccaggcagccagcgaggcctgcttctacaactccgactacgtggcagcccgtgggcgcctggcggcagcctcagaacaagaagaggagctgctggagagcctggatgtgtacgagctgttcctccacttctccagtctgcatgtgctgcgggcggtggagccggcgctgctgcagcgctaccgggcccagacgtgcagcgcgaggctcagtgaggacctgtaccaccgctgcctccagagcgtgcttgagggcctcggctcccgaacccagctggccatgctactctttgaacaggagcagggcaacagcacctgaccccaccctgtccccgtgggccgtggcatggccacaccccaccccacttctcccccaaaaccagagccacctgccagcctcgctgggcagggctggccgtagccagaccccaagctggcccactggtcccctctctggctctgtgggtccctgggctctggacaagcactgggggacgtgcccccagagccacccacttctcatcccaaacccagtttccctgccccctgacgctgctgattcgggctgtggcctccacgtatttatgcagtacagtctgcctgacgccagccctgcctctgggccctgggggctgggctgtagaagagttgttggggaaggagggagctgaggagggggcatctcccaacttctcccttttggaccctgccgaagctccctgcctttaataaactggccaagtgtggacttgtgattcagaggttttgaaagggtaggcaggcgtgggggagggaggactggctgagcaccacaggctcccctgcccctgctggggcctgcctttcctttcacccgggaccaagtcatgcatgtgcccagcctcaccccggcccccagtgcgtgcttggtcacacatacacacagagaattc

SEQ ID NO: 379463 - DNA, 2064 bp, Homo sapiens
gctcgtgaaatgggcatgcgtcctgtctcagagctgtccaagggctaaaataataactaacatcaaacgcctattatgtacaaggctccctgattttttctaatccttgtaacaaccccgagcaataattatttccattggcacaacggaagacaatgccagctcatcacagatcccttcccttcctctccccagggggtgcactatagccatctggagctgagccctggggagccagtgcaggagggggaccctcatttccgaagtgccctgacagcccaccctgtgcgtgaccctgtgcacatgtaccagctgcacaaagctttcgcccgagctgaactggaacgcacgtaccaggagatccaggagttacagtgggagatccagaataccagccatctggccgttgatggggaccgggcagctgcttggcccgtgggtattccagcaccatcccgcccggcctcccgctttgaggtgctgcgctgggactacttcacggagcagcacgctttctcctgcgccgatggctcaccccgctgcccactgcgtggggctgaccgggctgatgtggccgatgttctggggacagctctagaggagctgaaccgccgctaccacccggccttgcggctccagaagcagcagctggtgaatggctaccgacgctttgatccggcccggggtatggaatacacgctggacttgcagctggaggcactgaccccccagggaggccgccggcccctcactcgccgagtgcagctgctccggccgctgagccgcgtggagatcttgcctgtgccctatgtcactgaggcctcacgtctcactgtgctgctgcctctagctgcggctgagcgtgacctggcccctggcttcttggaggcctttgccactgcagcactggagcctggtgatgctgcggcagccctgaccctgctgctactgtatgagccgcgccaggcccagcgcgtggcccatgcagatgtcttcgcacctgtcaaggcccacgtggcagagctggagcggcgtttccccggtgcccgggtgccatggctcagtgtgcagacagccgcaccctcaccactgcgcctcatggatctactctccaagaagcacccgctggacacactgttcctgctggccgggccagacacggtgctcacgcctgacttcctgaaccgctgccgcatgcatgccatctccggctggcaggccttctttcccatgcatttccaagccttccacccagctgtggccccaccacaagggcctgggcccccagagctgggccgtgacactggccgctttgatcgccaggcagccagcgaggcctgcttctacaactccgactacgtggcagcccgtgggcgcctggcggcagcctcagaacaagaagaggagctgctggagagcctggatgtgtacgagctgttcctccacttctccagtctgcatgtgctgcgggcggtggagccggcgctgctgcagcgctaccgggcccagacgtgcagcgcgaggctcagtgaggacctgtaccaccgctgcctccagagcgtgcttgagggcctcggctcccgaacccagctggccatgctactctttgaacaggagcagggcaacagcacctgaccccaccctgtccccgtgggccgtggcatggccacaccccaccccacttctcccccaaaaccagagccacctgccagcctcgctgggcagggctggccgtagccagaccccaagctggcccactggtcccctctctggctctgtgggtccctgggctctggacaagcactgggggacgtgcccccagagccacccacttctcatcccaaacccagtttccctgccccctgacgctgctgattcgggctgtggcctccacgtatttatgcagtacagtctgcctgacgccagccctgcctctgggccctgggggctgggctgtagaagagttgttggggaaggagggagctgaggagggggcatctcccaacttctcccttttggaccctgccgaagctccctgcctttaataaactggccaagtgtgga

SEQ ID NO: 379464 - DNA, 3394 bp, Homo sapiens
ccccaccccgggggcggggcccttgcagtgacacgtcggacagctgcggccgcggctgaggctccagtgccgagcgcaagaaccctgcgcagcccagagcagctgctggaggggaatcgaggcgcggctccggggattcggctcgggccgctggctctgctctgcggggagggagcgggcccgcccgcggggcccgagccctccggatccgccccctccccggtcccgccccctcggagactcctctggctgctctgggggttcgccggggccggggacccgcggtccgggcgccatgcgggcatcgctgctgctgtcggtgctgcggcccgcagggcccgtggccgtgggcatctccctgggcttcaccctgagcctgctcagcgtcacctgggtggaggagccgtgcggcccaggcccgccccaacctggagactctgagctgccgccgcgcggcaacaccaacgcggcgcgccggcccaactcggtgcagcccggagcggagcgcgagaagcccggggccggcgaaggcgccggggagaattgggagccgcgcgtcttgccctaccaccctgcacagcccggccaggccgccaaaaaggccgtcaggacccgctacatcagcacggagctgggcatcaggcagaggctgctggtggcggtgctgacctctcagaccacgctgcccacgctgggcgtggccgtgaaccgcacgctggggcaccggctggagcgtgtggtgttcctgacgggcgcacggggccgccgggccccacctggcatggcagtggtgacgctgggcgaggagcgacccattggacacctgcacctggcgctgcgccacctgctggagcagcacggcgacgactttgactggttcttcctggtgcctgacaccacctacaccgaggcgcacggcctggcacgcctaactggccacctcagcctggcctccgccgcccacctgtacctgggccggccccaggacttcatcggcggagagcccacccccggccgctactgccacggaggctttggggtgctgctgtcgcgcatgctgctgcaacaactgcgcccccacctggaaggctgccgcaacgacatcgtcagtgcgcgccctgacgagtggctgggtcgctgcattctcgatgccaccggggtgggctgcactggtgaccacgagggggtgcactatagccatctggagctgagccctggggagccagtgcaggagggggaccctcatttccgaagtgccctgacagcccaccctgtgcgtgaccctgtgcacatgtaccagctgcacaaagctttcgcccgagctgaactggaacgcacgtaccaggagatccaggagttacagtgggagatccagaataccagccatctggccgttgatggggaccgggcagctgcttggcccgtgggtattccagcaccatcccgcccggcctcccgctttgaggtgctgcgctgggactacttcacggagcagcacgctttctcctgcgccgatggctcaccccgctgcccactgcgtggggctgaccgggctgatgtggccgatgttctggggacagctctagaggagctgaaccgccgctaccacccggccttgcggctccagaagcagcagctggtgaatggctaccgacgctttgatccggcccggggtatggaatacacgctggacttgcagctggaggcactgaccccccagggaggccgccggcccctcactcgccgagtgcagctgctccggccgctgagccgcgtggagatcttgcctgtgccctatgtcactgaggcctcacgtctcactgtgctgctgcctctagctgcggctgagcgtgacctggcccctggcttcttggaggcctttgccactgcagcactggagcctggtgatgctgcggcagccctgaccctgctgctactgtatgagccgcgccaggcccagcgcgtggcccatgcagatgtcttcgcacctgtcaaggcccacgtggcagagctggagcggcgtttccccggtgcccgggtgccatggctcagtgtgcagacagccgcaccctcaccactgcgcctcatggatctactctccaagaagcacccgctggacacactgttcctgctggccgggccagacacggtgctcacgcctgacttcctgaaccgctgccgcatgcatgccatctccggctggcaggccttctttcccatgcatttccaagccttccacccagctgtggccccaccacaagggcctgggcccccagagctgggccgtgacactggccgctttgatcgccaggcagccagcgaggcctgcttctacaactccgactacgtggcagcccgtgggcgcctggcggcagcctcagaacaagaagaggagctgctggagagcctggatgtgtacgagctgttcctccacttctccagtctgcatgtgctgcgggcggtggagccggcgctgctgcagcgctaccgggcccagacgtgcagcgcgaggctcagtgaggacctgtaccaccgctgcctccagagcgtgcttgagggcctcggctcccgaacccagctggccatgctactctttgaacaggagcagggcaacagcacctgaccccaccctgtccccgtgggccgtggcatggccacaccccaccccacttctcccccaaaaccagagccacctgccagcctcgctgggcagggctggccgtagccagaccccaagctggcccactggtcccctctctggctctgtgggtccctgggctctggacaagcactgggggacgtgcccccagagccacccacttctcatcccaaacccagtttccctgccccctgacgctgctgattcgggctgtggcctccacgtatttatgcagtacagtctgcctgacgccagccctgcctctgggccctgggggctgggctgtagaagagttgttggggaaggagggagctgaggagggggcatctcccaacttctcccttttggaccctgccgaagctccctgcctttaataaactggccaagtgtggaaaaaaaaaaaaaaaaaaaaaaaaaaaaaaaaaaaaaaaaaaaaaaaaaaaaaaaaaaaaaaaaaaaaaaaaaaaaaaaaaaaaaaaaaaacaaaaaaaaaaaaaaaaaaaaaaaaaaaaaaaaaaaaaaaaacaaaacacacaacaacaaaaaaaaaaaaaaaaaaaaaaaaaaaagaaggagagcgccgcgcggcgcgcgcgcggggcgccaacgaaaaaaaacgaggaagacccggggcggggggggcggaggcgacgagaggagagaggagaggaaggagggcagacacagacgaaggaaaagagggcgggggggggggggggggaggggaaaagaaac

SEQ ID NO: 379465 - DNA, 1734 bp, Homo sapiens
  misc_feature (6)..(6): n is a, c, g, or t
  misc_feature (26)..(26): n is a, c, g, or t
actctngagggtccacggcacgcggncagagatccaggagttcagtgggagatccagaataccagccatctggccgttgatggggaccgggcagctgcttggcccgtgggtattccagcaccatcccgcccggcctcccgctttgaggtgctgcgctgggactacttcacggagcagcacgctttctcctgcgccgatggctcaccccgctgcccactgcgtggggctgaccgggctgatgtggccgatgttctggggacagctctagaggagctgaaccgccgctaccacccggccttgcggctccagaagcagcagctggtgaatggctaccgacgctttgatccggcccggggtatggaatacacgctggacttgcagctggaggcactgaccccccagggaggccgccggcccctcactcgccgagtgcagctgctccggccgctgagccgcgtggagatcttgcctgtgccctatgtcactgaggcctcacgtctcactgtgctgctgcctctagctgcggctgagcgtgacctggcccctggcttcttggaggcctttgccactgcagcactggagcctggtgatgctgcggcagccctgaccctgctgctactgtatgagccgcgccaggcccagcgcgtggcccatgcagatgtcttcgcacctgtcaaggcccacgtggcagagctggagcggcgtttccccggtgcccgggtgccatggctcagtgtgcagacagccgcaccctcaccactgcgcctcatggatctactctccaagaagcacccgctggacacactgttcctgctggccgggccagacacggtgctcacgcctgacttcctgaaccgctgccgcatgcatgccatctccggctggcaggccttctttcccatgcatttccaagccttccacccagctgtggccccaccacaagggcctgggcccccagagctgggccgtgacactggccgctttgatcgccaggcagccagcgaggcctgcttctacaactccgactacgtggcagcccgtgggcgcctggcggcagcctcagaacaagaagaggagctgctggagagcctggatgtgtacgagctgttcctccacttctccagtctgcatgtgctgcgggcggtggagccggcgctgctgcagcgctaccgggcccagacgtgcagcgcgaggctcagtgaggacctgtaccaccgctgcctccagagcgtgcttgagggcctcggctcccgaacccagctggccatgctactctttgaacaggagcagggcaacagcacctgaccccaccctgtccccgtgggccgtggcatggccacaccccaccccacttctcccccaaaaccagagccacctgccagcctcgctgggcagggctggccgtagccagaccccaagctggcccactggtcccctctctggctctgtgggtccctgggctctggacaagcactgggggacgtgcccccagagccacccacttctcatcccaaacccagtttccctgccccctgacgctgctgattcgggctgtggcctccacgtatttatgcagtacagtctgcctgacgccagccctgcctctgggccctgggggctgggctgtagaagagttgttggggaaggagggagctgaggagggggcatctcccaacttctcccttttggaccctgccgaagctccctgcctttaataaactggccaagtgtgga

SEQ ID NO: 379466 - DNA, 2974 bp, Homo sapiens
ccccaccccgggggcggggcccttgcagtgacacgtcggacagctgcggccgcggctgaggctccagtgccgagcgcaagaaccctgcgcagcccagagcagctgctggaggggaatcgaggcgcggctccggggattcggctcgggccgctggctctgctctgcggggagggagcgggcccgcccgcggggcccgagccctccggatccgccccctccccggtcccgccccctcggagactcctctggctgctctgggggttcgccggggccggggacccgcggtccgggcgccatgcgggcatcgctgctgctgtcggtgctgcggcccgcagggcccgtggccgtgggcatctccctgggcttcaccctgagcctgctcagcgtcacctgggtggaggagccgtgcggcccaggcccgccccaacctggagactctgagctgccgccgcgcggcaacaccaacgcggcgcgccggcccaactcggtgcagcccggagcggagcgcgagaagcccggggccggcgaaggcgccggggagaattgggagccgcgcgtcttgccctaccaccctgcacagcccggccaggccgccaaaaaggccgtcaggacccgctacatcagcacggagctgggcatcaggcagaggctgctggtggcggtgctgacctctcagaccacgctgcccacgctgggcgtggccgtgaaccgcacgctggggcaccggctggagcgtgtggtgttcctgacgggcgcacggggccgccgggccccacctggcatggcagtggtgacgctgggcgaggagcgacccattggacacctgcacctggcgctgcgccacctgctggagcagcacggcgacgactttgactggttcttcctggtgcctgacaccacctacaccgaggcgcacggcctggcacgcctaactggccacctcagcctggcctccgccgcccacctgtacctgggccggccccaggacttcatcggcggagagcccacccccggccgctactgccacggaggctttggggtgctgctgtcgcgcatgctgctgcaacaactgcgcccccacctggaaggctgccgcaacgacatcgtcagtgcgcgccctgacgagtggctgggtcgctgcattctcgatgccaccggggtgggctgcactggtgaccacgagggggtgcactatagccatctggagctgagccctggggagccagtgcaggagggggaccctcatttccgaagtgccctgacagcccaccctgtgcgtgaccctgtgcacatgtaccagctgcacaaagctttcgcccgagctgaactggaacgcacgtaccaggagatccaggagttacagtgggagatccagaataccagccatctggccgttgatggggaccgggcagctgcttggcccgtgggtattccagcaccatcccgcccggcctcccgctttgaggtgctgcgctgggactacttcacggagcagcacgctttctcctgcgccgatggctcaccccgctgcccactgcgtggggctgaccgggctgatgtggccgatgttctggggacagctctagaggagctgaaccgccgctaccacccggccttgcggctccagaagcagcagctggtgaatggctaccgacgctttgatccggcccggggtatggaatacacgctggacttgcagctggaggcactgaccccccagggaggccgccggcccctcactcgccgagtgcagctgctccggccgctgagccgcgtggagatcttgcctgtgccctatgtcactgaggcctcacgtctcactgtgctgctgcctctagctgcggctgagcgtgacctggcccctggcttcttggaggcctttgccactgcagcactggagcctggtgatgctgcggcagccctgaccctgctgctactgtatgagccgcgccaggcccagcgcgtggcccatgcagatgtcttcgcacctgtcaaggcccacgtggcagagctggagcggcgtttccccggtgcccgggtgccatggctcagtgtgcagacagccgcaccctcaccactgcgcctcatggatctactctccaagaagcacccgctggacacactgttcctgctggccgggccagacacggtgctcacgcctgacttcctgaaccgctgccgcatgcatgccatctccggctggcaggccttctttcccatgcatttccaagccttccacccagctgtggccccaccacaagggcctgggcccccagagctgggccgtgacactggccgctttgatcgccaggcagccagcgaggcctgcttctacaactccgactacgtggcagcccgtgggcgcctggcggcagcctcagaacaagaagaggagctgctggagagcctggatgtgtacgagctgttcctccacttctccagtctgcatgtgctgcgggcggtggagccggcgctgctgcagcgctaccgggcccagacgtgcagcgcgaggctcagtgaggacctgtaccaccgctgcctccagagcgtgcttgagggcctcggctcccgaacccagctggccatgctactctttgaacaggagcagggcaacagcacctgaccccaccctgtccccgtgggccgtggcatggccacaccccaccccacttctcccccaaaaccagagccacctgccagcctcgctgggcagggctggccgtagccagaccccaagctggcccactggtcccctctctggctctgtgggtccctgggctctggacaagcactgggggacgtgcccccagagccacccacttctcatcccaaacccagtttccctgcccccctgggggctgggctgtagaagagttgttggggaaggagggagctgaggagggggcatctcccaacttctcccttttggaccctgccgaagctccctgcctttaataaactggccaagtgtgga

SEQ ID NO: 379467 - DNA, 1347 bp, Homo sapiens
ccccaccccgggggcggggcccttgcagtgacacgtcggacagctgcggccgcggctgaggctccagtgccgagcgcaagaaccctgcgcagcccagagcagctgctggaggggaatcgaggcgcggctccggggattcggctcgggccgctggctctgctctgcggggagggagcgggcccgcccgcggggcccgagccctccggatccgccccctccccggtcccgccccctcggagactcctctggctgctctgggggttcgccggggccggggacccgcggtccgggcgccatgcgggcatcgctgctgctgtcggtgctgcggcccgcagggcccgtggccgtgggcatctccctgggcttcaccctgagcctgctcagcgtcacctgggtggaggagccgtgcggcccaggcccgccccaacctggagactctgagctgccgccgcgcggcaacaccaacgcggcgcgccggcccaactcggtgcagcccggagcggagcgcgagaagcccggggccggcgaaggcgccggggagaattgggagccgcgcgtcttgccctaccaccctgcacagcccggccaggccgccaaaaaggccgtcaggacccgctacatcagcacggagctgggcatcaggcagaggctgctggtggcggtgctgacctctcagaccacgctgcccacgctgggcgtggccgtgaaccgcacgctggggcaccggctggagcgtgtggtgttcctgacgggcgcacggggccgccgggccccacctggcatggcagtggtgacgctgggcgaggagcgacccattggacacctgcacctggcgctgcgccacctgctggagcagcacggcgacgactttgactggttcttcctggtgcctgacaccacctacaccgaggcgcacggcctggcacgcctaactggccacctcagcctggcctccgccgcccacctgtacctgggccggccccaggacttcatcggcggagagcccacccccggccgctactgccacggaggctttggggtgctgctgtcgcgcatgctgctgcaacaactgcgcccccacctggaaggctgccgcaacgacatcgtcagtgcgcgccctgacgagtggctgggtcgctgcattctcgatgccaccggggtgggctgcactggtgaccacgaggtgggatgataagctatcccactgatacctccttgtcatgttcaaatccctctgagaggcaaagggatgttggagatacaggtctgcttttccatgccaattcggacatttattttctatctctgtgacccccagtaaattactaaatatcctgggcttcagta

SEQ ID NO: 379468 - DNA, 976 bp, Homo sapiens
  misc_feature (12)..(12): n is a, c, g, or t
  misc_feature (899)..(899): n is a, c, g, or t
  misc_feature (902)..(902): n is a, c, g, or t
  misc_feature (904)..(904): n is a, c, g, or t
  misc_feature (908)..(908): n is a, c, g, or t
  misc_feature (915)..(915): n is a, c, g, or t
  misc_feature (924)..(924): n is a, c, g, or t
  misc_feature (935)..(935): n is a, c, g, or t
  misc_feature (938)..(938): n is a, c, g, or t
ggccaaagagcnccaactaggctaggtacgaggctcgggtgaatcggccgagggcagcctctagaacgagctggaggattctgcctaccgatacagagccttcgagtcgtccggggccgccattacaatccacctccatccgcttggaaatggccttcgtcccggcctatgactggtcccagcgggcagtacagaccccctagaagcccctggagctcccctttttcgggccccgcccaatcctcggagtctgtccaccccctctactccgccctcaagaggatttcaaagatggaggcggcggctccctaaaccacttttcgtgttcatccgcctccatccgagatcgaaacgggacctcgtcggccccgtaggggcccgacaagaagagggaatccctgcagaccaacagcgggctatattgacgacggtgtctgagatcggggaccgtcttttgaagagtcagtccctccttagttgcccgcctcagctgaggccgccgccattttcttgctgtccgccgtctgcagagcgcgccaagctgcccggagctctccgagaggccccaaagagactgctttcgtgccggccaggcagggggtttgtcgcctggaggcccaagaggaacggcctccccccaacttagcgggttatgctggaccgggcggtgaggggaaccgaggccacccggactttccgcggctgagggcagcgccggttccttgcggtcaagatgctgcaaaacgtgactccccacaataagctccctggggaagggaatgcagggttgctggggctgggcccagaagcagcagcaccagggaaaaggattcgaaaaccctctctcttgtatgagggctttgagagccccatggttcggctgcgttgggattaactgnacncnccgnggtcacncaagccggngtcccggcccnccngggtgaggcctgggaacctctggccgcctgttttgcgg

SEQ ID NO: 379469 - DNA, 4919 bp, Homo sapiens
ggcgagtgggggggacagagtccaggactgcgggataggaagctggggatatggacaagcagcagcgttatagcgctctgggtttcgggacataggcctgggccatgcggcccccttggccccttggcgcgacccccaggaacgttcggaaagctggtcctcgtggctgggggaaaggcggggggtgggggggaagcgggcacgtgaccccggtcagccaatctgggtgctgctgacgtggccgcgcggccccgatgctctccccacccccccagcccgttccggaagggaggggctgggggctacgccccctcccccagcacggcttcgttttctgggggggggttgacaccccggattacataccccgtaccaagccgagggcaactttggaggccccctggaaggctttaggatccagattcttcgctgctgctgccttaccgccgagaaccaccacccgccaggcgtcttgcggccacacccctggcgggttcaggcaggctacgcccacgcgacccctcccgtttccctgctttggccaatggaggagctacgaatggcacgacctgctcgagcttggcagtctccagttgggctgtgcatggaagcttgggaagactttgttggaaggggaggcggggagagagtgctggaggctctggggcgatggcttccgcacctcttccaaccaccctctttccctggagtcggcggaccacagctcagccaattggcttggagatgtggcgggttgccacttccctgtgggtctctgcggcactcttctgcctggtgactgacaccttggaaatgaagtttatgacgtcatcgttgcggctggccaatagaaaaagctcccgcggagaggtgttccttccccttcgactcagcttcttcacccgcgtgagcgagcgcgcgcgcgcggagggggtggggaaaatctcaagcagggtggcgcgcatgagcggcgaagctcctcctccccgcctatatataaagggctggcgcggggctcggcggcgccatttcgtgctggagtggagcagcctctagaacgagctggaggattctgcctaccgatacagagccttcgagtcgtccggggccgccattacaatccacctccatccgcttggaaatggccttcgtcccggcctatgactggtcccagcgggcagtacagaccccctagaagcccctggagctcccctttttcgggccccgcccaatcctcggagtctgtccaccccctctactccgccctcaagaggatttcaaagatggaggcggcggctccctaaaccacttttcgtgttcatccgcctccatccgagatcgaaacgggacctcgtcggccccgtaggggcccgacaagaagagggaatccctgcagaccaacagcgggctatattgacgacggtgtctgagatcggggaccgtcttttgaagagtcagtccctccttagttgcccgcctcagctgaggccgccgccattttcttgctgtccgccgtctgcagagcgcgccaagctgcccggagctctccgagaggccccaaagagactgctttcgtgccggccaggcagggggtttgtcgcctggaggcccaagaggaacggcctccccccaacttagcgggttatgctggaccgggcggtgaggggaaccgaggccacccggactttccgcggctgagggcagcgccggttccttgcggtcaagatgctgcaaaacgtgactccccacaataagctccctggggaagggaatgcagggttgctggggctgggcccagaagcagcagcaccagggaaaaggattcgaaaaccctctctcttgtatgagggctttgagagccccacaatggcttcggtgcctgctttgcaacttacccctgccaacccaccacccccggaggtgtccaatcccaaaaagccaggacgagttaccaaccagctgcaatacctacacaaggtagtgatgaaggctctgtggaaacatcagttcgcatggccattccggcagcctgtggatgctgtcaaactgggtctaccggattatcacaaaattataaaacagcctatggacatgggtactattaagaggagacttgaaaacaattattattgggctgcttcagagtgtatgcaagattttaataccatgttcaccaactgttacatttacaacaagcccactgatgatattgtcctaatggcacaaacgctggaaaagatattcctacagaaggttgcatcaatgccacaagaagaacaagagctggtagtgaccatccctaagaacagccacaagaagggggccaagttggcagcgctccagggcagtgttaccagtgcccatcaggtgcctgccgtctcttctgtgtcacacacagccctgtatactcctccacctgagatacctaccactgtcctcaacattccccacccatcagtcatttcctctccacttctcaagtccttgcactctgctggacccccgctccttgctgttactgcagctcctccagcccagccccttgccaagaaaaaaggcgtaaagcggaaagcagatactaccacccctacacctacagccatcttggctcctggttctccagctagccctcctgggagtcttgagcctaaggcagcacggcttccccctatgcgtagagagagtggtcgccccatcaagcccccacgcaaagacttgcctgactctcagcaacaacaccagagctctaagaaaggaaagctttcagaacagttaaaacattgcaatggcattttgaaggagttactctctaagaagcatgctgcctatgcttggcctttctataaaccagtggatgcttctgcacttggcctgcatgactaccatgacatcattaagcaccccatggacctcagcactgtcaagcggaagatggagaaccgtgattaccgggatgcacaggagtttgctgctgatgtacggcttatgttctccaactgctataagtacaatcccccagatcacgatgttgtggcaatggcacgaaagctacaggatgtatttgagttccgttatgccaagatgccagatgaaccactagaaccagggcctttaccagtctctactgccatgccccctggcttggccaaatcgtcttcagagtcctccagtgaggaaagtagcagtgagagctcctctgaggaagaggaggaggaagatgaggaggacgaggaggaagaagagagtgaaagctcagactcagaggaagaaagggctcatcgcttagcagaactacaggaacagcttcgggcagtacatgaacaactggctgctctgtcccagggtccaatatccaagcccaagaggaaaagagagaaaaaagagaaaaagaagaaacggaaggcagagaagcatcgaggccgagctggggccgatgaagatgacaaggggcctagggcaccccgcccacctcaacctaagaagtccaagaaagcaagtggcagtgggggtggcagtgctgctttaggcccttctggctttggaccttctggaggaagtggcaccaagctccccaaaaaggccacaaagacagccccacctgccctgcctacaggttatgattcagaggaggaggaagagagcaggcccatgagttacgatgagaagcggcagctgagcctggacatcaacaaattacctggggagaagctgggccgagttgtgcatataatccaagccagggagccctctttacgtgattcaaacccagaagagattgagattgattttgaaacactcaagccatccacacttagagagcttgagcgctatgtcctttcctgcctacgtaagaaaccccggaagccctacaccattaagaagcctgtgggaaagacaaaggaggaactggctttggagaaaaagcgggaattagaaaagcggttacaagatgtcagcggacagctcaattctactaaaaagccccccaagaaagcgaatgagaaaacagagtcatcctctgcacagcaagtagcagtgtcacgccttagcgcttccagctccagctcagattccagctcctcctcttcctcgtcgtcgtcttcagacaccagtgattcagactcaggctaaggggtcaggccagatggggcaggaaggctccgcaggaccggacccctagaccaccctgccccacctgccccttccccctttgctgtgacacttcttcatctcacccccccctgcccccctctaggagagctggctctgcagtgggggagggatgcagggacatttactgaaggagggacatggacaaaacaacattgaattcccagccccattggggagtgatctcttggacacagagcccccattcaaaatggggcagggcaagggtgggagtgtgcaaagccctgatctggagttacctgaggccatagctgccctattcacttctaagggccctgttttgagattgtttgttctaatttattttaagctaggtaaggctggggggagggtggggccgtggtcccctcagcctccatggggagggaagaagggggagctctttttttacgttgatttttttttttctactctgttttccctttttccttccgctccatttggggccctgggggtttcagtcatctccccatttggtcccctggactgtctttgttgattctaacttgtaaataaagaaaatattattcaagttttgagttaccttaatatttgcttttgtagtgtttcaaaaggaacatcataagaattgtcttgataattttgagggaaatattactgcagtgagaaaaggcaatagctaacctataattggattgtcttaatttttaaaccagtaggcttttgctgtgtttttaataaagtaaatatgacttttgtaaattgag

SEQ ID NO: 379470 - DNA, 4754 bp, Homo sapiens
ccctggcgctgaccgatggaccagccgctccgtggggaggactccggaccctggtgggggggcgggggggttctttcgcccccgtggcggagggcccctgagaggcggatacgggtgtgcctttgggggtgatgtggcgtgtggggggaaaggtccgagctcgcctggagggggagggtttttcccttaagtcatccctcccaggacttgctttttctgctctgagccggacgccggaatggagtttgaggaagagattcttcgctgctgctgccttaccgccgagaaccaccacccgccaggcgtcttgcggccacacccctggcgggttcaggcaggctacgcccacgcgacccctcccgtttccctgctttggccaatggaggagctacgaatggcacgacctgctcgagcttggcagtctccagttgggctgtgcatggaagcttgggaagactttgttggaaggggaggcggggagagagtgctggaggctctggggcgatggcttccgcacctcttccaaccaccctctttccctggagtcggcggaccacagctcagccaattggcttggagatgtggcgggttgccacttccctgtgggtctctgcggcactcttctgcctggtgactgacaccttggaaatgaagtttatgacgtcatcgttgcggctggccaatagaaaaagctcccgcggagaggtgttccttccccttcgactcagcttcttcacccgcgtgagcgagcgcgcgcgcgcggagggggtggggaaaatctcaagcagggtggcgcgcatgagcggcgaagctcctcctccccgcctatatataaagggctggcgcggggctcggcggcgccatttcgtgctggagtggagcagcctctagaacgagctggaggattctgcctaccgatacagagccttcgagtcgtccggggccgccattacaatccacctccatccgcttggaaatggccttcgtcccggcctatgactggtcccagcgggcagtacagaccccctagaagcccctggagctcccctttttcgggccccgcccaatcctcggagtctgtccaccccctctactccgccctcaagaggatttcaaagatggaggcggcggctccctaaaccacttttcgtgttcatccgcctccatccgagatcgaaacgggacctcgtcggccccgtaggggcccgacaagaagagggaatccctgcagaccaacagcgggctatattgacgacggtgtctgagatcggggaccgtcttttgaagagtcagtccctccttagttgcccgcctcagctgaggccgccgccattttcttgctgtccgccgtctgcagagcgcgccaagctgcccggagctctccgagaggccccaaagagactgctttcgtgccggccaggcagggggtttgtcgcctggaggcccaagaggaacggcctccccccaacttagcgggttatgctggaccgggcggtgaggggaaccgaggccacccggactttccgcggctgagggcagcgccggttccttgcggtcaagatgctgcaaaacgtgactccccacaataagctccctggggaagggaatgcagggttgctggggctgggcccagaagcagcagcaccagggaaaaggattcgaaaaccctctctcttgtatgagggctttgagagccccacaatggcttcggtgcctgctttgcaacttacccctgccaacccaccacccccggaggtgtccaatcccaaaaagccaggacgagttaccaaccagctgcaatacctacacaaggtagtgatgaaggctctgtggaaacatcagttcgcatggccattccggcagcctgtggatgctgtcaaactgggtctaccggattatcacaaaattataaaacagcctatggacatgggtactattaagaggagacttgaaaacaattattattgggctgcttcagagtgtatgcaagattttaataccatgttcaccaactgttacatttacaacaagcccactgatgatattgtcctaatggcacaaacgctggaaaagatattcctacagaaggttgcatcaatgccacaagaagaacaagagctggtagtgaccatccctaagaacagccacaagaagggggccaagttggcagcgctccagggcagtgttaccagtgcccatcaggtgcctgccgtctcttctgtgtcacacacagccctgtatactcctccacctgagatacctaccactgtcctcaacattccccacccatcagtcatttcctctccacttctcaagtccttgcactctgctggacccccgctccttgctgttactgcagctcctccagcccagccccttgccaagaaaaaaggcgtaaagcggaaagcagatactaccacccctacacctacagccatcttggctcctggttctccagctagccctcctgggagtcttgagcctaaggcagcacggcttccccctatgcgtagagagagtggtcgccccatcaagcccccacgcaaagacttgcctgactctcagcaacaacaccagagctctaagaaaggaaagctttcagaacagttaaaacattgcaatggcattttgaaggagttactctctaagaagcatgctgcctatgcttggcctttctataaaccagtggatgcttctgcacttggcctgcatgactaccatgacatcattaagcaccccatggacctcagcactgtcaagcggaagatggagaaccgtgattaccgggatgcacaggagtttgctgctgatgtacggcttatgttctccaactgctataagtacaatcccccagatcacgatgttgtggcaatggcacgaaagctacaggatgtatttgagttccgttatgccaagatgccagatgaaccactagaaccagggcctttaccagtctctactgccatgccccctggcttggccaaatcgtcttcagagtcctccagtgaggaaagtagcagtgagagctcctctgaggaagaggaggaggaagatgaggaggacgaggaggaagaagagagtgaaagctcagactcagaggaagaaagggctcatcgcttagcagaactacaggaacagcttcgggcagtacatgaacaactggctgctctgtcccagggtccaatatccaagcccaagaggaaaagagagaaaaaagagaaaaagaagaaacggaaggcagagaagcatcgaggccgagctggggccgatgaagatgacaaggggcctagggcaccccgcccacctcaacctaagaagtccaagaaagcaagtggcagtgggggtggcagtgctgctttaggcccttctggctttggaccttctggaggaagtggcaccaagctccccaaaaaggccacaaagacagccccacctgccctgcctacaggttatgattcagaggaggaggaagagagcaggcccatgagttacgatgagaagcggcagctgagcctggacatcaacaaattacctggggagaagctgggccgagttgtgcatataatccaagccagggagccctctttacgtgattcaaacccagaagagattgagattgattttgaaacactcaagccatccacacttagagagcttgagcgctatgtcctttcctgcctacgtaagaaaccccggaagccctacaccattaagaagcctgtgggaaagacaaaggaggaactggctttggagaaaaagcgggaattagaaaagcggttacaagatgtcagcggacagctcaattctactaaaaagccccccaagaaagcgaatgagaaaacagagtcatcctctgcacagcaagtagcagtgtcacgccttagcgcttccagctccagctcagattccagctcctcctcttcctcgtcgtcgtcttcagacaccagtgattcagactcaggctaaggggtcaggccagatggggcaggaaggctccgcaggaccggacccctagaccaccctgccccacctgccccttccccctttgctgtgacacttcttcatctcacccccccctgcccccctctaggagagctggctctgcagtgggggagggatgcagggacatttactgaaggagggacatggacaaaacaacattgaattcccagccccattggggagtgatctcttggacacagagcccccattcaaaatggggcagggcaagggtgggagtgtgcaaagccctgatctggagttacctgaggccatagctgccctattcacttctaagggccctgttttgagattgtttgttctaatttattttaagctaggtaaggctggggggagggtggggccgtggtcccctcagcctccatggggagggaagaagggggagctctttttttacgttgatttttttttttctactctgttttccctttttccttccgctccatttggggccctgggggtttcagtcatctccccatttggtcccctggactgtctttgttgattctaacttgtaaataaagaaaatattattcaagttttgagttaccttaatatttgcttttgtagtgtttcaaaaggaacatcataagaattgtcttgataattttgagggaaatattactgcagtgagaaaaggcaatagctaacctataattggattgtcttaatttttaaaccagtaggcttttgctgtgtttttaataaagtaaatatgacttttgtaaattgag

SEQ ID NO: 379471 - DNA, 4980 bp, Homo sapiens
  misc_feature (4980)..(4980): n is a, c, g, or t
ggcgagtgggggggacagagtccaggactgcgggataggaagctggggatatggacaagcagcagcgttatagcgctctgggtttcgggacataggcctgggccatgcggcccccttggccccttggcgcgacccccaggaacgttcggaaagctggtcctcgtggctgggggaaaggcggggggtgggggggaagcgggcacgtgaccccggtcagccaatctgggtgctgctgacgtggccgcgcggccccgatgctctccccacccccccagcccgttccggaagggaggggctgggggctacgccccctcccccagcacggcttcgttttctgggggggggttgacaccccggattacataccccgtaccaagccgagggcaactttggaggccccctggaaggctttaggatccagattcttcgctgctgctgccttaccgccgagaaccaccacccgccaggcgtcttgcggccacacccctggcgggttcaggcaggctacgcccacgcgacccctcccgtttccctgctttggccaatggaggagctacgaatggcacgacctgctcgagcttggcagtctccagttgggctgtgcatggaagcttgggaagactttgttggaaggggaggcggggagagagtgctggaggctctggggcgatggcttccgcacctcttccaaccaccctctttccctggagtcggcggaccacagctcagccaattggcttggagatgtggcgggttgccacttccctgtgggtctctgcggcactcttctgcctggtgactgacaccttggaaatgaagtttatgacgtcatcgttgcggctggccaatagaaaaagctcccgcggagaggtgttccttccccttcgactcagcttcttcacccgcgtgagcgagcgcgcgcgcgcggagggggtggggaaaatctcaagcagggtggcgcgcatgagcggcgaagctcctcctccccgcctatatataaagggctggcgcggggctcggcggcgccatttcgtgctggagtggagcagcctctagaacgagctggaggattctgcctaccgatacagagccttcgagtcgtccggggccgccattacaatccacctccatccgcttggaaatggccttcgtcccggcctatgactggtcccagcgggcagtacagaccccctagaagcccctggagctcccctttttcgggccccgcccaatcctcggagtctgtccaccccctctactccgccctcaagaggatttcaaagatggaggcggcggctccctaaaccacttttcgtgttcatccgcctccatccgagatcgaaacgggacctcgtcggccccgtaggggcccgacaagaagagggaatccctgcagaccaacagcgggctatattgacgacggtgtctgagatcggggaccgtcttttgaagagtcagtccctccttagttgcccgcctcagctgaggccgccgccattttcttgctgtccgccgtctgcagagcgcgccaagctgcccggagctctccgagaggccccaaagagactgctttcgtgccggccaggcagggggtttgtcgcctggaggcccaagaggaacggcctccccccaacttagcgggttatgctggaccgggcggtgaggggaaccgaggccacccggactttccgcggctgagggcagcgccggttccttgcggtcaagatgctgcaaaacgtgactccccacaataagctccctggggaagggaatgcagggttgctggggctgggcccagaagcagcagcaccagggaaaaggattcgaaaaccctctctcttgtatgagggctttgagagccccacaatggcttcggtgcctgctttgcaacttacccctgccaacccaccacccccggaggtgtccaatcccaaaaagccaggacgagttaccaaccagctgcaatacctacacaaggtagtgatgaaggctctgtggaaacatcagttcgcatggccattccggcagcctgtggatgctgtcaaactgggtctaccggattatcacaaaattataaaacagcctatggacatgggtactattaagaggagacttgaaaacaattattattgggctgcttcagagtgtatgcaagattttaataccatgttcaccaactgttacatttacaacaagcccactgatgatattgtcctaatggcacaaacgctggaaaagatattcctacagaaggttgcatcaatgccacaagaagaacaagagctggtagtgaccatccctaagaacagccacaagaagggggccaagttggcagcgctccagggcagtgttaccagtgcccatcaggtgcctgccgtctcttctgtgtcacacacagccctgtatactcctccacctgagatacctaccactgtcctcaacattccccacccatcagtcatttcctctccacttctcaagtccttgcactctgctggacccccgctccttgctgttactgcagctcctccagcccagccccttgccaagaaaaaaggcgtaaagcggaaagcagatactaccacccctacacctacagccatcttggctcctggttctccagctagccctcctgggagtcttgagcctaaggcagcacggcttccccctatgcgtagagagagtggtcgccccatcaagcccccacgcaaagacttgcctgactctcagcaacaacaccagagctctaagaaaggaaagctttcagaacagttaaaacattgcaatggcattttgaaggagttactctctaagaagcatgctgcctatgcttggcctttctataaaccagtggatgcttctgcacttggcctgcatgactaccatgacatcattaagcaccccatggacctcagcactgtcaagcggaagatggagaaccgtgattaccgggatgcacaggagtttgctgctgatgtacggcttatgttctccaactgctataagtacaatcccccagatcacgatgttgtggcaatggcacgaaagctacaggatgtatttgagttccgttatgccaagatgccagatgaaccactagaaccagggcctttaccagtctctactgccatgccccctggcttggccaaatcgtcttcagagtcctccagtgaggaaagtagcagtgagagctcctctgaggaagaggaggaggaagatgaggaggacgaggaggaagaagagagtgaaagctcagactcagaggaagaaagggctcatcgcttagcagaactacaggaacagcttcgggcagtacatgaacaactggctgctctgtcccagggtccaatatccaagcccaagaggaaaagagagaaaaaagagaaaaagaagaaacggaaggcagagaagcatcgaggccgagctggggccgatgaagatgacaaggggcctagggcaccccgcccacctcaacctaagaagtccaagaaagcaagtggcagtgggggtggcagtgctgctttaggcccttctggctttggaccttctggaggaagtggcaccaagctccccaaaaaggccacaaagacagccccacctgccctgcctacaggttatgattcagaggaggaggaagagagcaggcccatgagttacgatgagaagcggcagctgagcctggacatcaacaaattacctggggagaagctgggccgagttgtgcatataatccaagccagggagccctctttacgtgattcaaacccagaagagattgagattgattttgaaacactcaagccatccacacttagagagcttgagcgctatgtcctttcctgcctacgtaagaaaccccggaagccctacaccattaagaagcctgtgggaaagacaaaggaggaactggctttggagaaaaagcgggaattagaaaagcggttacaagatgtcagcggacagctcaattctactaaaaagccccccaagaaagcgaatgagaaaacagagtcatcctctgcacagcaagtagcagtgtcacgccttagcgcttccagctccagctcagattccagctcctcctcttcctcgtcgtcgtcttcagacaccagtgattcagactcaggctaaggggtcaggccagatggggcaggaaggctccgcaggaccggacccctagaccaccctgccccacctgccccttccccctttgctgtgacacttcttcatctcacccccccctgcccccctctaggagagctggctctgcagtgggggagggatgcagggacatttactgaaggagggacatggacaaaacaacattgaattcccagccccattggggagtgatctcttggacacagagcccccattcaaaatggggcagggcaagggtgggagtgtgcaaagccctgatctggagttacctgaggccatagctgccctattcacttctaagggccctgttttgagattgtttgttctaatttattttaagctaggtaaggctggggggagggtggggccgtggtcccctcagcctccatggggagggaagaagggggagctctttttttacgttgatttttttttttctactctgttttccctttttccttccgctccatttggggccctgggggtttcagtcatctccccatttggtcccctggactgtctttgttgattctaacttgtaaataaagaaaatattattaaaaaaaaacaaaaaaaaaaaaaaaaaaaagctctccgagtgctattttattcgtcgggggtgcgcgaaaacgagaggttaatcggtcatagggcgccagtgggctcatatggtgttgtttccctgtggccccaggtttttcttgttacctaaggtgtgaagacttcgcgcggggcctcaccctatatggagggcgcgtatttaatagtgtcgagtaaagcccgggtgttgacccgtgcttatgctgcgctgcgaaacgn

SEQ ID NO: 379472 - DNA, 4707 bp, Homo sapiens
ccctggcgctgaccgatggaccagccgctccgtggggaggactccggaccctggtgggggggcgggggggttctttcgcccccgtggcggagggcccctgagaggcggatacgggtgtgcctttgggggtgatgtggcgtgtggggggaaaggtccgagctcgcctggagggggagggtttttcccttaagtcatccctcccaggacttgctttttctgctctgagccggacgccggaatggagtttgaggaagagattcttcgctgctgctgccttaccgccgagaaccaccacccgccaggcgtcttgcggccacacccctggcgggttcaggcaggctacgcccacgcgacccctcccgtttccctgctttggccaatggaggagctacgaatggcacgacctgctcgagcttggcagtctccagttgggctgtgcatggaagcttgggaagactttgttggaaggggaggcggggagagagtgctggaggctctggggcgatggcttccgcacctcttccaaccaccctctttccctggagtcggcggaccacagctcagccaattggcttggagatgtggcgggttgccacttccctgtgggtctctgcggcactcttctgcctggtgactgacaccttggaaatgaagtttatgacgtcatcgttgcggctggccaatagaaaaagctcccgcggagaggtgttccttccccttcgactcagcttcttcacccgcgtgagcgagcgcgcgcgcgcggagggggtggggaaaatctcaagcagggtggcgcgcatgagcggcgaagctcctcctccccgcctatatataaagggctggcgcggggctcggcggcgccatttcgtgctggagtggagcagcctctagaacgagctggaggattctgcctaccgatacagagccttcgagtcgtccggggccgccattacaatccacctccatccgcttggaaatggccttcgtcccggcctatgactggtcccagcgggcagtacagaccccctagaagcccctggagctcccctttttcgggccccgcccaatcctcggagtctgtccaccccctctactccgccctcaagaggatttcaaagatggaggcggcggctccctaaaccacttttcgtgttcatccgcctccatccgagatcgaaacgggacctcgtcggccccgtaggggcccgacaagaagagggaatccctgcagaccaacagcgggctatattgacgacggtgtctgagatcggggaccgtcttttgaagagtcagtccctccttagttgcccgcctcagctgaggccgccgccattttcttgctgtccgccgtctgcagagcgcgccaagctgcccggagctctccgagaggccccaaagagactgctttcgtgccggccaggcagggggtttgtcgcctggaggcccaagaggaacggcctccccccaacttagcgggttatgctggaccgggcggtgaggggaaccgaggccacccggactttccgcggctgagggcagcgccggttccttgcggtcaagatgctgcaaaacgtgactccccacaataagctccctggggaagggaatgcagggttgctggggctgggcccagaagcagcagcaccagggaaaaggattcgaaaaccctctctcttgtatgagggctttgagagccccacaatggcttcggtgcctgctttgcaacttacccctgccaacccaccacccccggaggtgtccaatcccaaaaagccaggacgagttaccaaccagctgcaatacctacacaaggtagtgatgaaggctctgtggaaacatcagttcgcatggccattccggcagcctgtggatgctgtcaaactgggtctaccggattatcacaaaattataaaacagcctatggacatgggtactattaagaggagacttgaaaacaattattattgggctgcttcagagtgtatgcaagattttaataccatgttcaccaactgttacatttacaacaagcccactgatgatattgtcctaatggcacaaacgctggaaaagatattcctacagaaggttgcatcaatgccacaagaagaacaagagctggtagtgaccatccctaagaacagccacaagaagggggccaagttggcagcgctccagggcagtgttaccagtgcccatcaggtgcctgccgtctcttctgtgtcacacacagccctgtatactcctccacctgagatacctaccactgtcctcaacattccccacccatcagtcatttcctctccacttctcaagtccttgcactctgctggacccccgctccttgctgttactgcagctcctccagcccagccccttgccaagaaaaaaggcgtaaagcggaaagcagatactaccacccctacacctacagccatcttggctcctggttctccagctagccctcctgggagtcttgagcctaaggcagcacggcttccccctatgcgtagagagagtggtcgccccatcaagcccccacgcaaagacttgcctgactctcagcaacaacaccagagctctaagaaaggaaagctttcagaacagttaaaacattgcaatggcattttgaaggagttactctctaagaagcatgctgcctatgcttggcctttctataaaccagtggatgcttctgcacttggcctgcatgactaccatgacatcattaagcaccccatggacctcagcactgtcaagcggaagatggagaaccgtgattaccgggatgcacaggagtttgctgctgatgtacggcttatgttctccaactgctataagtacaatcccccagatcacgatgttgtggcaatggcacgaaagctacaggatgtatttgagttccgttatgccaagatgccagatgaaccactagaaccagggcctttaccagtctctactgccatgccccctggcttggccaaatcgtcttcagagtcctccagtgaggaaagtagcagtgagagctcctctgaggaagaggaggaggaagatgaggaggacgaggaggaagaagagagtgaaagctcagactcagaggaagaaagggctcatcgcttagcagaactacaggaacagcttcgggcagtacatgaacaactggctgctctgtcccagggtccaatatccaagcccaagaggaaaagagagaaaaaagagaaaaagaagaaacggaaggcagagaagcatcgaggccgagctggggccgatgaagatgacaaggggcctagggcaccccgcccacctcaacctaagaagtccaagaaagcaagtggcagtgggggtggcagtgctgctttaggcccttctggctttggaccttctggaggaagtggcaccaagttatgattcagaggaggaggaagagagcaggcccatgagttacgatgagaagcggcagctgagcctggacatcaacaaattacctggggagaagctgggccgagttgtgcatataatccaagccagggagccctctttacgtgattcaaacccagaagagattgagattgattttgaaacactcaagccatccacacttagagagcttgagcgctatgtcctttcctgcctacgtaagaaaccccggaagccctacaccattaagaagcctgtgggaaagacaaaggaggaactggctttggagaaaaagcgggaattagaaaagcggttacaagatgtcagcggacagctcaattctactaaaaagccccccaagaaagcgaatgagaaaacagagtcatcctctgcacagcaagtagcagtgtcacgccttagcgcttccagctccagctcagattccagctcctcctcttcctcgtcgtcgtcttcagacaccagtgattcagactcaggctaaggggtcaggccagatggggcaggaaggctccgcaggaccggacccctagaccaccctgccccacctgccccttccccctttgctgtgacacttcttcatctcacccccccctgcccccctctaggagagctggctctgcagtgggggagggatgcagggacatttactgaaggagggacatggacaaaacaacattgaattcccagccccattggggagtgatctcttggacacagagcccccattcaaaatggggcagggcaagggtgggagtgtgcaaagccctgatctggagttacctgaggccatagctgccctattcacttctaagggccctgttttgagattgtttgttctaatttattttaagctaggtaaggctggggggagggtggggccgtggtcccctcagcctccatggggagggaagaagggggagctctttttttacgttgatttttttttttctactctgttttccctttttccttccgctccatttggggccctgggggtttcagtcatctccccatttggtcccctggactgtctttgttgattctaacttgtaaataaagaaaatattattcaagttttgagttaccttaatatttgcttttgtagtgtttcaaaaggaacatcataagaattgtcttgataattttgagggaaatattactgcagtgagaaaaggcaatagctaacctataattggattgtcttaatttttaaaccagtaggcttttgctgtgtttttaataaagtaaatatgacttttgtaaattgag

SEQ ID NO: 379473 - DNA, 3927 bp, Homo sapiens
  misc_feature (12)..(12): n is a, c, g, or t
ggccaaagagcnccaactaggctaggtacgaggctcgggtgaatcggccgagggcagcctctagaacgagctggaggattctgcctaccgatacagagccttcgagtcgtccggggccgccattacaatccacctccatccgcttggaaatggccttcgtcccggcctatgactggtcccagcgggcagtacagaccccctagaagcccctggagctcccctttttcgggccccgcccaatcctcggagtctgtccaccccctctactccgccctcaagaggatttcaaagatggaggcggcggctccctaaaccacttttcgtgttcatccgcctccatccgagatcgaaacgggacctcgtcggccccgtaggggcccgacaagaagagggaatccctgcagaccaacagcgggctatattgacgacggtgtctgagatcggggaccgtcttttgaagagtcagtccctccttagttgcccgcctcagctgaggccgccgccattttcttgctgtccgccgtctgcagagcgcgccaagctgcccggagctctccgagaggccccaaagagactgctttcgtgccggccaggcagggggtttgtcgcctggaggcccaagaggaacggcctccccccaacttagcgggttatgctggaccgggcggtgaggggaaccgaggccacccggactttccgcggctgagggcagcgccggttccttgcggtcaagatgctgcaaaacgtgactccccacaataagctccctggggaagggaatgcagggttgctggggctgggcccagaagcagcagcaccagggaaaaggattcgaaaaccctctctcttgtatgagggctttgagagccccacaatggcttcggtgcctgctttgcaacttacccctgccaacccaccacccccggaggtgtccaatcccaaaaagccaggacgagttaccaaccagctgcaatacctacacaaggtagtgatgaaggctctgtggaaacatcagttcgcatggccattccggcagcctgtggatgctgtcaaactgggtctaccggattatcacaaaattataaaacagcctatggacatgggtactattaagaggagacttgaaaacaattattattgggctgcttcagagtgtatgcaagattttaataccatgttcaccaactgttacatttacaacaagcccactgatgatattgtcctaatggcacaaacgctggaaaagatattcctacagaaggttgcatcaatgccacaagaagaacaagagctggtagtgaccatccctaagaacagccacaagaagggggccaagttggcagcgctccagggcagtgttaccagtgcccatcaggtgcctgccgtctcttctgtgtcacacacagccctgtatactcctccacctgagatacctaccactgtcctcaacattccccacccatcagtcatttcctctccacttctcaagtccttgcactctgctggacccccgctccttgctgttactgcagctcctccagcccagccccttgccaagaaaaaaggcgtaaagcggaaagcagatactaccacccctacacctacagccatcttggctcctggttctccagctagccctcctgggagtcttgagcctaaggcagcacggcttccccctatgcgtagagagagtggtcgccccatcaagcccccacgcaaagacttgcctgactctcagcaacaacaccagagctctaagaaaggaaagctttcagaacagttaaaacattgcaatggcattttgaaggagttactctctaagaagcatgctgcctatgcttggcctttctataaaccagtggatgcttctgcacttggcctgcatgactaccatgacatcattaagcaccccatggacctcagcactgtcaagcggaagatggagaaccgtgattaccgggatgcacaggagtttgctgctgatgtacggcttatgttctccaactgctataagtacaatcccccagatcacgatgttgtggcaatggcacgaaagctacaggatgtatttgagttccgttatgccaagatgccagatgaaccactagaaccagggcctttaccagtctctactgccatgccccctggcttggccaaatcgtcttcagagtcctccagtgaggaaagtagcagtgagagctcctctgaggaagaggaggaggaagatgaggaggacgaggaggaagaagagagtgaaagctcagactcagaggaagaaagggctcatcgcttagcagaactacaggaacagcttcgggcagtacatgaacaactggctgctctgtcccagggtccaatatccaagcccaagaggaaaagagagaaaaaagagaaaaagaagaaacggaaggcagagaagcatcgaggccgagctggggccgatgaagatgacaaggggcctagggcaccccgcccacctcaacctaagaagtccaagaaagcaagtggcagtgggggtggcagtgctgctttaggcccttctggctttggaccttctggaggaagtggcaccaagctccccaaaaaggccacaaagacagccccacctgccctgcctacaggttatgattcagaggaggaggaagagagcaggcccatgagttacgatgagaagcggcagctgagcctggacatcaacaaattacctggggagaagctgggccgagttgtgcatataatccaagccagggagccctctttacgtgattcaaacccagaagagattgagattgattttgaaacactcaagccatccacacttagagagcttgagcgctatgtcctttcctgcctacgtaagaaaccccggaagccctacaccattaagaagcctgtgggaaagacaaaggaggaactggctttggagaaaaagcgggaattagaaaagcggttacaagatgtcagcggacagctcaattctactaaaaagccccccaagaaagcgaatgagaaaacagagtcatcctctgcacagcaagtagcagtgtcacgccttagcgcttccagctccagctcagattccagctcctcctcttcctcgtcgtcgtcttcagacaccagtgattcagactcaggctaaggggtcaggccagatggggcaggaaggctccgcaggaccggacccctagaccaccctgccccacctgccccttccccctttgctgtgacacttcttcatctcacccccccctgcccccctctaggagagctggctctgcagtgggggagggatgcagggacatttactgaaggagggacatggacaaaacaacattgaattcccagccccattggggagtgatctcttggacacagagcccccattcaaaatggggcagggcaagggtgggagtgtgcaaagccctgatctggagttacctgaggccatagctgccctattcacttctaagggccctgttttgagattgtttgttctaatttattttaagctaggtaaggctggggggagggtggggccgtggtcccctcagcctccatggggagggaagaagggggagctctttttttacgttgatttttttttttctactctgttttccctttttccttccgctccatttggggccctgggggtttcagtcatctccccatttggtcccctggactgtctttgttgattctaacttgtaaataaagaaaatattattcaagttttgagttaccttaatatttgcttttgtagtgtttcaaaaggaacatcataagaattgtcttgataattttgagggaaatattactgcagtgagaaaaggcaatagctaacctataattggattgtcttaatttttaaaccagtaggcttttgctgtgtttttaataaagtaaatatgacttttgtaaattgag

SEQ ID NO: 379474 - DNA, 4305 bp, Homo sapiens
ccctggcgctgaccgatggaccagccgctccgtggggaggactccggaccctggtgggggggcgggggggttctttcgcccccgtggcggagggcccctgagaggcggatacgggtgtgcctttgggggtgatgtggcgtgtggggggaaaggtccgagctcgcctggagggggagggtttttcccttaagtcatccctcccaggacttgctttttctgctctgagccggacgccggaatggagtttgaggaagagattcttcgctgctgctgccttaccgccgagaaccaccacccgccaggcgtcttgcggccacacccctggcgggttcaggcaggctacgcccacgcgacccctcccgtttccctgctttggccaatggaggagctacgaatggcacgacctgctcgagcttggcagtctccagttgggctgtgcatggaagcttgggaagactttgttggaaggggaggcggggagagagtgctggaggctctggggcgatggcttccgcacctcttccaaccaccctctttccctggagtcggcggaccacagctcagccaattggcttggagatgtggcgggttgccacttccctgtgggtctctgcggcactcttctgcctggtgactgacaccttggaaatgaagtttatgacgtcatcgttgcggctggccaatagaaaaagctcccgcggagaggtgttccttccccttcgactcagcttcttcacccgcgtgagcgagcgcgcgcgcgcggagggggtggggaaaatctcaagcagggtggcgcgcatgagcggcgaagctcctcctccccgcctatatataaagggctggcgcggggctcggcggcgccatttcgtgctggagtggagcagcctctagaacgagctggaggattctgcctaccgatacagagccttcgagtcgtccggggccgccattacaatccacctccatccgcttggaaatggccttcgtcccggcctatgactggtcccagcgggcagtacagaccccctagaagcccctggagctcccctttttcgggccccgcccaatcctcggagtctgtccaccccctctactccgccctcaagaggatttcaaagatggaggcggcggctccctaaaccacttttcgtgttcatccgcctccatccgagatcgaaacgggacctcgtcggccccgtaggggcccgacaagaagagggaatccctgcagaccaacagcgggctatattgacgacggtgtctgagatcggggaccgtcttttgaagagtcagtccctccttagttgcccgcctcagctgaggccgccgccattttcttgctgtccgccgtctgcagagcgcgccaagctgcccggagctctccgagaggccccaaagagactgctttcgtgccggccaggcagggggtttgtcgcctggaggcccaagaggaacggcctccccccaacttagcgggttatgctggaccgggcggtgaggggaaccgaggccacccggactttccgcggctgagggcagcgccggttccttgcggtcaagatgctgcaaaacgtgactccccacaataagctccctggggaagggaatgcagggttgctggggctgggcccagaagcagcagcaccagggaaaaggattcgaaaaccctctctcttgtatgagggctttgagagccccacaatggcttcggtgcctgctttgcaacttacccctgccaacccaccacccccggaggtgtccaatcccaaaaagccaggacgagttaccaaccagctgcaatacctacacaaggtagtgatgaaggctctgtggaaacatcagttcgcatggccattccggcagcctgtggatgctgtcaaactgggtctaccgattcccacctcgggttgggagaggaccacggtggccaaaattcttagcttcttcctttccctcatgcagcccatggatagccagccccagaggattatcacaaaattataaaacagcctatggacatgggtactattaagaggagacttgaaaacaattattattgggctgcttcagagtgtatgcaagattttaataccatgttcaccaactgttacatttacaacaagcccactgatgatattgtcctaatggcacaaacgctggaaaagatattcctacagaaggttgcatcaatgccacaagaagaacaagagctggtagtgaccatccctaagaacagccacaagaagggggccaagttggcagcgctccagggcagtgttaccagtgcccatcaggtgcctgccgtctcttctgtgtcacacacagccctgtatactcctccacctgagatacctaccactgtcctcaacattccccacccatcagtcatttcctctccacttctcaagtccttgcactctgctggacccccgctccttgctgttactgcagctcctccagcccagccccttgccaagaaaaaaggcgtaaagcggaaagcagatactaccacccctacacctacagccatcttggctcctggttctccagctagccctcctgggagtcttgagcctaaggcagcacggcttccccctatgcgtagagagagtggtcgccccatcaagcccccacgcaaagacttgcctgactctcagcaacaacaccagagctctaagaaaggaaagctttcagaacagttaaaacattgcaatggcattttgaaggagttactctctaagaagcatgctgcctatgcttggcctttctataaaccagtggatgcttctgcacttggcctgcatgactaccatgacatcattaagcaccccatggacctcagcactgtcaagcggaagatggagaaccgtgattaccgggatgcacaggagtttgctgctgatgtacggcttatgttctccaactgctataagtacaatcccccagatcacgatgttgtggcaatggcacgaaagctacaggatgtatttgagttccgttatgccaagatgccagatgaaccactagaaccagggcctttaccagtctctactgccatgccccctggcttggccaaatcgtcttcagagtcctccagtgaggaaagtagcagtgagagctcctctgaggaagaggaggaggaagatgaggaggacgaggaggaagaagagagtgaaagctcagactcagaggaagaaagggctcatcgcttagcagaactacaggaacagcttcgggcagtacatgaacaactggctgctctgtcccagggtccaatatccaagcccaagaggaaaagagagaaaaaaagcgggaattagaaaagcggttacaagatgtcagcggacagctcaattctactaaaaagccccccaagaaagcgaatgagaaaacagagtcatcctctgcacagcaagtagcagtgtcacgccttagcgcttccagctccagctcagattccagctcctcctcttcctcgtcgtcgtcttcagacaccagtgattcagactcaggctaaggggtcaggccagatggggcaggaaggctccgcaggaccggacccctagaccaccctgccccacctgccccttccccctttgctgtgacacttcttcatctcacccccccctgcccccctctaggagagctggctctgcagtgggggagggatgcagggacatttactgaaggagggacatggacaaaacaacattgaattcccagccccattggggagtgatctcttggacacagagcccccattcaaaatggggcagggcaagggtgggagtgtgcaaagccctgatctggagttacctgaggccatagctgccctattcacttctaagggccctgttttgagattgtttgttctaatttattttaagctaggtaaggctggggggagggtggggccgtggtcccctcagcctccatggggagggaagaagggggagctctttttttacgttgatttttttttttctactctgttttccctttttccttccgctccatttggggccctgggggtttcagtcatctccccatttggtcccctggactgtctttgttgattctaacttgtaaataaagaaaatattattcaagttttgagttaccttaatatttgcttttgtagtgtttcaaaaggaacatcataagaattgtcttgataattttgagggaaatattactgcagtgagaaaaggcaatagctaacctataattggattgtcttaatttttaaaccagtaggcttttgctgtgtttttaataaagtaaatatgacttttgtaaattgag

SEQ ID NO: 379475 - DNA, 4689 bp, Homo sapiens
ccctggcgctgaccgatggaccagccgctccgtggggaggactccggaccctggtgggggggcgggggggttctttcgcccccgtggcggagggcccctgagaggcggatacgggtgtgcctttgggggtgatgtggcgtgtggggggaaaggtccgagctcgcctggagggggagggtttttcccttaagtcatccctcccaggacttgctttttctgctctgagccggacgccggaatggagtttgaggaagagattcttcgctgctgctgccttaccgccgagaaccaccacccgccaggcgtcttgcggccacacccctggcgggttcaggcaggctacgcccacgcgacccctcccgtttccctgctttggccaatggaggagctacgaatggcacgacctgctcgagcttggcagtctccagttgggctgtgcatggaagcttgggaagactttgttggaaggggaggcggggagagagtgctggaggctctggggcgatggcttccgcacctcttccaaccaccctctttccctggagtcggcggaccacagctcagccaattggcttggagatgtggcgggttgccacttccctgtgggtctctgcggcactcttctgcctggtgactgacaccttggaaatgaagtttatgacgtcatcgttgcggctggccaatagaaaaagctcccgcggagaggtgttccttccccttcgactcagcttcttcacccgcgtgagcgagcgcgcgcgcgcggagggggtggggaaaatctcaagcagggtggcgcgcatgagcggcgaagctcctcctccccgcctatatataaagggctggcgcggggctcggcggcgccatttcgtgctggagtggagcagcctctagaacgagctggaggattctgcctaccgatacagagccttcgagtcgtccggggccgccattacaatccacctccatccgcttggaaatggccttcgtcccggcctatgactggtcccagcgggcagtacagaccccctagaagcccctggagctcccctttttcgggccccgcccaatcctcggagtctgtccaccccctctactccgccctcaagaggatttcaaagatggaggcggcggctccctaaaccacttttcgtgttcatccgcctccatccgagatcgaaacgggacctcgtcggccccgtaggggcccgacaagaagagggaatccctgcagaccaacagcgggctatattgacgacggtgtctgagatcggggaccgtcttttgaagagtcagtccctccttagttgcccgcctcagctgaggccgccgccattttcttgctgtccgccgtctgcagagcgcgccaagctgcccggagctctccgagaggccccaaagagactgctttcgtgccggccaggcagggggtttgtcgcctggaggcccaagaggaacggcctccccccaacttagcgggttatgctggaccgggcggtgaggggaaccgaggccacccggactttccgcggctgagggcagcgccggttccttgcggtcaagatgctgcaaaacgtgactccccacaataagctccctggggaagggaatgcagggttgctggggctgggcccagaagcagcagcaccagggaaaaggattcgaaaaccctctctcttgtatgagggctttgagagccccacaatggcttcggtgcctgctttgcaacttacccctgccaacccaccacccccggaggtgtccaatcccaaaaagccaggacgagttaccaaccagctgcaatacctacacaaggtagtgatgaaggctctgtggaaacatcagttcgcatggccattccggcagcctgtggatgctgtcaaactgggtctaccggattatcacaaaattataaaacagcctatggacatgggtactattaagaggagacttgaaaacaattattattgggctgcttcagagtgtatgcaagattttaataccatgttcaccaactgttacatttacaacaagcccactgatgatattgtcctaatggcacaaacgctggaaaagatattcctacagaaggttgcatcaatgccacaagaagaacaagagctggtagtgaccatccctaagaacagccacaagaagggggccaagttggcagcgctccagggcagtgttaccagtgcccatcaggtgcctgccgtctcttctgtgtcacacacagccctgtatactcctccacctgagatacctaccactgtcctcaacattccccacccatcagtcatttcctctccacttctcaagtccttgcactctgctggacccccgctccttgctgttactgcagctcctccagcccagccccttgccaagaaaaaaggcgtaaagcggaaagcagatactaccacccctacacctacagccatcttggctcctggttctccagctagccctcctgggagtcttgagcctaaggcagcacggcttccccctatgcgtagagagagtggtcgccccatcaagcccccacgcaaagacttgcctgactctcagcaacaacaccagagctctaagaaaggaaagctttcagaacagttaaaacattgcaatggcattttgaaggagttactctctaagaagcatgctgcctatgcttggcctttctataaaccagtggatgcttctgcacttggcctgcatgactaccatgacatcattaagcaccccatggacctcagcactgtcaagcggaagatggagaaccgtgattaccgggatgcacaggagtttgctgctgatgtacggcttatgttctccaactgctataagtacaatcccccagatcacgatgttgtggcaatggcacgaaagctacaggatgtatttgagttccgttatgccaagatgccagatgaaccactagaaccagggcctttaccagtctctactgccatgccccctggcttggccaaatcgtcttcagagtcctccagtgaggaaagtagcagtgagagctcctctgaggaagaggaggaggaagatgaggaggacgaggaggaagaagagagtgaaagctcagactcagaggaagaaagggctcatcgcttagcagaactacaggaacagcttcgggcagtacatgaacaactggctgctctgtcccagggtccaatatccaagcccaagaggaaaagagagaaaaaagagaaaaagaagaaacggaaggcagagaagcatcgaggccgagctggggccgatgaagatgacaaggggcctagggcaccccgcccacctcaacctaagaagtccaagaaagcaagtggcagtgggggtggcagtgctgctttaggcccttctggctttggaccttctggaggaagtggcaccaagctccccaaaaaggccacaaagacagccccacctgccctgcctacaggttatgattcagaggaggaggaagagagcaggcccatgagttacgatgagaagcggcagctgagcctggacatcaacaaattacctggggagaagctgggccgagttgtgcatataatccaagccagggagccctctttacgtgattcaaacccagaagagattgagattgattttgaaacactcaagccatccacacttagagagcttgagcgctatgtcctttcctgcctacgtaagaaaccccggaagccctacaccattaagaagcctgtgggaaagacaaaggaggaactggctttggagaaaaagcgggaattagaaaagcggttacaagatgtcagcggacagctcaattctactaaaaagccccccaagaaagcgaatgagaaaacagagtcatcctctgcacagcaagtagcagtgtcacgccttagcgcttccagctccagctcagattccagctcctcctcttcctcgtcgtcgtcttcagacaccagtgattcagactcaggctaaggggtcaggccagatggggcaggaaggctccgcaggaccggacccctagaccaccctgccccacctgccccttccccctttgctgtgacacttcttcatctcacccccccctgcccccctctaggagagctggctctgcagtgggggagggatgcagggacatttactgaaggagggacatggacaaaacaacattgaattcccagccccattggggacctgatctggagttacctgaggccatagctgccctattcacttctaagggccctgttttgagattgtttgttctaatttattttaagctaggtaaggctggggggagggtggggccgtggtcccctcagcctccatggggagggaagaagggggagctctttttttacgttgatttttttttttctactctgttttccctttttccttccgctccatttggggccctgggggtttcagtcatctccccatttggtcccctggactgtctttgttgattctaacttgtaaataaagaaaatattattcaagttttgagttaccttaatatttgcttttgtagtgtttcaaaaggaacatcataagaattgtcttgataattttgagggaaatattactgcagtgagaaaaggcaatagctaacctataattggattgtcttaatttttaaaccagtaggcttttgctgtgtttttaataaagtaaatatgacttttgtaaattgag

SEQ ID NO: 379476 - DNA, 4518 bp, Homo sapiens
ccctggcgctgaccgatggaccagccgctccgtggggaggactccggaccctggtgggggggcgggggggttctttcgcccccgtggcggagggcccctgagaggcggatacgggtgtgcctttgggggtgatgtggcgtgtggggggaaaggtccgagctcgcctggagggggagggtttttcccttaagtcatccctcccaggacttgctttttctgctctgagccggacgccggaatggagtttgaggaagagattcttcgctgctgctgccttaccgccgagaaccaccacccgccaggcgtcttgcggccacacccctggcgggttcaggcaggctacgcccacgcgacccctcccgtttccctgctttggccaatggaggagctacgaatggcacgacctgctcgagcttggcagtctccagttgggctgtgcatggaagcttgggaagactttgttggaaggggaggcggggagagagtgctggaggctctggggcgatggcttccgcacctcttccaaccaccctctttccctggagtcggcggaccacagctcagccaattggcttggagatgtggcgggttgccacttccctgtgggtctctgcggcactcttctgcctggtgactgacaccttggaaatgaagtttatgacgtcatcgttgcggctggccaatagaaaaagctcccgcggagaggtgttccttccccttcgactcagcttcttcacccgcgtgagcgagcgcgcgcgcgcggagggggtggggaaaatctcaagcagggtggcgcgcatgagcggcgaagctcctcctccccgcctatatataaagggctggcgcggggctcggcggcgccatttcgtgctggagtggagcagcctctagaacgagctggaggattctgcctaccgatacagagccttcgagtcgtccggggccgccattacaatccacctccatccgcttggaaatggccttcgtcccggcctatgactggtcccagcgggcagtacagaccccctagaagcccctggagctcccctttttcgggccccgcccaatcctcggagtctgtccaccccctctactccgccctcaagaggatttcaaagatggaggcggcggctccctaaaccacttttcgtgttcatccgcctccatccgagatcgaaacgggacctcgtcggccccgtaggggcccgacaagaagagggaatccctgcagaccaacagcgggctatattgacgacggtgtctgagatcggggaccgtcttttgaagagtcagtccctccttagttgcccgcctcagctgaggccgccgccattttcttgctgtccgccgtctgcagagcgcgccaagctgcccggagctctccgagaggccccaaagagactgctttcgtgccggccaggcagggggtttgtcgcctggaggcccaagaggaacggcctccccccaacttagcgggttatgctggaccgggcggtgaggggaaccgaggccacccggactttccgcggctgagggcagcgccggttccttgcggtcaagatgctgcaaaacgtgactccccacaataagctccctggggaagggaatgcagggttgctggggctgggcccagaagcagcagcaccagggaaaaggattcgaaaaccctctctcttgtatgagggctttgagagccccacaatggcttcggtgcctgctttgcaacttacccctgccaacccaccacccccggaggtgtccaatcccaaaaagccaggacgagttaccaaccagctgcaatacctacacaaggtagtgatgaaggctctgtggaaacatcagttcgcatggccattccggcagcctgtggatgctgtcaaactgggtctaccggattatcacaaaattataaaacagcctatggacatgggtactattaagaggagacttgaaaacaattattattgggctgcttcagagtgtatgcaagattttaataccatgttcaccaactgttacatttacaacaagcccactgatgatattgtcctaatggcacaaacgctggaaaagatattcctacagaaggttgcatcaatgccacaagaagaacaagagctggtagtgaccatccctaagaacagccacaagaagggggccaagttggcagcgctccagggcagtgttaccagtgcccatcaggtgcctgccgtctcttctgtgtcacacacagccctgtatactcctccacctgagatacctaccactgtcctcaacattccccacccatcagtcatttcctctccacttctcaagtccttgcactctgctggacccccgctccttgctgttactgcagctcctccagcccagccccttgccaagaaaaaaggcgtaaagcggaaagcagatactaccacccctacacctacagccatcttggctcctggttctccagctagccctcctgggagtcttgagcctaaggcagcacggcttccccctatgcgtagagagagtggtcgccccatcaagcccccacgcaaagacttgcctgactctcagcaacaacaccagagctctaagaaaggaaagctttcagaacagttaaaacattgcaatggcattttgaaggagttactctctaagaagcatgctgcctatgcttggcctttctataaaccagtggatgcttctgcacttggcctgcatgactaccatgacatcattaagcaccccatggacctcagcactgtcaagcggaagatggagaaccgtgattaccgggatgcacaggagtttgctgctgatgtacggcttatgttctccaactgctataagtacaatcccccagatcacgatgttgtggcaatggcacgaaagctacaggatgtatttgagttccgttatgccaagatgccagatgaaccactagaaccagggcctttaccagtctctactgccatgccccctggcttggccaaatcgtcttcagagtcctccagtgaggaaagtagcagtgagagctcctctgaggaagaggaggaggaagatgaggaggacgaggaggaagaagagagtgaaagctcagactcagaggaagaaagggctcatcgcttagcagaactacaggaacagcttcgggcagtacatgaacaactggctgctctgtcccagggtccaatatccaagcccaagaggaaaagagagaaaaaagagaaaaagaagaaacggaaggcagagaagcatcgaggccgagctggggccgatgaagatgacaaggggcctagggcaccccgcccacctcaacctaagaagtccaagaaagcaagtggcagtgggggtggcagtgctgctttaggcccttctggctttggaccttctggaggaagtggcaccaagctccccaaaaaggccacaaagacagccccacctgccctgcctacaggttatgattcagaggaggaggaagagagcaggcccatgagttacgatgagaagcggcagctgagcctggacatcaacaaattacctggggagaagctgggccgagttgtgcatataatccaagccagggagccctctttacgtgattcaaacccagaagagattgagattgattttgaaacactcaagccatccacacttagagagcttgagcgctatgtcctttcctgcctacgtaagaaaccccggaagccctacaccattaagaagcctgtgggaaagacaaaggaggaactggctttggagaaaaagcgggaattagaaaagcggttacaagatgtcagcggacagctcaattctactaaaaagccccccaagaaagcgaatgagaaaacagagtcatcctctgcacagcaagtagcagtgtcacgccttagcgcttccagctccagctcagattccagctcctcctcttcctcgtcgtcgtcttcagacaccagtgattcagactcaggctaaggggtcaggccagatggggcaggaaggctccgcaggaccggacccctagaccaccctgccccacctgccccttccccctttgctgtgacacttcttcatctcacccccccctgcccccctctaggagagctggctctgcagtgggggagggatgcagggacatttactgaaggagggacatggacaaaacaacattgaattcccagccccattggggagtgatctcttgggctgacccagcatctcccagcaagacctcatctgtggagctgccacagagaagtttgtagccaggtactgcattctctcccatcctggggcagcactccccagagctgtgccagcaggggggctgtgccaacctgttcttagagtgtagctgtaagggcagtgcccatgtgtacattctgcctagagtgtagcctaaagggcagggcccacgtgtatagtatctgtatataagttgctgtgtgtctgtcctgatttctacaactggagtttttttatacaatgttctttgtctcaaaataaagcaatgtgttttttcggaaa

SEQ ID NO: 379477 - DNA, 4069 bp, Homo sapiens
ccctggcgctgaccgatggaccagccgctccgtggggaggactccggaccctggtgggggggcgggggggttctttcgcccccgtggcggagggcccctgagaggcggatacgggtgtgcctttgggggtgatgtggcgtgtggggggaaaggtccgagctcgcctggagggggagggtttttcccttaagtcatccctcccaggacttgctttttctgctctgagccggacgccggaatggagtttgaggaagagattcttcgctgctgctgccttaccgccgagaaccaccacccgccaggcgtcttgcggccacacccctggcgggttcaggcaggctacgcccacgcgacccctcccgtttccctgctttggccaatggaggagctacgaatggcacgacctgctcgagcttggcagtctccagttgggctgtgcatggaagcttgggaagactttgttggaaggggaggcggggagagagtgctggaggctctggggcgatggcttccgcacctcttccaaccaccctctttccctggagtcggcggaccacagctcagccaattggcttggagatgtggcgggttgccacttccctgtgggtctctgcggcactcttctgcctggtgactgacaccttggaaatgaagtttatgacgtcatcgttgcggctggccaatagaaaaagctcccgcggagaggtgttccttccccttcgactcagcttcttcacccgcgtgagcgagcgcgcgcgcgcggagggggtggggaaaatctcaagcagggtggcgcgcatgagcggcgaagctcctcctccccgcctatatataaagggctggcgcggggctcggcggcgccatttcgtgctggagtggagcagcctctagaacgagctggaggattctgcctaccgatacagagccttcgagtcgtccggggccgccattacaatccacctccatccgcttggaaatggccttcgtcccggcctatgactggtcccagcgggcagtacagaccccctagaagcccctggagctcccctttttcgggccccgcccaatcctcggagtctgtccaccccctctactccgccctcaagaggatttcaaagatggaggcggcggctccctaaaccacttttcgtgttcatccgcctccatccgagatcgaaacgggacctcgtcggccccgtaggggcccgacaagaagagggaatccctgcagaccaacagcgggctatattgacgacggtgtctgagatcggggaccgtcttttgaagagtcagtccctccttagttgcccgcctcagctgaggccgccgccattttcttgctgtccgccgtctgcagagcgcgccaagctgcccggagctctccgagaggccccaaagagactgctttcgtgccggccaggcagggggtttgtcgcctggaggcccaagaggaacggcctccccccaacttagcgggttatgctggaccgggcggtgaggggaaccgaggccacccggactttccgcggctgagggcagcgccggttccttgcggtcaagatgctgcaaaacgtgactccccacaataagctccctggggaagggaatgcagggttgctggggctgggcccagaagcagcagcaccagggaaaaggattcgaaaaccctctctcttgtatgagggctttgagagccccacaatggcttcggtgcctgctttgcaacttacccctgccaacccaccacccccggaggtgtccaatcccaaaaagccaggacgagttaccaaccagctgcaatacctacacaaggtagtgatgaaggctctgtggaaacatcagttcgcatggccattccggcagcctgtggatgctgtcaaactgggtctaccggattatcacaaaattataaaacagcctatggacatgggtactattaagaggagacttgaaaacaattattattgggctgcttcagagtgtatgcaagattttaataccatgttcaccaactgttacatttacaacaagcccactgatgatattgtcctaatggcacaaacgctggaaaagatattcctacagaaggttgcatcaatgccacaagaagaacaagagctggtagtgaccatccctaagaacagccacaagaagggggccaagttggcagcgctccagggcagtgttaccagtgcccatcaggtgcctgccgtctcttctgtgtcacacacagccctgtatactcctccacctgagatacctaccactgtcctcaacattccccacccatcagtcatttcctctccacttctcaagtccttgcactctgctggacccccgctccttgctgttactgcagctcctccagcccagccccttgccaagaaaaaaggcgtaaagcggaaagcagatactaccacccctacacctacagccatcttggctcctggttctccagctagccctcctgggagtcttgagcctaaggcagcacggcttccccctatgcgtagagagagtggtcgccccatcaagcccccacgcaaagacttgcctgactctcagcaacaacaccagagctctaagaaaggaaagctttcagaacagttaaaacattgcaatggcattttgaaggagttactctctaagaagcatgctgcctatgcttggcctttctataaaccagtggatgcttctgcacttggcctgcatgactaccatgacatcattaagcaccccatggacctcagcactgtcaagcggaagatggagaaccgtgattaccgggatgcacaggagtttgctgctgatgtacggcttatgttctccaactgctataagtacaatcccccagatcacgatgttgtggcaatggcacgaaagctacaggatgtatttgagttccgttatgccaagatgccagatgaaccactagaaccagggcctttaccagtctctactgccatgccccctggcttggccaaatcgtcttcagagtcctccagtgaggaaagtagcagtgagagctcctctgaggaagaggaggaggaagatgaggaggacgaggaggaagaagagagtgaaagctcagactcagaggaagaaagggctcatcgcttagcagaactacaggaacagcttcgggcagtacatgaacaactggctgctctgtcccagggtccaatatccaagcccaagaggaaaagagagaaaaaagagaaaaagaagaaacggaaggcagagaagcatcgaggccgagctggggccgatgaagatgacaaggggcctagggcaccccgcccacctcaacctaagaagtccaagaaagcaagtggcagtgggggtggcagtgctgctttaggcccttctggctttggaccttctggaggaagtggcaccaagctccccaaaaaggccacaaagacagccccacctgccctgcctacaggttatgattcagaggaggaggaagagagcaggcccatgagttacgatgagaagcggcagctgagcctggacatcaacaaattacctggggagaagctgggccgagttgtgcatataatccaagccagggagccctctttacgtgattcaaacccagaagagattgagattgattttgaaacactcaagccatccacacttagagagcttgagcgctatgtcctttcctgcctacgtaagaaaccccggaagccctacaccattaagaagcctgtgggaaagacaaaggaggaactggctttggagaaaaagcgggaattagaaaagcggttacaagatgtcagcggacagctcaattctactaaaaagccccccaagaaagcgaatgagaaaacagagtcatcctctgcacagcaagtagcagtgtcacgccttagcgcttccagctccagctcagattccagctcctcctcttcctagcctactcagtgtgaagacgatgacgatgaagactttcatgatgatccacttctatttaataaataaaagatcttaccaacttccaaatgagaaaaatataggttttgctgttcaatagatatactggcagaaaggagacaag

SEQ ID NO: 379478 - DNA, 3866 bp, Homo sapiens
ccctggcgctgaccgatggaccagccgctccgtggggaggactccggaccctggtgggggggcgggggggttctttcgcccccgtggcggagggcccctgagaggcggatacgggtgtgcctttgggggtgatgtggcgtgtggggggaaaggtccgagctcgcctggagggggagggtttttcccttaagtcatccctcccaggacttgctttttctgctctgagccggacgccggaatggagtttgaggaagagattcttcgctgctgctgccttaccgccgagaaccaccacccgccaggcgtcttgcggccacacccctggcgggttcaggcaggctacgcccacgcgacccctcccgtttccctgctttggccaatggaggagctacgaatggcacgacctgctcgagcttggcagtctccagttgggctgtgcatggaagcttgggaagactttgttggaaggggaggcggggagagagtgctggaggctctggggcgatggcttccgcacctcttccaaccaccctctttccctggagtcggcggaccacagctcagccaattggcttggagatgtggcgggttgccacttccctgtgggtctctgcggcactcttctgcctggtgactgacaccttggaaatgaagtttatgacgtcatcgttgcggctggccaatagaaaaagctcccgcggagaggtgttccttccccttcgactcagcttcttcacccgcgtgagcgagcgcgcgcgcgcggagggggtggggaaaatctcaagcagggtggcgcgcatgagcggcgaagctcctcctccccgcctatatataaagggctggcgcggggctcggcggcgccatttcgtgctggagtggagcagcctctagaacgagctggaggattctgcctaccgatacagagccttcgagtcgtccggggccgccattacaatccacctccatccgcttggaaatggccttcgtcccggcctatgactggtcccagcgggcagtacagaccccctagaagcccctggagctcccctttttcgggccccgcccaatcctcggagtctgtccaccccctctactccgccctcaagaggatttcaaagatggaggcggcggctccctaaaccacttttcgtgttcatccgcctccatccgagatcgaaacgggacctcgtcggccccgtaggggcccgacaagaagagggaatccctgcagaccaacagcgggctatattgacgacggtgtctgagatcggggaccgtcttttgaagagtcagtccctccttagttgcccgcctcagctgaggccgccgccattttcttgctgtccgccgtctgcagagcgcgccaagctgcccggagctctccgagaggccccaaagagactgctttcgtgccggccaggcagggggtttgtcgcctggaggcccaagaggaacggcctccccccaacttagcgggttatgctggaccgggcggtgaggggaaccgaggccacccggactttccgcggctgagggcagcgccggttccttgcggtcaagatgctgcaaaacgtgactccccacaataagctccctggggaagggaatgcagggttgctggggctgggcccagaagcagcagcaccagggaaaaggattcgaaaaccctctctcttgtatgagggctttgagagccccacaatggcttcggtgcctgctttgcaacttacccctgccaacccaccacccccggaggtgtccaatcccaaaaagccaggacgagttaccaaccagctgcaatacctacacaaggtagtgatgaaggctctgtggaaacatcagttcgcatggccattccggcagcctgtggatgctgtcaaactgggtctaccggattatcacaaaattataaaacagcctatggacatgggtactattaagaggagacttgaaaacaattattattgggctgcttcagagtgtatgcaagattttaataccatgttcaccaactgttacatttacaacaagcccactgatgatattgtcctaatggcacaaacgctggaaaagatattcctacagaaggttgcatcaatgccacaagaagaacaagagctggtagtgaccatccctaagaacagccacaagaagggggccaagttggcagcgctccagggcagtgttaccagtgcccatcaggtgcctgccgtctcttctgtgtcacacacagccctgtatactcctccacctgagatacctaccactgtcctcaacattccccacccatcagtcatttcctctccacttctcaagtccttgcactctgctggacccccgctccttgctgttactgcagctcctccagcccagccccttgccaagaaaaaaggcgtaaagcggaaagcagatactaccacccctacacctacagccatcttggctcctggttctccagctagccctcctgggagtcttgagcctaaggcagcacggcttccccctatgcgtagagagagtggtcgccccatcaagcccccacgcaaagacttgcctgactctcagcaacaacaccagagctctaagaaaggaaagctttcagaacagttaaaacattgcaatggcattttgaaggagttactctctaagaagcatgctgcctatgcttggcctttctataaaccagtggatgcttctgcacttggcctgcatgactaccatgacatcattaagcaccccatggacctcagcactgtcaagcggaagatggagaaccgtgattaccgggatgcacaggagtttgctgctgatgtacggcttatgttctccaactgctataagtacaatcccccagatcacgatgttgtggcaatggcacgaaagctacaggatgtatttgagttccgttatgccaagatgccagatgaaccactagaaccagggcctttaccagtctctactgccatgccccctggcttggccaaatcgtcttcagagtcctccagtgaggaaagtagcagtgagagctcctctgaggaagaggaggaggaagatgaggaggacgaggaggaagaagagagtgaaagctcagactcagaggaagaaagggctcatcgcttagcagaactacaggaacagcttcgggcagtacatgaacaactggctgctctgtcccagggtccaatatccaagcccaagaggaaaagagagaaaaaagagaaaaagaagaaacggaaggcagagaagcatcgaggccgagctggggccgatgaagatgacaaggggcctagggcaccccgcccacctcaacctaagaagtccaagaaagcaagtggcagtgggggtggcagtgctgctttaggcccttctggctttggaccttctggaggaagtggcaccaagctccccaaaaaggccacaaagacagccccacctgccctgcctacaggttatgattcagaggaggaggaagagagcaggcccatgagttacgatgagaagcggcagctgagcctggacatcaacaaattacctggggagaagctgggccgagttgtgcatataatccaagccagggagccctctttacgtgattcaaacccagaagagattgagattgattttgaaacactcaagccatccacacttagagagcttgagcgctatgtcctttcctgcctacgtaagaaaccccgtctctactaaaaatacaaaattagctgggcatggtggcgcatgcctgtaatcccagctactcgggaggctgaggcaggagaaccacttgaacccaggaggcggaggctgcagtgagccaagatcgcaccactgcgctccagcctgggcaacaagagcgaaactctgtctca

SEQ ID NO: 379479 - DNA, 3500 bp, Homo sapiens
ttgagccgaaagagaaaataggctagtagaggccgggtggttatcggccgaggggcggctcagctgaggccgccgccattttcttgctgtccgccgtctgcagagcgcgccaagctgcccggagctctccgagaggccccaaagagactgctttcgtgccggccaggcagggggtttgtcgcctggaggcccaagaggaacggcctccccccaacttagcgggttatgctggaccgggcggtgaggggaaccgaggccacccggactttccgcggctgagggcagcgccggttccttgcggtcaagatgctgcaaaacgtgactccccacaataagctccctggggaagggaatgcagggttgctggggctgggcccagaagcagcagcaccagggaaaaggattcgaaaaccctctctcttgtatgagggctttgagagccccacaatggcttcggtgcctgctttgcaacttacccctgccaacccaccacccccggaggtgtccaatcccaaaaagccaggacgagttaccaaccagctgcaatacctacacaaggtagtgatgaaggctctgtggaaacatcagttcgcatggccattccggcagcctgtggatgctgtcaaactgggtctaccggattatcacaaaattataaaacagcctatggacatgggtactattaagaggagacttgaaaacaattattattgggctgcttcagagtgtatgcaagattttaataccatgttcaccaactgttacatttacaacaagcccactgatgatattgtcctaatggcacaaacgctggaaaagatattcctacagaaggttgcatcaatgccacaagaagaacaagagctggtagtgaccatccctaagaacagccacaagaagggggccaagttggcagcgctccagggcagtgttaccagtgcccatcaggtgcctgccgtctcttctgtgtcacacacagccctgtatactcctccacctgagatacctaccactgtcctcaacattccccacccatcagtcatttcctctccacttctcaagtccttgcactctgctggacccccgctccttgctgttactgcagctcctccagcccagccccttgccaagaaaaaaggcgtaaagcggaaagcagatactaccacccctacacctacagccatcttggctcctggttctccagctagccctcctgggagtcttgagcctaaggcagcacggcttccccctatgcgtagagagagtggtcgccccatcaagcccccacgcaaagacttgcctgactctcagcaacaacaccagagctctaagaaaggaaagctttcagaacagttaaaacattgcaatggcattttgaaggagttactctctaagaagcatgctgcctatgcttggcctttctataaaccagtggatgcttctgcacttggcctgcatgactaccatgacatcattaagcaccccatggacctcagcactgtcaagcggaagatggagaaccgtgattaccgggatgcacaggagtttgctgctgatgtacggcttatgttctccaactgctataagtacaatcccccagatcacgatgttgtggcaatggcacgaaagctacaggatgtatttgagttccgttatgccaagatgccagatgaaccactagaaccagggcctttaccagtctctactgccatgccccctggcttggccaaatcgtcttcagagtcctccagtgaggaaagtagcagtgagagctcctctgaggaagaggaggaggaagatgaggaggacgaggaggaagaagagagtgaaagctcagactcagaggaagaaagggctcatcgcttagcagaactacaggaacagcttcgggcagtacatgaacaactggctgctctgtcccagggtccaatatccaagcccaagaggaaaagagagaaaaaagagaaaaagaagaaacggaaggcagagaagcatcgaggccgagctggggccgatgaagatgacaaggggcctagggcaccccgcccacctcaacctaagaagtccaagaaagcaagtggcagtgggggtggcagtgctgctttaggcccttctggctttggaccttctggaggaagtggcaccaagctccccaaaaaggccacaaagacagccccacctgccctgcctacaggttatgattcagaggaggaggaagagagcaggcccatgagttacgatgagaagcggcagctgagcctggacatcaacaaattacctggggagaagctgggccgagttgtgcatataatccaagccagggagccctctttacgtgattcaaacccagaagagattgagattgattttgaaacactcaagccatccacacttagagagcttgagcgctatgtcctttcctgcctacgtaagaaaccccggaagccctacaccattaagaagcctgtgggaaagacaaaggaggaactggctttggagaaaaagcgggaattagaaaagcggttacaagatgtcagcggacagctcaattctactaaaaagccccccaagaaagcgaatgagaaaacagagtcatcctctgcacagcaagtagcagtgtcacgccttagcgcttccagctccagctcagattccagctcctcctcttcctcgtcgtcgtcttcagacaccagtgattcagactcaggctaaggggtcaggccagatggggcaggaaggctccgcaggaccggacccctagaccaccctgccccacctgccccttccccctttgctgtgacacttcttcatctcacccccccctgcccccctctaggagagctggctctgcagtgggggagggatgcagggacatttactgaaggagggacatggacaaaacaacattgaattcccagccccattggggagtgatctcttggacacagagcccccattcaaaatggggcagggcaagggtgggagtgtgcaaagccctgatctggagttacctgaggccatagctgccctattcacttctaagggccctgttttgagattgtttgttctaatttattttaagctaggtaaggctggggggagggtggggccgtggtcccctcagcctccatggggagggaagaagggggagctctttttttacgttgatttttttttttctactctgttttccctttttccttccgctccatttggggccctgggggtttcagtcatctccccatttggtcccctggactgtctttgttgattctaacttgtaaataaagaaaatattattcaagttttgagttaccttaatatttgcttttgtagtgtttcaaaaggaacatcataagaattgtcttgataattttgagggaaatattactgcagtgagaaaaggcaatagctaacctataattggattgtcttaatttttaaaccagtaggcttttgctgtgtttttaataaagtaaatatgacttttgtaaattgag

SEQ ID NO: 379480 - DNA, 3427 bp, Homo sapiens
agatcgctccgcccccatccgcaggttctaactttggcctgggactctgcccctctacctcagcacagaatcgccccgggtcctactacagaatcaatccttgaacactgcctccacgtcgccggctcaatctgggcgagaacccagacttccaccgcagccccgcaatctgcagacctcagcggcagcgcaggtggcagacctgcctcctttgcctgtgagtcatggcagctcccatgaatggccaagtgtgtgtggtgactggtgcctccaggggtattggccgtggcattgccttgcagctctgcaaagcaggcgccacagtttacatcactggccgccatctggacacccttcgcgttgttgctcaggaggcacaatccctcgggggccaatgtgtgcctgtggtgtgcgattcaaccccggaggtgtccaatcccaaaaagccaggacgagttaccaaccagctgcaatacctacacaaggtagtgatgaaggctctgtggaaacatcagttcgcatggccattccggcagcctgtggatgctgtcaaactgggtctaccggattatcacaaaattataaaacagcctatggacatgggtactattaagaggagacttgaaaacaattattattgggctgcttcagagtgtatgcaagattttaataccatgttcaccaactgttacatttacaacaagcccactgatgatattgtcctaatggcacaaacgctggaaaagatattcctacagaaggttgcatcaatgccacaagaagaacaagagctggtagtgaccatccctaagaacagccacaagaagggggccaagttggcagcgctccagggcagtgttaccagtgcccatcaggtgcctgccgtctcttctgtgtcacacacagccctgtatactcctccacctgagatacctaccactgtcctcaacattccccacccatcagtcatttcctctccacttctcaagtccttgcactctgctggacccccgctccttgctgttactgcagctcctccagcccagccccttgccaagaaaaaaggcgtaaagcggaaagcagatactaccacccctacacctacagccatcttggctcctggttctccagctagccctcctgggagtcttgagcctaaggcagcacggcttccccctatgcgtagagagagtggtcgccccatcaagcccccacgcaaagacttgcctgactctcagcaacaacaccagagctctaagaaaggaaagctttcagaacagttaaaacattgcaatggcattttgaaggagttactctctaagaagcatgctgcctatgcttggcctttctataaaccagtggatgcttctgcacttggcctgcatgactaccatgacatcattaagcaccccatggacctcagcactgtcaagcggaagatggagaaccgtgattaccgggatgcacaggagtttgctgctgatgtacggcttatgttctccaactgctataagtacaatcccccagatcacgatgttgtggcaatggcacgaaagctacaggatgtatttgagttccgttatgccaagatgccagatgaaccactagaaccagggcctttaccagtctctactgccatgccccctggcttggccaaatcgtcttcagagtcctccagtgaggaaagtagcagtgagagctcctctgaggaagaggaggaggaagatgaggaggacgaggaggaagaagagagtgaaagctcagactcagaggaagaaagggctcatcgcttagcagaactacaggaacagcttcgggcagtacatgaacaactggctgctctgtcccagggtccaatatccaagcccaagaggaaaagagagaaaaaagagaaaaagaagaaacggaaggcagagaagcatcgaggccgagctggggccgatgaagatgacaaggggcctagggcaccccgcccacctcaacctaagaagtccaagaaagcaagtggcagtgggggtggcagtgctgctttaggcccttctggctttggaccttctggaggaagtggcaccaagctccccaaaaaggccacaaagacagccccacctgccctgcctacaggttatgattcagaggaggaggaagagagcaggcccatgagttacgatgagaagcggcagctgagcctggacatcaacaaattacctggggagaagctgggccgagttgtgcatataatccaagccagggagccctctttacgtgattcaaacccagaagagattgagattgattttgaaacactcaagccatccacacttagagagcttgagcgctatgtcctttcctgcctacgtaagaaaccccggaagccctacaccattaagaagcctgtgggaaagacaaaggaggaactggctttggagaaaaagcgggaattagaaaagcggttacaagatgtcagcggacagctcaattctactaaaaagccccccaagaaagcgaatgagaaaacagagtcatcctctgcacagcaagtagcagtgtcacgccttagcgcttccagctccagctcagattccagctcctcctcttcctcgtcgtcgtcttcagacaccagtgattcagactcaggctaaggggtcaggccagatggggcaggaaggctccgcaggaccggacccctagaccaccctgccccacctgccccttccccctttgctgtgacacttcttcatctcacccccccctgcccccctctaggagagctggctctgcagtgggggagggatgcagggacatttactgaaggagggacatggacaaaacaacattgaattcccagccccattggggagtgatctcttggacacagagcccccattcaaaatggggcagggcaagggtgggagtgtgcaaagccctgatctggagttacctgaggccatagctgccctattcacttctaagggccctgttttgagattgtttgttctaatttattttaagctaggtaaggctggggggagggtggggccgtggtcccctcagcctccatggggagggaagaagggggagctctttttttacgttgatttttttttttctactctgttttccctttttccttccgctccatttggggccctgggggtttcagtcatctccccatttggtcccctggactgtctttgttgattctaacttgtaaataaagaaaatattattcaagttttgagttaccttaatatttgcttttgtagtgtttcaaaaggaacatcataagaattgtcttgataattttgagggaaatattactgcagtgagaaaaggcaatagctaacctataattggattgtcttaatttttaaaccagtaggcttttgctgtgtttttaataaagtaaatatgacttttgtaaattgag

SEQ ID NO: 379481 - DNA, 3540 bp, Homo sapiens
aggaagcttggggtttgagtttcttaactccacccattttgcttaagccccatccccatagggctgtagttctgagatgtcgtgccttgtcagaaacaatttgggagttttttaaaatatgaaaaagaacagatagagcctatcagacttaagaaggtgggatctagatagtatactaaaaatattaataaaaggaaggcggggccagcaataaaagctccacagattgtttggatattgtttctgcttaagaagcacttggcataagcttaaccacctcactagggccagcacctggattcatcagactattgtgcagatgcactttttcctcatttggacgatattgccctaattttgttcccatctttacaggctccctggggaagggaatgcagggttgctggggctgggcccagaagcagcagcaccagggaaaaggattcgaaaaccctctctcttgtatgagggctttgagagccccacaatggcttcggtgcctgctttgcaacttacccctgccaacccaccacccccggaggtgtccaatcccaaaaagccaggacgagttaccaaccagctgcaatacctacacaaggtagtgatgaaggctctgtggaaacatcagttcgcatggccattccggcagcctgtggatgctgtcaaactgggtctaccggattatcacaaaattataaaacagcctatggacatgggtactattaagaggagacttgaaaacaattattattgggctgcttcagagtgtatgcaagattttaataccatgttcaccaactgttacatttacaacaagcccactgatgatattgtcctaatggcacaaacgctggaaaagatattcctacagaaggttgcatcaatgccacaagaagaacaagagctggtagtgaccatccctaagaacagccacaagaagggggccaagttggcagcgctccagggcagtgttaccagtgcccatcaggtgcctgccgtctcttctgtgtcacacacagccctgtatactcctccacctgagatacctaccactgtcctcaacattccccacccatcagtcatttcctctccacttctcaagtccttgcactctgctggacccccgctccttgctgttactgcagctcctccagcccagccccttgccaagaaaaaaggcgtaaagcggaaagcagatactaccacccctacacctacagccatcttggctcctggttctccagctagccctcctgggagtcttgagcctaaggcagcacggcttccccctatgcgtagagagagtggtcgccccatcaagcccccacgcaaagacttgcctgactctcagcaacaacaccagagctctaagaaaggaaagctttcagaacagttaaaacattgcaatggcattttgaaggagttactctctaagaagcatgctgcctatgcttggcctttctataaaccagtggatgcttctgcacttggcctgcatgactaccatgacatcattaagcaccccatggacctcagcactgtcaagcggaagatggagaaccgtgattaccgggatgcacaggagtttgctgctgatgtacggcttatgttctccaactgctataagtacaatcccccagatcacgatgttgtggcaatggcacgaaagctacaggatgtatttgagttccgttatgccaagatgccagatgaaccactagaaccagggcctttaccagtctctactgccatgccccctggcttggccaaatcgtcttcagagtcctccagtgaggaaagtagcagtgagagctcctctgaggaagaggaggaggaagatgaggaggacgaggaggaagaagagagtgaaagctcagactcagaggaagaaagggctcatcgcttagcagaactacaggaacagcttcgggcagtacatgaacaactggctgctctgtcccagggtccaatatccaagcccaagaggaaaagagagaaaaaagagaaaaagaagaaacggaaggcagagaagcatcgaggccgagctggggccgatgaagatgacaaggggcctagggcaccccgcccacctcaacctaagaagtccaagaaagcaagtggcagtgggggtggcagtgctgctttaggcccttctggctttggaccttctggaggaagtggcaccaagctccccaaaaaggccacaaagacagccccacctgccctgcctacaggttatgattcagaggaggaggaagagagcaggcccatgagttacgatgagaagcggcagctgagcctggacatcaacaaattacctggggagaagctgggccgagttgtgcatataatccaagccagggagccctctttacgtgattcaaacccagaagagattgagattgattttgaaacactcaagccatccacacttagagagcttgagcgctatgtcctttcctgcctacgtaagaaaccccggaagccctacaccattaagaagcctgtgggaaagacaaaggaggaactggctttggagaaaaagcgggaattagaaaagcggttacaagatgtcagcggacagctcaattctactaaaaagccccccaagaaagcgaatgagaaaacagagtcatcctctgcacagcaagtagcagtgtcacgccttagcgcttccagctccagctcagattccagctcctcctcttcctcgtcgtcgtcttcagacaccagtgattcagactcaggctaaggggtcaggccagatggggcaggaaggctccgcaggaccggacccctagaccaccctgccccacctgccccttccccctttgctgtgacacttcttcatctcacccccccctgcccccctctaggagagctggctctgcagtgggggagggatgcagggacatttactgaaggagggacatggacaaaacaacattgaattcccagccccattggggagtgatctcttggacacagagcccccattcaaaatggggcagggcaagggtgggagtgtgcaaagccctgatctggagttacctgaggccatagctgccctattcacttctaagggccctgttttgagattgtttgttctaatttattttaagctaggtaaggctggggggagggtggggccgtggtcccctcagcctccatggggagggaagaagggggagctctttttttacgttgatttttttttttctactctgttttccctttttccttccgctccatttggggccctgggggtttcagtcatctccccatttggtcccctggactgtctttgttgattctaacttgtaaataaagaaaatattattcaagttttgagttaccttaatatttgcttttgtagtgtttcaaaaggaacatcataagaattgtcttgataattttgagggaaatattactgcagtgagaaaaggcaatagctaacctataattggattgtcttaatttttaaaccagtaggcttttgctgtgtttttaataaagtaaatatgacttttgtaaattgag

SEQ ID NO: 379482 - DNA, 3573 bp, Homo sapiens
gatactgagctagatatagcttgtgctttgctcagcaaaaaatattatacaaaaaggaaagcattcttaaattaaaataatattgtgttcagatagctggattagataaaaatccctctccacaaattttatcatggaggttttttaaaatatgaaaaagaacagatagagcctatcagacttaagaaggtgggatctagatagtatactaaaaatattaataaaaggaaggcggggccagcaataaaagctccacagattgtttggatattgtttctgcttaagaagcacttggcataagcttaaccacctcactagggccagcacctggattcatcagactattgtgcagatgcactttttcctcatttggacgatattgccctaattttgttcccatctttacaggctccctggggaagggaatgcagggttgctggggctgggcccagaagcagcagcaccagggaaaaggattcgaaaaccctctctcttgtatgagggctttgagagccccacaatggcttcggtgcctgctttgcaacttacccctgccaacccaccacccccggaggtgtccaatcccaaaaagccaggacgagttaccaaccagctgcaatacctacacaaggtagtgatgaaggctctgtggaaacatcagttcgcatggccattccggcagcctgtggatgctgtcaaactgggtctaccggattatcacaaaattataaaacagcctatggacatgggtactattaagaggagacttgaaaacaattattattgggctgcttcagagtgtatgcaagattttaataccatgttcaccaactgttacatttacaacaagcccactgatgatattgtcctaatggcacaaacgctggaaaagatattcctacagaaggttgcatcaatgccacaagaagaacaagagctggtagtgaccatccctaagaacagccacaagaagggggccaagttggcagcgctccagggcagtgttaccagtgcccatcaggtgcctgccgtctcttctgtgtcacacacagccctgtatactcctccacctgagatacctaccactgtcctcaacattccccacccatcagtcatttcctctccacttctcaagtccttgcactctgctggacccccgctccttgctgttactgcagctcctccagcccagccccttgccaagaaaaaaggcgtaaagcggaaagcagatactaccacccctacacctacagccatcttggctcctggttctccagctagccctcctgggagtcttgagcctaaggcagcacggcttccccctatgcgtagagagagtggtcgccccatcaagcccccacgcaaagacttgcctgactctcagcaacaacaccagagctctaagaaaggaaagctttcagaacagttaaaacattgcaatggcattttgaaggagttactctctaagaagcatgctgcctatgcttggcctttctataaaccagtggatgcttctgcacttggcctgcatgactaccatgacatcattaagcaccccatggacctcagcactgtcaagcggaagatggagaaccgtgattaccgggatgcacaggagtttgctgctgatgtacggcttatgttctccaactgctataagtacaatcccccagatcacgatgttgtggcaatggcacgaaagctacaggatgtatttgagttccgttatgccaagatgccagatgaaccactagaaccagggcctttaccagtctctactgccatgccccctggcttggccaaatcgtcttcagagtcctccagtgaggaaagtagcagtgagagctcctctgaggaagaggaggaggaagatgaggaggacgaggaggaagaagagagtgaaagctcagactcagaggaagaaagggctcatcgcttagcagaactacaggaacagcttcgggcagtacatgaacaactggctgctctgtcccagggtccaatatccaagcccaagaggaaaagagagaaaaaagagaaaaagaagaaacggaaggcagagaagcatcgaggccgagctggggccgatgaagatgacaaggggcctagggcaccccgcccacctcaacctaagaagtccaagaaagcaagtggcagtgggggtggcagtgctgctttaggcccttctggctttggaccttctggaggaagtggcaccaagctccccaaaaaggccacaaagacagccccacctgccctgcctacaggttatgattcagaggaggaggaagagagcaggcccatgagttacgatgagaagcggcagctgagcctggacatcaacaaattacctggggagaagctgggccgagttgtgcatataatccaagccagggagccctctttacgtgattcaaacccagaagagattgagattgattttgaaacactcaagccatccacacttagagagcttgagcgctatgtcctttcctgcctacgtaagaaaccccggaagccctacaccattaagaagcctgtgggaaagacaaaggaggaactggctttggagaaaaagcgggaattagaaaagcggttacaagatgtcagcggacagctcaattctactaaaaagccccccaagaaagcgaatgagaaaacagagtcatcctctgcacagcaagtagcagtgtcacgccttagcgcttccagctccagctcagattccagctcctcctcttcctcgtcgtcgtcttcagacaccagtgattcagactcaggctaaggggtcaggccagatggggcaggaaggctccgcaggaccggacccctagaccaccctgccccacctgccccttccccctttgctgtgacacttcttcatctcacccccccctgcccccctctaggagagctggctctgcagtgggggagggatgcagggacatttactgaaggagggacatggacaaaacaacattgaattcccagccccattggggagtgatctcttggacacagagcccccattcaaaatggggcagggcaagggtgggagtgtgcaaagccctgatctggagttacctgaggccatagctgccctattcacttctaagggccctgttttgagattgtttgttctaatttattttaagctaggtaaggctggggggagggtggggccgtggtcccctcagcctccatggggagggaagaagggggagctctttttttacgttgatttttttttttctactctgttttccctttttccttccgctccatttggggccctgggggtttcagtcatctccccatttggtcccctggactgtctttgttgattctaacttgtaaataaagaaaatattattcaagttttgagttaccttaatatttgcttttgtagtgtttcaaaaggaacatcataagaattgtcttgataattttgagggaaatattactgcagtgagaaaaggcaatagctaacctataattggattgtcttaatttttaaaccagtaggcttttgctgtgtttttaataaagtaaatatgacttttgtaaattgag

SEQ ID NO: 379483 - DNA, 2695 bp, Homo sapiens
  misc_feature (17)..(17): n is a, c, g, or t
  misc_feature (47)..(47): n is a, c, g, or t
  misc_feature (53)..(53): n is a, c, g, or t
ttgagaatttgtatttnttggagtttgaaacagtagggtggggtttntttgtnttgagaaaaatactgtctataattaagaacagccacaagaagggggccaagttggcagcgctccagggcagtgttaccagtgcccatcaggtgcctgccgtctcttctgtgtcacacacagccctgtatactcctccacctgagatacctaccactgtcctcaacattccccacccatcagtcatttcctctccacttctcaagtccttgcactctgctggacccccgctccttgctgttactgcagctcctccagcccagccccttgccaagaaaaaaggcgtaaagcggaaagcagatactaccacccctacacctacagccatcttggctcctggttctccagctagccctcctgggagtcttgagcctaaggcagcacggcttccccctatgcgtagagagagtggtcgccccatcaagcccccacgcaaagacttgcctgactctcagcaacaacaccagagctctaagaaaggaaagctttcagaacagttaaaacattgcaatggcattttgaaggagttactctctaagaagcatgctgcctatgcttggcctttctataaaccagtggatgcttctgcacttggcctgcatgactaccatgacatcattaagcaccccatggacctcagcactgtcaagcggaagatggagaaccgtgattaccgggatgcacaggagtttgctgctgatgtacggcttatgttctccaactgctataagtacaatcccccagatcacgatgttgtggcaatggcacgaaagctacaggatgtatttgagttccgttatgccaagatgccagatgaaccactagaaccagggcctttaccagtctctactgccatgccccctggcttggccaaatcgtcttcagagtcctccagtgaggaaagtagcagtgagagctcctctgaggaagaggaggaggaagatgaggaggacgaggaggaagaagagagtgaaagctcagactcagaggaagaaagggctcatcgcttagcagaactacaggaacagcttcgggcagtacatgaacaactggctgctctgtcccagggtccaatatccaagcccaagaggaaaagagagaaaaaagagaaaaagaagaaacggaaggcagagaagcatcgaggccgagctggggccgatgaagatgacaaggggcctagggcaccccgcccacctcaacctaagaagtccaagaaagcaagtggcagtgggggtggcagtgctgctttaggcccttctggctttggaccttctggaggaagtggcaccaagctccccaaaaaggccacaaagacagccccacctgccctgcctacaggttatgattcagaggaggaggaagagagcaggcccatgagttacgatgagaagcggcagctgagcctggacatcaacaaattacctggggagaagctgggccgagttgtgcatataatccaagccagggagccctctttacgtgattcaaacccagaagagattgagattgattttgaaacactcaagccatccacacttagagagcttgagcgctatgtcctttcctgcctacgtaagaaaccccggaagccctacaccattaagaagcctgtgggaaagacaaaggaggaactggctttggagaaaaagcgggaattagaaaagcggttacaagatgtcagcggacagctcaattctactaaaaagccccccaagaaagcgaatgagaaaacagagtcatcctctgcacagcaagtagcagtgtcacgccttagcgcttccagctccagctcagattccagctcctcctcttcctcgtcgtcgtcttcagacaccagtgattcagactcaggctaaggggtcaggccagatggggcaggaaggctccgcaggaccggacccctagaccaccctgccccacctgccccttccccctttgctgtgacacttcttcatctcacccccccctgcccccctctaggagagctggctctgcagtgggggagggatgcagggacatttactgaaggagggacatggacaaaacaacattgaattcccagccccattggggagtgatctcttggacacagagcccccattcaaaatggggcagggcaagggtgggagtgtgcaaagccctgatctggagttacctgaggccatagctgccctattcacttctaagggccctgttttgagattgtttgttctaatttattttaagctaggtaaggctggggggagggtggggccgtggtcccctcagcctccatggggagggaagaagggggagctctttttttacgttgatttttttttttctactctgttttccctttttccttccgctccatttggggccctgggggtttcagtcatctccccatttggtcccctggactgtctttgttgattctaacttgtaaataaagaaaatattattcaagttttgagttaccttaatatttgcttttgtagtgtttcaaaaggaacatcataagaattgtcttgataattttgagggaaatattactgcagtgagaaaaggcaatagctaacctataattggattgtcttaatttttaaaccagtaggcttttgctgtgtttttaataaagtaaatatgacttttgtaaattgag

SEQ ID NO: 379484 - DNA, 2428 bp, Homo sapiens
gtcacgaggatctccgaaaggtagctgtactgcacctcctcatgccagcccttgccaagaaaaaaggcgtaaagcggaaagcagatactaccacccctacacctacagccatcttggctcctggttctccagctagccctcctgggagtcttgagcctaaggcagcacggcttccccctatgcgtagagagagtggtcgccccatcaagcccccacgcaaagacttgcctgactctcagcaacaacaccagagctctaagaaaggaaagctttcagaacagttaaaacattgcaatggcattttgaaggagttactctctaagaagcatgctgcctatgcttggcctttctataaaccagtggatgcttctgcacttggcctgcatgactaccatgacatcattaagcaccccatggacctcagcactgtcaagcggaagatggagaaccgtgattaccgggatgcacaggagtttgctgctgatgtacggcttatgttctccaactgctataagtacaatcccccagatcacgatgttgtggcaatggcacgaaagctacaggatgtatttgagttccgttatgccaagatgccagatgaaccactagaaccagggcctttaccagtctctactgccatgccccctggcttggccaaatcgtcttcagagtcctccagtgaggaaagtagcagtgagagctcctctgaggaagaggaggaggaagatgaggaggacgaggaggaagaagagagtgaaagctcagactcagaggaagaaagggctcatcgcttagcagaactacaggaacagcttcgggcagtacatgaacaactggctgctctgtcccagggtccaatatccaagcccaagaggaaaagagagaaaaaagagaaaaagaagaaacggaaggcagagaagcatcgaggccgagctggggccgatgaagatgacaaggggcctagggcaccccgcccacctcaacctaagaagtccaagaaagcaagtggcagtgggggtggcagtgctgctttaggcccttctggctttggaccttctggaggaagtggcaccaagctccccaaaaaggccacaaagacagccccacctgccctgcctacaggttatgattcagaggaggaggaagagagcaggcccatgagttacgatgagaagcggcagctgagcctggacatcaacaaattacctggggagaagctgggccgagttgtgcatataatccaagccagggagccctctttacgtgattcaaacccagaagagattgagattgattttgaaacactcaagccatccacacttagagagcttgagcgctatgtcctttcctgcctacgtaagaaaccccggaagccctacaccattaagaagcctgtgggaaagacaaaggaggaactggctttggagaaaaagcgggaattagaaaagcggttacaagatgtcagcggacagctcaattctactaaaaagccccccaagaaagcgaatgagaaaacagagtcatcctctgcacagcaagtagcagtgtcacgccttagcgcttccagctccagctcagattccagctcctcctcttcctcgtcgtcgtcttcagacaccagtgattcagactcaggctaaggggtcaggccagatggggcaggaaggctccgcaggaccggacccctagaccaccctgccccacctgccccttccccctttgctgtgacacttcttcatctcacccccccctgcccccctctaggagagctggctctgcagtgggggagggatgcagggacatttactgaaggagggacatggacaaaacaacattgaattcccagccccattggggagtgatctcttggacacagagcccccattcaaaatggggcagggcaagggtgggagtgtgcaaagccctgatctggagttacctgaggccatagctgccctattcacttctaagggccctgttttgagattgtttgttctaatttattttaagctaggtaaggctggggggagggtggggccgtggtcccctcagcctccatggggagggaagaagggggagctctttttttacgttgatttttttttttctactctgttttccctttttccttccgctccatttggggccctgggggtttcagtcatctccccatttggtcccctggactgtctttgttgattctaacttgtaaataaagaaaatattattcaagttttgagttaccttaatatttgcttttgtagtgtttcaaaaggaacatcataagaattgtcttgataattttgagggaaatattactgcagtgagaaaaggcaatagctaacctataattggattgtcttaatttttaaaccagtaggcttttgctgtgtttttaataaagtaaatatgacttttgtaaattgag

SEQ ID NO: 379485 - DNA, 3200 bp, Homo sapiens
  misc_feature (17)..(17): n is a, c, g, or t
  misc_feature (47)..(47): n is a, c, g, or t
  misc_feature (53)..(53): n is a, c, g, or t
ttgagaatttgtatttnttggagtttgaaacagtagggtggggtttntttgtnttgagaaaaatactgtctataattaagaacagccacaagaagggggccaagttggcagcgctccagggcagtgttaccagtgcccatcaggtgcctgccgtctcttctgtgtcacacacagccctgtatactcctccacctgagatacctaccactgtcctcaacattccccacccatcagtcatttcctctccacttctcaagtccttgcactctgctggacccccgctccttgctgttactgcagctcctccagcccagccccttgccaagaaaaaaggcgtaaagcggaaagcagatactaccacccctacacctacagccatcttggctcctggttctccagctagccctcctgggagtcttgagcctaaggcagcacggcttccccctatgcgtagagagagtggtcgccccatcaagcccccacgcaaagacttgcctgactctcagcaacaacaccagagctctaagaaaggaaagctttcagaacagttaaaacattgcaatggcattttgaaggagttactctctaagaagcatgctgcctatgcttggcctttctataaaccagtggatgcttctgcacttggcctgcatgactaccatgacatcattaagcaccccatggacctcagcactgtcaaggtacccactgcatggggcagatgggatgctcaggcagtgatgggagcctaggtgcaaaacaataagtctccttatgtgggcacacagcagtctttggttcttggcattttacttttataaaataatagtggaacagaaggtctggtgttttgagaatttgtatttcttggagtttgaaacagtagggtggggtttctttgtcttgagaaaaatactgtctataattaagtactaatgtggcagtgttgggttaaggaagttatagggtggaaagacaggcataggccacctctctgtcacttagaaatgatttctttttctagacataaatatttcttcaacccacccaaattcctttgacttcaaacttgaaccccagggcacagatccttaaggtcatccccactgtgctctcaagagagggctcttcttgtggtgtctggggttggcagggaaaggtgagtcttcctgcctgtgcagcttctgatgctgcctccttctgcagcggaagatggagaaccgtgattaccgggatgcacaggagtttgctgctgatgtacggcttatgttctccaactgctataagtacaatcccccagatcacgatgttgtggcaatggcacgaaagctacaggatgtatttgagttccgttatgccaagatgccagatgaaccactagaaccagggcctttaccagtctctactgccatgccccctggcttggccaaatcgtcttcagagtcctccagtgaggaaagtagcagtgagagctcctctgaggaagaggaggaggaagatgaggaggacgaggaggaagaagagagtgaaagctcagactcagaggaagaaagggctcatcgcttagcagaactacaggaacagcttcgggcagtacatgaacaactggctgctctgtcccagggtccaatatccaagcccaagaggaaaagagagaaaaaagagaaaaagaagaaacggaaggcagagaagcatcgaggccgagctggggccgatgaagatgacaaggggcctagggcaccccgcccacctcaacctaagaagtccaagaaagcaagtggcagtgggggtggcagtgctgctttaggcccttctggctttggaccttctggaggaagtggcaccaagctccccaaaaaggccacaaagacagccccacctgccctgcctacaggttatgattcagaggaggaggaagagagcaggcccatgagttacgatgagaagcggcagctgagcctggacatcaacaaattacctggggagaagctgggccgagttgtgcatataatccaagccagggagccctctttacgtgattcaaacccagaagagattgagattgattttgaaacactcaagccatccacacttagagagcttgagcgctatgtcctttcctgcctacgtaagaaaccccggaagccctacaccattaagaagcctgtgggaaagacaaaggaggaactggctttggagaaaaagcgggaattagaaaagcggttacaagatgtcagcggacagctcaattctactaaaaagccccccaagaaagcgaatgagaaaacagagtcatcctctgcacagcaagtagcagtgtcacgccttagcgcttccagctccagctcagattccagctcctcctcttcctcgtcgtcgtcttcagacaccagtgattcagactcaggctaaggggtcaggccagatggggcaggaaggctccgcaggaccggacccctagaccaccctgccccacctgccccttccccctttgctgtgacacttcttcatctcacccccccctgcccccctctaggagagctggctctgcagtgggggagggatgcagggacatttactgaaggagggacatggacaaaacaacattgaattcccagccccattggggagtgatctcttggacacagagcccccattcaaaatggggcagggcaagggtgggagtgtgcaaagccctgatctggagttacctgaggccatagctgccctattcacttctaagggccctgttttgagattgtttgttctaatttattttaagctaggtaaggctggggggagggtggggccgtggtcccctcagcctccatggggagggaagaagggggagctctttttttacgttgatttttttttttctactctgttttccctttttccttccgctccatttggggccctgggggtttcagtcatctccccatttggtcccctggactgtctttgttgattctaacttgtaaataaagaaaatattattcaagttttgagttaccttaatatttgcttttgtagtgtttcaaaaggaacatcataagaattgtcttgataattttgagggaaatattactgcagtgagaaaaggcaatagctaacctataattggattgtcttaatttttaaaccagtaggcttttgctgtgtttttaataaagtaaatatgacttttgtaaattgag

SEQ ID NO: 379486 - DNA, 1945 bp, Homo sapiens
ctctagagcggccgcctactactactaaattcgcggccgcgtcgactcacgatgttgtggcaatggcacgaaagctacaggatgtatttgagttccgttatgccaagatgccagatgaaccactagaaccagggcctttaccagtctctactgccatgccccctggcttggccaaatcgtcttcagagtcctccagtgaggaaagtagcagtgagagctcctctgaggaagaggaggaggaagatgaggaggacgaggaggaagaagagagtgaaagctcagactcagaggaagaaagggctcatcgcttagcagaactacaggaacagcttcgggcagtacatgaacaactggctgctctgtcccagggtccaatatccaagcccaagaggaaaagagagaaaaaagagaaaaagaagaaacggaaggcagagaagcatcgaggccgagctggggccgatgaagatgacaaggggcctagggcaccccgcccacctcaacctaagaagtccaagaaagcaagtggcagtgggggtggcagtgctgctttaggcccttctggctttggaccttctggaggaagtggcaccaagctccccaaaaaggccacaaagacagccccacctgccctgcctacaggttatgattcagaggaggaggaagagagcaggcccatgagttacgatgagaagcggcagctgagcctggacatcaacaaattacctggggagaagctgggccgagttgtgcatataatccaagccagggagccctctttacgtgattcaaacccagaagagattgagattgattttgaaacactcaagccatccacacttagagagcttgagcgctatgtcctttcctgcctacgtaagaaaccccggaagccctacaccattaagaagcctgtgggaaagacaaaggaggaactggctttggagaaaaagcgggaattagaaaagcggttacaagatgtcagcggacagctcaattctactaaaaagccccccaagaaagcgaatgagaaaacagagtcatcctctgcacagcaagtagcagtgtcacgccttagcgcttccagctccagctcagattccagctcctcctcttcctcgtcgtcgtcttcagacaccagtgattcagactcaggctaaggggtcaggccagatggggcaggaaggctccgcaggaccggacccctagaccaccctgccccacctgccccttccccctttgctgtgacacttcttcatctcacccccccctgcccccctctaggagagctggctctgcagtgggggagggatgcagggacatttactgaaggagggacatggacaaaacaacattgaattcccagccccattggggagtgatctcttggacacagagcccccattcaaaatggggcagggcaagggtgggagtgtgcaaagccctgatctggagttacctgaggccatagctgccctattcacttctaagggccctgttttgagattgtttgttctaatttattttaagctaggtaaggctggggggagggtggggccgtggtcccctcagcctccatggggagggaagaagggggagctctttttttacgttgatttttttttttctactctgttttccctttttccttccgctccatttggggccctgggggtttcagtcatctccccatttggtcccctggactgtctttgttgattctaacttgtaaataaagaaaatattattcaagttttgagttaccttaatatttgcttttgtagtgtttcaaaaggaacatcataagaattgtcttgataattttgagggaaatattactgcagtgagaaaaggcaatagctaacctataattggattgtcttaatttttaaaccagtaggcttttgctgtgtttttaataaagtaaatatgacttttgtaaattgag

SEQ ID NO: 379487 - DNA, 1924 bp, Homo sapiens
atctgtctgatgagctaaggatttccttggggatgtcagtaggaccaaatgcccacaaggtccctcccccatggctgattgccaagatgccagatgaaccactagaaccagggcctttaccagtctctactgccatgccccctggcttggccaaatcgtcttcagagtcctccagtgaggaaagtagcagtgagagctcctctgaggaagaggaggaggaagatgaggaggacgaggaggaagaagagagtgaaagctcagactcagaggaagaaagggctcatcgcttagcagaactacaggaacagcttcgggcagtacatgaacaactggctgctctgtcccagggtccaatatccaagcccaagaggaaaagagagaaaaaagagaaaaagaagaaacggaaggcagagaagcatcgaggccgagctggggccgatgaagatgacaaggggcctagggcaccccgcccacctcaacctaagaagtccaagaaagcaagtggcagtgggggtggcagtgctgctttaggcccttctggctttggaccttctggaggaagtggcaccaagctccccaaaaaggccacaaagacagccccacctgccctgcctacaggttatgattcagaggaggaggaagagagcaggcccatgagttacgatgagaagcggcagctgagcctggacatcaacaaattacctggggagaagctgggccgagttgtgcatataatccaagccagggagccctctttacgtgattcaaacccagaagagattgagattgattttgaaacactcaagccatccacacttagagagcttgagcgctatgtcctttcctgcctacgtaagaaaccccggaagccctacaccattaagaagcctgtgggaaagacaaaggaggaactggctttggagaaaaagcgggaattagaaaagcggttacaagatgtcagcggacagctcaattctactaaaaagccccccaagaaagcgaatgagaaaacagagtcatcctctgcacagcaagtagcagtgtcacgccttagcgcttccagctccagctcagattccagctcctcctcttcctcgtcgtcgtcttcagacaccagtgattcagactcaggctaaggggtcaggccagatggggcaggaaggctccgcaggaccggacccctagaccaccctgccccacctgccccttccccctttgctgtgacacttcttcatctcacccccccctgcccccctctaggagagctggctctgcagtgggggagggatgcagggacatttactgaaggagggacatggacaaaacaacattgaattcccagccccattggggagtgatctcttggacacagagcccccattcaaaatggggcagggcaagggtgggagtgtgcaaagccctgatctggagttacctgaggccatagctgccctattcacttctaagggccctgttttgagattgtttgttctaatttattttaagctaggtaaggctggggggagggtggggccgtggtcccctcagcctccatggggagggaagaagggggagctctttttttacgttgatttttttttttctactctgttttccctttttccttccgctccatttggggccctgggggtttcagtcatctccccatttggtcccctggactgtctttgttgattctaacttgtaaataaagaaaatattattcaagttttgagttaccttaatatttgcttttgtagtgtttcaaaaggaacatcataagaattgtcttgataattttgagggaaatattactgcagtgagaaaaggcaatagctaacctataattggattgtcttaatttttaaaccagtaggcttttgctgtgtttttaataaagtaaatatgacttttgtaaattgag

SEQ ID NO: 379488 - DNA, 1609 bp, Homo sapiens
ccccgcgcagaagcatccactggtttatagaaaggcccagcataggcagcatgcttcttagagagtaaaaagagaaaaagaagaaacggaaggcagagaagcatcgaggccgagctggggccgatgaagatgacaaggggcctagggcaccccgcccacctcaacctaagaagtccaagaaagcaagtggcagtgggggtggcagtgctgctttaggcccttctggctttggaccttctggaggaagtggcaccaagctccccaaaaaggccacaaagacagccccacctgccctgcctacaggttatgattcagaggaggaggaagagagcaggcccatgagttacgatgagaagcggcagctgagcctggacatcaacaaattacctggggagaagctgggccgagttgtgcatataatccaagccagggagccctctttacgtgattcaaacccagaagagattgagattgattttgaaacactcaagccatccacacttagagagcttgagcgctatgtcctttcctgcctacgtaagaaaccccggaagccctacaccattaagaagcctgtgggaaagacaaaggaggaactggctttggagaaaaagcgggaattagaaaagcggttacaagatgtcagcggacagctcaattctactaaaaagccccccaagaaagcgaatgagaaaacagagtcatcctctgcacagcaagtagcagtgtcacgccttagcgcttccagctccagctcagattccagctcctcctcttcctcgtcgtcgtcttcagacaccagtgattcagactcaggctaaggggtcaggccagatggggcaggaaggctccgcaggaccggacccctagaccaccctgccccacctgccccttccccctttgctgtgacacttcttcatctcacccccccctgcccccctctaggagagctggctctgcagtgggggagggatgcagggacatttactgaaggagggacatggacaaaacaacattgaattcccagccccattggggagtgatctcttggacacagagcccccattcaaaatggggcagggcaagggtgggagtgtgcaaagccctgatctggagttacctgaggccatagctgccctattcacttctaagggccctgttttgagattgtttgttctaatttattttaagctaggtaaggctggggggagggtggggccgtggtcccctcagcctccatggggagggaagaagggggagctctttttttacgttgatttttttttttctactctgttttccctttttccttccgctccatttggggccctgggggtttcagtcatctccccatttggtcccctggactgtctttgttgattctaacttgtaaataaagaaaatattattcaagttttgagttaccttaatatttgcttttgtagtgtttcaaaaggaacatcataagaattgtcttgataattttgagggaaatattactgcagtgagaaaaggcaatagctaacctataattggattgtcttaatttttaaaccagtaggcttttgctgtgtttttaataaagtaaatatgacttttgtaaattgag

SEQ ID NO: 379489 - DNA, 1452 bp, Homo sapiens
gtgggttgaccgtggcttgtgggttgaccgtggcttgtgggttgaccgtggcttgtgggttgaccgtggctttggaccttctggaggaagtggcaccaagctccccaaaaaggccacaaagacagccccacctgccctgcctacaggttatgattcagaggaggaggaagagagcaggcccatgagttacgatgagaagcggcagctgagcctggacatcaacaaattacctggggagaagctgggccgagttgtgcatataatccaagccagggagccctctttacgtgattcaaacccagaagagattgagattgattttgaaacactcaagccatccacacttagagagcttgagcgctatgtcctttcctgcctacgtaagaaaccccggaagccctacaccattaagaagcctgtgggaaagacaaaggaggaactggctttggagaaaaagcgggaattagaaaagcggttacaagatgtcagcggacagctcaattctactaaaaagccccccaagaaagcgaatgagaaaacagagtcatcctctgcacagcaagtagcagtgtcacgccttagcgcttccagctccagctcagattccagctcctcctcttcctcgtcgtcgtcttcagacaccagtgattcagactcaggctaaggggtcaggccagatggggcaggaaggctccgcaggaccggacccctagaccaccctgccccacctgccccttccccctttgctgtgacacttcttcatctcacccccccctgcccccctctaggagagctggctctgcagtgggggagggatgcagggacatttactgaaggagggacatggacaaaacaacattgaattcccagccccattggggagtgatctcttggacacagagcccccattcaaaatggggcagggcaagggtgggagtgtgcaaagccctgatctggagttacctgaggccatagctgccctattcacttctaagggccctgttttgagattgtttgttctaatttattttaagctaggtaaggctggggggagggtggggccgtggtcccctcagcctccatggggagggaagaagggggagctctttttttacgttgatttttttttttctactctgttttccctttttccttccgctccatttggggccctgggggtttcagtcatctccccatttggtcccctggactgtctttgttgattctaacttgtaaataaagaaaatattattcaagttttgagttaccttaatatttgcttttgtagtgtttcaaaaggaacatcataagaattgtcttgataattttgagggaaatattactgcagtgagaaaaggcaatagctaacctataattggattgtcttaatttttaaaccagtaggcttttgctgtgtttttaataaagtaaatatgacttttgtaaattgag

SEQ ID NO: 379490 - DNA, 1281 bp, Homo sapiens
taatgggatgtgttggttggcagctgacgttcaagaagggaacttgggaaccttaggggcccataataagatgcttggggcaatcttaatgtatcctgataaatttctttcattagccattaagaagcctgtgggaaagacaaaggaggaactggctttggagaaaaagcgggaattagaaaagcggttacaagatgtcagcggacagctcaattctactaaaaagccccccaagaaaggtgagtatatactttcatgccactacagattgactccatcctgccttcttgactgtcttttattgacaaatgaagattcagacttgaacgtctttaactttcgaatttgttctgcagcgaatgagaaaacagagtcatcctctgcacagcaagtagcagtgtcacgccttagcgcttccagctccagctcagattccagctcctcctcttcctcgtcgtcgtcttcagacaccagtgattcagactcaggctaaggggtcaggccagatggggcaggaaggctccgcaggaccggacccctagaccaccctgccccacctgccccttccccctttgctgtgacacttcttcatctcacccccccctgcccccctctaggagagctggctctgcagtgggggagggatgcagggacatttactgaaggagggacatggacaaaacaacattgaattcccagccccattggggagtgatctcttggacacagagcccccattcaaaatggggcagggcaagggtgggagtgtgcaaagccctgatctggagttacctgaggccatagctgccctattcacttctaagggccctgttttgagattgtttgttctaatttattttaagctaggtaaggctggggggagggtggggccgtggtcccctcagcctccatggggagggaagaagggggagctctttttttacgttgatttttttttttctactctgttttccctttttccttccgctccatttggggccctgggggtttcagtcatctccccatttggtcccctggactgtctttgttgattctaacttgtaaataaagaaaatattattcaagttttgagttaccttaatatttgcttttgtagtgtttcaaaaggaacatcataagaattgtcttgataattttgagggaaatattactgcagtgagaaaaggcaatagctaacctataattggattgtcttaatttttaaaccagtaggcttttgctgtgtttttaataaagtaaatatgacttttgtaaattgag

SEQ ID NO: 379491 - DNA, 1803 bp, Homo sapiens
  misc_feature (1726)..(1726): n is a, c, g, or t
  misc_feature (1729)..(1729): n is a, c, g, or t
  misc_feature (1731)..(1731): n is a, c, g, or t
  misc_feature (1735)..(1735): n is a, c, g, or t
  misc_feature (1742)..(1742): n is a, c, g, or t
  misc_feature (1751)..(1751): n is a, c, g, or t
  misc_feature (1762)..(1762): n is a, c, g, or t
  misc_feature (1765)..(1765): n is a, c, g, or t
ccctggcgctgaccgatggaccagccgctccgtggggaggactccggaccctggtgggggggcgggggggttctttcgcccccgtggcggagggcccctgagaggcggatacgggtgtgcctttgggggtgatgtggcgtgtggggggaaaggtccgagctcgcctggagggggagggtttttcccttaagtcatccctcccaggacttgctttttctgctctgagccggacgccggaatggagtttgaggaagagattcttcgctgctgctgccttaccgccgagaaccaccacccgccaggcgtcttgcggccacacccctggcgggttcaggcaggctacgcccacgcgacccctcccgtttccctgctttggccaatggaggagctacgaatggcacgacctgctcgagcttggcagtctccagttgggctgtgcatggaagcttgggaagactttgttggaaggggaggcggggagagagtgctggaggctctggggcgatggcttccgcacctcttccaaccaccctctttccctggagtcggcggaccacagctcagccaattggcttggagatgtggcgggttgccacttccctgtgggtctctgcggcactcttctgcctggtgactgacaccttggaaatgaagtttatgacgtcatcgttgcggctggccaatagaaaaagctcccgcggagaggtgttccttccccttcgactcagcttcttcacccgcgtgagcgagcgcgcgcgcgcggagggggtggggaaaatctcaagcagggtggcgcgcatgagcggcgaagctcctcctccccgcctatatataaagggctggcgcggggctcggcggcgccatttcgtgctggagtggagcagcctctagaacgagctggaggattctgcctaccgatacagagccttcgagtcgtccggggccgccattacaatccacctccatccgcttggaaatggccttcgtcccggcctatgactggtcccagcgggcagtacagaccccctagaagcccctggagctcccctttttcgggccccgcccaatcctcggagtctgtccaccccctctactccgccctcaagaggatttcaaagatggaggcggcggctccctaaaccacttttcgtgttcatccgcctccatccgagatcgaaacgggacctcgtcggccccgtaggggcccgacaagaagagggaatccctgcagaccaacagcgggctatattgacgacggtgtctgagatcggggaccgtcttttgaagagtcagtccctccttagttgcccgcctcagctgaggccgccgccattttcttgctgtccgccgtctgcagagcgcgccaagctgcccggagctctccgagaggccccaaagagactgctttcgtgccggccaggcagggggtttgtcgcctggaggcccaagaggaacggcctccccccaacttagcgggttatgctggaccgggcggtgaggggaaccgaggccacccggactttccgcggctgagggcagcgccggttccttgcggtcaagatgctgcaaaacgtgactccccacaataagctccctggggaagggaatgcagggttgctggggctgggcccagaagcagcagcaccagggaaaaggattcgaaaaccctctctcttgtatgagggctttgagagccccatggttcggctgcgttgggattaactgnacncnccgnggtcacncaagccggngtcccggcccnccngggtgaggcctgggaacctctggccgcctgttttgcgg

SEQ ID NO: 379492 - DNA, 1593 bp, Homo sapiens
ccctggcgctgaccgatggaccagccgctccgtggggaggactccggaccctggtgggggggcgggggggttctttcgcccccgtggcggagggcccctgagaggcggatacgggtgtgcctttgggggtgatgtggcgtgtggggggaaaggtccgagctcgcctggagggggagggtttttcccttaagtcatccctcccaggacttgctttttctgctctgagccggacgccggaatggagtttgaggaagagattcttcgctgctgctgccttaccgccgagaaccaccacccgccaggcgtcttgcggccacacccctggcgggttcaggcaggctacgcccacgcgacccctcccgtttccctgctttggccaatggaggagctacgaatggcacgacctgctcgagcttggcagtctccagttgggctgtgcatggaagcttgggaagactttgttggaaggggaggcggggagagagtgctggaggctctggggcgatggcttccgcacctcttccaaccaccctctttccctggagtcggcggaccacagctcagccaattggcttggagatgtggcgggttgccacttccctgtgggtctctgcggcactcttctgcctggtgactgacaccttggaaatgaagtttatgacgtcatcgttgcggctggccaatagaaaaagctcccgcggagaggtgttccttccccttcgactcagcttcttcacccgcgtgagcgagcgcgcgcgcgcggagggggtggggaaaatctcaagcagggtggcgcgcatgagcggcgaagctcctcctccccgcctatatataaagggctggcgcggggctcggcggcgccatttcgtgctggagtggagcagcctctagaacgagctggaggattctgcctaccgatacagagccttcgagtcgtccggggccgccattacaatccacctccatccgcttggaaatggccttcgtcccggcctatgactggtcccagcgggcagtacagaccccctagaagcccctggagctcccctttttcgggccccgcccaatcctcggagtctgtccaccccctctactccgccctcaagaggatttcaaagatggaggcggcggctccctaaaccacttttcgtgttcatccgcctccatccgagatcgaaacgggacctcgtcggccccgtaggggcccgacaagaagagggaatccctgcagaccaacagcgggctatattgacgacggtgtctgagatcggggaccgtcttttgaagagtcagtccctccttagttgcccgcctcagctgaggccgccgccattttcttgctgtccgccgtctgcagagcgcgccaagctgcccggagctctccgagaggccaagagatgttcgtgcggcagcaggggtgcgctggagccaagagaaggctccccaatagggtatgcgacggcgggggaacgagcacgattcgggtgggagcggcctgggcaagtgaaggtcccaaaagccggagagcggggtgggggcacaacggaagtgacctgtgggtgaccaagggggtggaacggcccgggccagcga

SEQ ID NO: 379493 - DNA, 380 bp, Homo sapiens
gtgagtggaaaggttggagtttgaaaaataaatggtatggggagttattttgtcatgtgtgctgcatagcctcaacgtgagggtctcactgttctgtacagttgtaaattggagctatatcacttggtggctgggtatgtagggcactgtttatcagcatagttttgagtttgtgcctctttctaggatgtatttgagttccgttatgccaagatgccagatgaaccactagaaccagggcctttaccagtctctactgccatgccccctggcttggccaaatcgtcttcagagtcctccagtgaggaaagtagcagtgagagctcctctgaggaagaggaggaggaagatgaggaggacgaggaggaagaagagagtga

SEQ ID NO: 379494 - DNA, 450 bp, Homo sapiens
ttgaaggttatttagaacacttcatacttgggggtggtggtcctgtttcttagaaatcaccagagacctgagtagaccagggatctgttttcttgtcagctctcaagttttttcttctttcgaattttgggagacagttaggagaaagtggaaattagtagtggcctggagtagaaattttctttaagatttgatgacaagatgactggtgggggtatggtaatggcctagggcctgaatgcctctgagaaagatggtgtgtatctatcttctgttggcattttttaactttctttattgctgtctgtgttctcatagcccactgatgatattgtcctaatggcacaaacgctggaaaagatattcctacagaaggttgcatcaatgccacaagaagaacaagagctggtagtgaccatccctaagaacagccacaagaagggggccaag

SEQ ID NO: 379495 - DNA, 4055 bp, Homo sapiens
ctcgagatccattgtgctctaaaggcggaccacagctcagccaattggcttggagatgtggcgggttgccacttccctgtgggtctctgcggcactcttctgcctggtgactgacaccttggaaatgaagtttatgacgtcatcgttgcggctggccaatagaaaaagctcccgcggagaggtgttccttccccttcgactcagcttcttcacccgcgtgagcgagcgcgcgcgcgcggagggggtggggaaaatctcaagcagggtggcgcgcatgagcggcgaagctcctcctccccgcctatatataaagggctggcgcggggctcggcggcgccatttcgtgctggagtggagcagcctctagaacgagctggaggattctgcctaccgatacagagccttcgagtcgtccggggccgccattacaatccacctccatccgcttggaaatggccttcgtcccggcctatgactggtcccagcgggcagtacagaccccctagaagcccctggagctcccctttttcgggccccgcccaatcctcggagtctgtccaccccctctactccgccctcaagaggatttcaaagatggaggcggcggctccctaaaccacttttcgtgttcatccgcctccatccgagatcgaaacgggacctcgtcggccccgtaggggcccgacaagaagagggaatccctgcagaccaacagcgggctatattgacgacggtgtctgagatcggggaccgtcttttgaagagtcagtccctccttagttgcccgcctcagctgaggccgccgccattttcttgctgtccgccgtctgcagagcgcgccaagctgcccggagctctccgagaggccccaaagagactgctttcgtgccggccaggcagggggtttgtcgcctggaggcccaagaggaacggcctccccccaacttagcgggttatgctggaccgggcggtgaggggaaccgaggccacccggactttccgcggctgagggcagcgccggttccttgcggtcaagatgctgcaaaacgtgactccccacaataagctccctggggaagggaatgcagggttgctggggctgggcccagaagcagcagcaccagggaaaaggattcgaaaaccctctctcttgtatgagggctttgagagccccacaatggcttcggtgcctgctttgcaacttacccctgccaacccaccacccccggaggtgtccaatcccaaaaagccaggacgagttaccaaccagctgcaatacctacacaaggtagtgatgaaggctctgtggaaacatcagttcgcatggccattccggcagcctgtggatgctgtcaaactgggtctaccggattatcacaaaattataaaacagcctatggacatgggtactattaagaggagacttgaaaacaattattattgggctgcttcagagtgtatgcaagattttaataccatgttcaccaactgttacatttacaacaagcccactgatgatattgtcctaatggcacaaacgctggaaaagatattcctacagaaggttgcatcaatgccacaagaagaacaagagctggtagtgaccatccctaagaacagccacaagaagggggccaagttggcagcgctccagggcagtgttaccagtgcccatcaggtgcctgccgtctcttctgtgtcacacacagccctgtatactcctccacctgagatacctaccactgtcctcaacattccccacccatcagtcatttcctctccacttctcaagtccttgcactctgctggacccccgctccttgctgttactgcagctcctccagcccagccccttgccaagaaaaaaggcgtaaagcggaaagcagatactaccacccctacacctacagccatcttggctcctggttctccagctagccctcctgggagtcttgagcctaaggcagcacggcttccccctatgcgtagagagagtggtcgccccatcaagcccccacgcaaagacttgcctgactctcagcaacaacaccagagctctaagaaaggaaagctttcagaacagttaaaacattgcaatggcattttgaaggagttactctctaagaagcatgctgcctatgcttggcctttctataaaccagtggatgcttctgcacttggcctgcatgactaccatgacatcattaagcaccccatggacctcagcactgtcaagcggaagatggagaaccgtgattaccgggatgcacaggagtttgctgctgatgtacggcttatgttctccaactgctataagtacaatcccccagatcacgatgttgtggcaatggcacgaaagctacaggatgtatttgagttccgttatgccaagatgccagatgaaccactagaaccagggcctttaccagtctctactgccatgccccctggcttggccaaatcgtcttcagagtcctccagtgaggaaagtagcagtgagagctcctctgaggaagaggaggaggaagatgaggaggacgaggaggaagaagagagtgaaagctcagactcagaggaagaaagggctcatcgcttagcagaactacaggaacagcttcgggcagtacatgaacaactggctgctctgtcccagggtccaatatccaagcccaagaggaaaagagagaaaaaagagaaaaagaagaaacggaaggcagagaagcatcgaggccgagctggggccgatgaagatgacaaggggcctagggcaccccgcccacctcaacctaagaagtccaagaaagcaagtggcagtgggggtggcagtgctgctttaggcccttctggctttggaccttctggaggaagtggcaccaagctccccaaaaaggccacaaagacagccccacctgccctgcctacaggttatgattcagaggaggaggaagagagcaggcccatgagttacgatgagaagcggcagctgagcctggacatcaacaaattacctggggagaagctgggccgagttgtgcatataatccaagccagggagccctctttacgtgattcaaacccagaagagattgagattgattttgaaacactcaagccatccacacttagagagcttgagcgctatgtcctttcctgcctacgtaagaaaccccggaagccctacaccattaagaagcctgtgggaaagacaaaggaggaactggctttggagaaaaagcgggaattagaaaagcggttacaagatgtcagcggacagctcaattctactaaaaagccccccaagaaagcgaatgagaaaacagagtcatcctctgcacagcaagtagcagtgtcacgccttagcgcttccagctccagctcagattccagctcctcctcttcctcgtcgtcgtcttcagacaccagtgattcagactcaggctaaggggtcaggccagatggggcaggaaggctccgcaggaccggacccctagaccaccctgccccacctgccccttccccctttgctgtgacacttcttcatctcacccccccctgcccccctctaggagagctggctctgcagtgggggagggatgcagggacatttactgaaggagggacatggacaaaacaacattgaattcccagccccattggggagtgatctcttggacacagagcccccattcaaaatggggcagggcaagggtgggagtgtgcaaagccctgatctggagttacctgaggccatagctgccctattcacttctaagggccctgttttgagattgtttgttctaatttattttaagctaggtaaggctggggggagggtggggccgtggtcccctcagcctccatggggagggaagaagggggagctctttttttacgttgatttttttttttctactctgttttccctttttccttccgctccatttggggccctgggggtttcagtcatctccccatttggtcccctggactgtctttgttgattctaacttgtaaataaagaaaatattattctttagagcacaatggatctcgag

SEQ ID NO: 379496 - DNA, 3388 bp, Homo sapiens
  misc_feature (2643)..(2643): n is a, c, g, or t
  misc_feature (2651)..(2652): n is a, c, g, or t
  misc_feature (2668)..(2668): n is a, c, g, or t
  misc_feature (2671)..(2671): n is a, c, g, or t
  misc_feature (2674)..(2674): n is a, c, g, or t
  misc_feature (2689)..(2689): n is a, c, g, or t
  misc_feature (2691)..(2691): n is a, c, g, or t
  misc_feature (2698)..(2698): n is a, c, g, or t
  misc_feature (2703)..(2703): n is a, c, g, or t
  misc_feature (2710)..(2710): n is a, c, g, or t
  misc_feature (2717)..(2717): n is a, c, g, or t
  misc_feature (2720)..(2720): n is a, c, g, or t
  misc_feature (2729)..(2729): n is a, c, g, or t
  misc_feature (2732)..(2732): n is a, c, g, or t
  misc_feature (2753)..(2754): n is a, c, g, or t
  misc_feature (2763)..(2763): n is a, c, g, or t
  misc_feature (2767)..(2767): n is a, c, g, or t
  misc_feature (2775)..(2776): n is a, c, g, or t
  misc_feature (2789)..(2789): n is a, c, g, or t
atggtgaaaagatatatatatatatatattcagaattaggcagctggactcagtttagatgatcccaattttgttggcaacatccaaagcatcgtaatcaggagccagtcgaacatatgccttcttctctccatcaggccgaatcagggtgttgaccttggccacatcaatgtcatacagcttcttcacagcctgtttaatctggtgcttgttggctttaacatccacaatgaacacaagtgtgttgttgtcttctatcttcttcatggcagactcagtggtcagcggaaacttgatgatagcatagtggtcaagcttgtttctcctgggagcgctcttccgaggatatttgggctgtctccggagtcgcagtgtcttcggccgccggaaggtgggtgacgtgcggatcttcttctttttgtggctgtggacacctttcaacactgccttcttggcctttaaagccttcgctttggcttcagctttaggaggggcaggagcttccttcttcgctttcggctccctaaaccacttttcgtgttcatccgcctccatccgagatcgaaacgggacctcgtcggccccgtaggggcccgacaagaagagggaatccctgcagaccaacagcgggctatattgacgacggtgtctgagatcggggaccgtcttttgaagagtcagtccctccttagttgcccgcctcagctgaggccgccgccattttcttgctgtccgccgtctgcagagcgcgccaagctgcccggagctctccgagaggccccaaagagactgctttcgtgccggccaggcagggggtttgtcgcctggaggcccaagaggaacggcctccccccaacttagcgggttatgctggaccgggcggtgaggggaaccgaggccacccggactttccgcggctgagggcagcgccggttccttgcggtcaagatgctgcaaaacgtgactccccacaataagctccctggggaagggaatgcagggttgctggggctgggcccagaagcagcagcaccagggaaaaggattcgaaaaccctctctcttgtatgagggctttgagagccccacaatggcttcggtgcctgctttgcaacttacccctgccaacccaccacccccggaggtgtccaatcccaaaaagccaggacgagttaccaaccagctgcaatacctacacaaggtagtgatgaaggctctgtggaaacatcagttcgcatggccattccggcagcctgtggatgctgtcaaactgggtctaccggattatcacaaaattataaaacagcctatggacatgggtactattaagaggagacttgaaaacaattattattgggctgcttcagagtgtatgcaagattttaataccatgttcaccaactgttacatttacaacaagcccactgatgatattgtcctaatggcacaaacgctggaaaagatattcctacagaaggttgcatcaatgccacaagaagaacaagagctggtagtgaccatccctaagaacagccacaagaagggggccaagttggcagcgctccagggcagtgttaccagtgcccatcaggtgcctgccgtctcttctgtgtcacacacagccctgtatactcctccacctgagatacctaccactgtcctcaacattccccacccatcagtcatttcctctccacttctcaagtccttgcactctgctggacccccgctccttgctgttactgcagctcctccagcccagccccttgccaagaaaaaaggcgtaaagcggaaagcagatactaccacccctacacctacagccatcttggctcctggttctccagctagccctcctgggagtcttgagcctaaggcagcacggcttccccctatgcgtagagagagtggtcgccccatcaagcccccacgcaaagacttgcctgactctcagcaacaacaccagagctctaagaaaggaaagctttcagaacagttaaaacattgcaatggcattttgaaggagttactctctaagaagcatgctgcctatgcttggcctttctataaaccagtggatgcttctgcacttggcctgcatgactaccatgacatcattaagcaccccatggacctcagcactgtcaagcggaagatggagaaccgtgattaccgggatgcacaggagtttgctgctgatgtacggcttatgttctccaactgctataagtacaatcccccagatcacgatgttgtggcaatggcacgaaagctacaggatgtatttgagttccgttatgccaagatgccagatgaaccactagaaccagggcctttaccagtctctactgccatgccccctggcttggccaaatcgtcttcagagtcctccagtgaggaaagtagcagtgagagctcctctgaggaagaggaggaggaagatgaggaggacgaggaggaagaagagagtgaaagctcagactcagaggaagaaagggctcatcgcttagcagaactacaggaacagcttcgggcagtacatgaacaactggctgctctgtcccagggtccaatatccaagcccaagaggaaaagagagaaaaaagagaaaaagaagaaacggaagtttttttttttttttttntttgaganngagtctcgctttgtcnccnagnctggagtgcagtggngngatctcngctcnctgcaanctccgcntcncgggttcangcnattctcctgcctcagcctccnnagtagctgngacnacaggcgnncgccaccacgccnggcctgggatcttttttatcacgaatattcccaaccaccgtataatgtgaggctcccacatatccacacctatgaggccggttgcatagccatgctgctgcaagattcttgcaaaagtggtttcgttctcagggagtccacctgagcctgcgttccactgaagggcccggtatccattgctggcgtccatgcctgatctgaaggaatgtctccctgtgaggaatgcagctcggcttggggtgcagagcggggcggccgccaggtgctgagtgagcctcacaccttcctctgcaagctggtcaatattcggcgttctcagtgtattgttcccgtagcaaccgagatccccagtgcctagatcatccgccatgatcagtaggatatttggtttaaaggcatttgcagttttaggttcacacgtcttcagaagcaagcataaaaacagtagcaccggcaaagagtccctggcggcgggcgcggcgcgtcccctccgcgcggcggatcgcatggccgagcgctggcccagagcgcaggaccttgccctgcgcactccgcgcccgggcgccgctagtgccaaggcttccgccctccctcgtgcc

SEQ ID NO: 379497 - DNA, 4818 bp, Homo sapiens
tttcgaacgagcagaaatgtattggtaactgtaggtgtgagtggggagggattagaaaggtgcttggacgtgcaaatttgggagacgtattttagcttttgtggtctttgggactaaacagtagtaaataatgttttgctcgtctttccatcgtttggcttgagggagggagtggagtattataagactctggcaacactgttttagactgtggggcatgggaacgttagatcccctcatcgccgttctgaagcccgtagctgttcgccatagaggagcaggccgcggcttctaagatggcgtctttttcctcgtttcagattcttcgctgctgctgccttaccgccgagaaccaccacccgccaggcgtcttgcggccacacccctggcgggttcaggcaggctacgcccacgcgacccctcccgtttccctgctttggccaatggaggagctacgaatggcacgacctgctcgagcttggcagtctccagttgggctgtgcatggaagcttgggaagactttgttggaaggggaggcggggagagagtgctggaggctctggggcgatggcttccgcacctcttccaaccaccctctttccctggagtcggcggaccacagctcagccaattggcttggagatgtggcgggttgccacttccctgtgggtctctgcggcactcttctgcctggtgactgacaccttggaaatgaagtttatgacgtcatcgttgcggctggccaatagaaaaagctcccgcggagaggtgttccttccccttcgactcagcttcttcacccgcgtgagcgagcgcgcgcgcgcggagggggtggggaaaatctcaagcagggtggcgcgcatgagcggcgaagctcctcctccccgcctatatataaagggctggcgcggggctcggcggcgccatttcgtgctggagtggagcagcctctagaacgagctggaggattctgcctaccgatacagagccttcgagtcgtccggggccgccattacaatccacctccatccgcttggaaatggccttcgtcccggcctatgactggtcccagcgggcagtacagaccccctagaagcccctggagctcccctttttcgggccccgcccaatcctcggagtctgtccaccccctctactccgccctcaagaggatttcaaagatggaggcggcggctccctaaaccacttttcgtgttcatccgcctccatccgagatcgaaacgggacctcgtcggccccgtaggggcccgacaagaagagggaatccctgcagaccaacagcgggctatattgacgacggtgtctgagatcggggaccgtcttttgaagagtcagtccctccttagttgcccgcctcagctgaggccgccgccattttcttgctgtccgccgtctgcagagcgcgccaagctgcccggagctctccgagaggccccaaagagactgctttcgtgccggccaggcagggggtttgtcgcctggaggcccaagaggaacggcctccccccaacttagcgggttatgctggaccgggcggtgaggggaaccgaggccacccggactttccgcggctgagggcagcgccggttccttgcggtcaagatgctgcaaaacgtgactccccacaataagctccctggggaagggaatgcagggttgctggggctgggcccagaagcagcagcaccagggaaaaggattcgaaaaccctctctcttgtatgagggctttgagagccccacaatggcttcggtgcctgctttgcaacttacccctgccaacccaccacccccggaggtgtccaatcccaaaaagccaggacgagttaccaaccagctgcaatacctacacaaggtagtgatgaaggctctgtggaaacatcagttcgcatggccattccggcagcctgtggatgctgtcaaactgggtctaccggattatcacaaaattataaaacagcctatggacatgggtactattaagaggagacttgaaaacaattattattgggctgcttcagagtgtatgcaagattttaataccatgttcaccaactgttacatttacaacaagcccactgatgatattgtcctaatggcacaaacgctggaaaagatattcctacagaaggttgcatcaatgccacaagaagaacaagagctggtagtgaccatccctaagaacagccacaagaagggggccaagttggcagcgctccagggcagtgttaccagtgcccatcaggtgcctgccgtctcttctgtgtcacacacagccctgtatactcctccacctgagatacctaccactgtcctcaacattccccacccatcagtcatttcctctccacttctcaagtccttgcactctgctggacccccgctccttgctgttactgcagctcctccagcccagccccttgccaagaaaaaaggcgtaaagcggaaagcagatactaccacccctacacctacagccatcttggctcctggttctccagctagccctcctgggagtcttgagcctaaggcagcacggcttccccctatgcgtagagagagtggtcgccccatcaagcccccacgcaaagacttgcctgactctcagcaacaacaccagagctctaagaaaggaaagctttcagaacagttaaaacattgcaatggcattttgaaggagttactctctaagaagcatgctgcctatgcttggcctttctataaaccagtggatgcttctgcacttggcctgcatgactaccatgacatcattaagcaccccatggacctcagcactgtcaagcggaagatggagaaccgtgattaccgggatgcacaggagtttgctgctgatgtacggcttatgttctccaactgctataagtacaatcccccagatcacgatgttgtggcaatggcacgaaagctacaggatgtatttgagttccgttatgccaagatgccagatgaaccactagaaccagggcctttaccagtctctactgccatgccccctggcttggccaaatcgtcttcagagtcctccagtgaggaaagtagcagtgagagctcctctgaggaagaggaggaggaagatgaggaggacgaggaggaagaagagagtgaaagctcagactcagaggaagaaagggctcatcgcttagcagaactacaggaacagcttcgggcagtacatgaacaactggctgctctgtcccagggtccaatatccaagcccaagaggaaaagagagaaaaaagagaaaaagaagaaacggaaggcagagaagcatcgaggccgagctggggccgatgaagatgacaaggggcctagggcaccccgcccacctcaacctaagaagtccaagaaagcaagtggcagtgggggtggcagtgctgctttaggcccttctggctttggaccttctggaggaagtggcaccaagctccccaaaaaggccacaaagacagccccacctgccctgcctacaggttatgattcagaggaggaggaagagagcaggcccatgagttacgatgagaagcggcagctgagcctggacatcaacaaattacctggggagaagctgggccgagttgtgcatataatccaagccagggagccctctttacgtgattcaaacccagaagagattgagattgattttgaaacactcaagccatccacacttagagagcttgagcgctatgtcctttcctgcctacgtaagaaaccccggaagccctacaccattaagaagcctgtgggaaagacaaaggaggaactggctttggagaaaaagcgggaattagaaaagcggttacaagatgtcagcggacagctcaattctactaaaaagccccccaagaaagcgaatgagaaaacagagtcatcctctgcacagcaagtagcagtgtcacgccttagcgcttccagctccagctcagattccagctcctcctcttcctcgtcgtcgtcttcagacaccagtgattcagactcaggctaaggggtcaggccagatggggcaggaaggctccgcaggaccggacccctagaccaccctgccccacctgccccttccccctttgctgtgacacttcttcatctcacccccccctgcccccctctaggagagctggctctgcagtgggggagggatgcagggacatttactgaaggagggacatggacaaaacaacattgaattcccagccccattggggagtgatctcttggacacagagcccccattcaaaatggggcagggcaagggtgggagtgtgcaaagccctgatctggagttacctgaggccatagctgccctattcacttctaagggccctgttttgagattgtttgttctaatttattttaagctaggtaaggctggggggagggtggggccgtggtcccctcagcctccatggggagggaagaagggggagctctttttttacgttgatttttttttttctactctgttttccctttttccttccgctccatttggggccctgggggtttcagtcatctccccatttggtcccctggactgtctttgttgattctaacttgtaaataaagaaaatattattcaagttttgagttaccttaatatttgcttttgtagtgtttcaaaaggaacatcataagaattgtcttgataattttgagggaaatattactgcagtgagaaaaggcaatagctaacctataattggattgtcttaatttttaaaccagtaggcttttgctgtgtttttaataaagtaaatatgacttttgtaaattgag

SEQ ID NO: 379498 - DNA, 4871 bp, Homo sapiens
ccctggcgctgaccgatggaccagccgctccgtggggaggactccggaccctggtgggggggcgggggggttctttcgcccccgtggcggagggcccctgagaggcggatacgggtgtgcctttgggggtgatgtggcgtgtggggggaaaggtccgagctcgcctggagggggagggtttttcccttaagtcatccctcccaggacttgctttttctgctctgagccggacgccggaatggagtttgaggaagagattcttcgctgctgctgccttaccgccgagaaccaccacccgccaggcgtcttgcggccacacccctggcgggttcaggcaggctacgcccacgcgacccctcccgtttccctgctttggccaatggaggagctacgaatggcacgacctgctcgagcttggcagtctccagttgggctgtgcatggaagcttgggaagactttgttggaaggggaggcggggagagagtgctggaggctctggggcgatggcttccgcacctcttccaaccaccctctttccctggagtcggcggaccacagctcagccaattggcttggagatgtggcgggttgccacttccctgtgggtctctgcggcactcttctgcctggtgactgacaccttggaaatgaagtttatgacgtcatcgttgcggctggccaatagaaaaagctcccgcggagaggtgttccttccccttcgactcagcttcttcacccgcgtgagcgagcgcgcgcgcgcggagggggtggggaaaatctcaagcagggtggcgcgcatgagcggcgaagctcctcctccccgcctatatataaagggctggcgcggggctcggcggcgccatttcgtgctggagtggagcagcctctagaacgagctggaggattctgcctaccgatacagagccttcgagtcgtccggggccgccattacaatccacctccatccgcttggaaatggccttcgtcccggcctatgactggtcccagcgggcagtacagaccccctagaagcccctggagctcccctttttcgggccccgcccaatcctcggagtctgtccaccccctctactccgccctcaagaggatttcaaagatggaggcggcggctccctaaaccacttttcgtgttcatccgcctccatccgagatcgaaacgggacctcgtcggccccgtaggggcccgacaagaagagggaatccctgcagaccaacagcgggctatattgacgacggtgtctgagatcggggaccgtcttttgaagagtcagtccctccttagttgcccgcctcagctgaggccgccgccattttcttgctgtccgccgtctgcagagcgcgccaagctgcccggagctctccgagaggccccaaagagactgctttcgtgccggccaggcagggggtttgtcgcctggaggcccaagaggaacggcctccccccaacttagcgggttatgctggaccgggcggtgaggggaaccgaggccacccggactttccgcggctgagggcagcgccggttccttgcggtcaagatgctgcaaaacgtgactccccacaataagctccctggggaagggaatgcagggttgctggggctgggcccagaagcagcagcaccagggaaaaggattcgaaaaccctctctcttgtatgagggctttgagagccccacaatggcttcggtgcctgctttgcaacttacccctgccaacccaccacccccggaggtgtccaatcccaaaaagccaggacgagttaccaaccagctgcaatacctacacaaggtagtgatgaaggctctgtggaaacatcagttcgcatggccattccggcagcctgtggatgctgtcaaactgggtctaccggattatcacaaaattataaaacagcctatggacatgggtactattaagaggagacttgaaaacaattattattgggctgcttcagagtgtatgcaagattttaataccatgttcaccaactgttacatttacaacaagcccactgatgatattgtcctaatggcacaaacgctggaaaagatattcctacagaaggttgcatcaatgccacaagaagaacaagagctggtagtgaccatccctaagaacagccacaagaagggggccaagttggcagcgctccagggcagtgttaccagtgcccatcaggtgcctgccgtctcttctgtgtcacacacagccctgtatactcctccacctgagatacctaccactgtcctcaacattccccacccatcagtcatttcctctccacttctcaagtccttgcactctgctggacccccgctccttgctgttactgcagctcctccagcccagccccttgccaagaaaaaaggcgtaaagcggaaagcagatactaccacccctacacctacagccatcttggctcctggttctccagctagccctcctgggagtcttgagcctaaggcagcacggcttccccctatgcgtagagagagtggtcgccccatcaagcccccacgcaaagacttgcctgactctcagcaacaacaccagagctctaagaaaggaaagctttcagaacagttaaaacattgcaatggcattttgaaggagttactctctaagaagcatgctgcctatgcttggcctttctataaaccagtggatgcttctgcacttggcctgcatgactaccatgacatcattaagcaccccatggacctcagcactgtcaagcggaagatggagaaccgtgattaccgggatgcacaggagtttgctgctgatgtacggcttatgttctccaactgctataagtacaatcccccagatcacgatgttgtggcaatggcacgaaagctacaggatgtatttgagttccgttatgccaagatgccagatgaaccactagaaccagggcctttaccagtctctactgccatgccccctggcttggccaaatcgtcttcagagtcctccagtgaggaaagtagcagtgagagctcctctgaggaagaggaggaggaagatgaggaggacgaggaggaagaagagagtgaaagctcagactcagaggaagaaagggctcatcgcttagcagaactacaggaacagcttcgggcagtacatgaacaactggctgctctgtcccagggtccaatatccaagcccaagaggaaaagagagaaaaaagagaaaaagaagaaacggaaggcagagaagcatcgaggccgagctggggccgatgaagatgacaaggggcctagggcaccccgcccacctcaacctaagaagtccaagaaagcaagtggcagtgggggtggcagtgctgctttaggcccttctggctttggaccttctggaggaagtggcaccaagctccccaaaaaggccacaaagacagccccacctgccctgcctacaggttatgattcagaggaggaggaagagagcaggcccatgagttacgatgagaagcggcagctgagcctggacatcaacaaattacctggggagaagctgggccgagttgtgcatataatccaagccagggagccctctttacgtgattcaaacccagaagagattgagattgattttgaaacactcaagccatccacacttagagagcttgagcgctatgtcctttcctgcctacgtaagaaaccccggaagccctacaccattaagaagcctgtgggaaagacaaaggaggaactggctttggagaaaaagcgggaattagaaaagcggttacaagatgtcagcggacagctcaattctactaaaaagccccccaagaaaggtgagtatatactttcatgccactacagattgactccatcctgccttcttgactgtcttttattgacaaatgaagattcagacttgaacgtctttaactttcgaatttgttctgcagcgaatgagaaaacagagtcatcctctgcacagcaagtagcagtgtcacgccttagcgcttccagctccagctcagattccagctcctcctcttcctcgtcgtcgtcttcagacaccagtgattcagactcaggctaaggggtcaggccagatggggcaggaaggctccgcaggaccggacccctagaccaccctgccccacctgccccttccccctttgctgtgacacttcttcatctcacccccccctgcccccctctaggagagctggctctgcagtgggggagggatgcagggacatttactgaaggagggacatggacaaaacaacattgaattcccagccccattggggagtgatctcttggacacagagcccccattcaaaatggggcagggcaagggtgggagtgtgcaaagccctgatctggagttacctgaggccatagctgccctattcacttctaagggccctgttttgagattgtttgttctaatttattttaagctaggtaaggctggggggagggtggggccgtggtcccctcagcctccatggggagggaagaagggggagctctttttttacgttgatttttttttttctactctgttttccctttttccttccgctccatttggggccctgggggtttcagtcatctccccatttggtcccctggactgtctttgttgattctaacttgtaaataaagaaaatattattcaagttttgagttaccttaatatttgcttttgtagtgtttcaaaaggaacatcataagaattgtcttgataattttgagggaaatattactgcagtgagaaaaggcaatagctaacctataattggattgtcttaatttttaaaccagtaggcttttgctgtgtttttaataaagtaaatatgacttttgtaaattgag

SEQ ID NO: 379499 - DNA, 4846 bp, Homo sapiens
ccctggcgctgaccgatggaccagccgctccgtggggaggactccggaccctggtgggggggcgggggggttctttcgcccccgtggcggagggcccctgagaggcggatacgggtgtgcctttgggggtgatgtggcgtgtggggggaaaggtccgagctcgcctggagggggagggtttttcccttaagtcatccctcccaggacttgctttttctgctctgagccggacgccggaatggagtttgaggaagagattcttcgctgctgctgccttaccgccgagaaccaccacccgccaggcgtcttgcggccacacccctggcgggttcaggcaggctacgcccacgcgacccctcccgtttccctgctttggccaatggaggagctacgaatggcacgacctgctcgagcttggcagtctccagttgggctgtgcatggaagcttgggaagactttgttggaaggggaggcggggagagagtgctggaggctctggggcgatggcttccgcacctcttccaaccaccctctttccctggagtcggcggaccacagctcagccaattggcttggagatgtggcgggttgccacttccctgtgggtctctgcggcactcttctgcctggtgactgacaccttggaaatgaagtttatgacgtcatcgttgcggctggccaatagaaaaagctcccgcggagaggtgttccttccccttcgactcagcttcttcacccgcgtgagcgagcgcgcgcgcgcggagggggtggggaaaatctcaagcagggtggcgcgcatgagcggcgaagctcctcctccccgcctatatataaagggctggcgcggggctcggcggcgccatttcgtgctggagtggagcagcctctagaacgagctggaggattctgcctaccgatacagagccttcgagtcgtccggggccgccattacaatccacctccatccgcttggaaatggccttcgtcccggcctatgactggtcccagcgggcagtacagaccccctagaagcccctggagctcccctttttcgggccccgcccaatcctcggagtctgtccaccccctctactccgccctcaagaggatttcaaagatggaggcggcggctccctaaaccacttttcgtgttcatccgcctccatccgagatcgaaacgggacctcgtcggccccgtaggggcccgacaagaagagggaatccctgcagaccaacagcgggctatattgacgacggtgtctgagatcggggaccgtcttttgaagagtcagtccctccttagttgcccgcctcagctgaggccgccgccattttcttgctgtccgccgtctgcagagcgcgccaagctgcccggagctctccgagaggccccaaagagactgctttcgtgccggccaggcagggggtttgtcgcctggaggcccaagaggaacggcctccccccaacttagcgggttatgctggaccgggcggtgaggggaaccgaggccacccggactttccgcggctgagggcagcgccggttccttgcggtcaagatgctgcaaaacgtgactccccacaataagctccctggggaagggaatgcagggttgctggggctgggcccagaagcagcagcaccagggaaaaggattcgaaaaccctctctcttgtatgagggctttgagagccccacaatggcttcggtgcctgctttgcaacttacccctgccaacccaccacccccggaggtgtccaatcccaaaaagccaggacgagttaccaaccagctgcaatacctacacaaggtagtgatgaaggctctgtggaaacatcagttcgcatggccattccggcagcctgtggatgctgtcaaactgggtctaccgattcccacctcgggttgggagaggaccacggtggccaaaattcttagcttcttcctttccctcatgcagcccatggatagccagccccagaggattatcacaaaattataaaacagcctatggacatgggtactattaagaggagacttgaaaacaattattattgggctgcttcagagtgtatgcaagattttaataccatgttcaccaactgttacatttacaacaagcccactgatgatattgtcctaatggcacaaacgctggaaaagatattcctacagaaggttgcatcaatgccacaagaagaacaagagctggtagtgaccatccctaagaacagccacaagaagggggccaagttggcagcgctccagggcagtgttaccagtgcccatcaggtgcctgccgtctcttctgtgtcacacacagccctgtatactcctccacctgagatacctaccactgtcctcaacattccccacccatcagtcatttcctctccacttctcaagtccttgcactctgctggacccccgctccttgctgttactgcagctcctccagcccagccccttgccaagaaaaaaggcgtaaagcggaaagcagatactaccacccctacacctacagccatcttggctcctggttctccagctagccctcctgggagtcttgagcctaaggcagcacggcttccccctatgcgtagagagagtggtcgccccatcaagcccccacgcaaagacttgcctgactctcagcaacaacaccagagctctaagaaaggaaagctttcagaacagttaaaacattgcaatggcattttgaaggagttactctctaagaagcatgctgcctatgcttggcctttctataaaccagtggatgcttctgcacttggcctgcatgactaccatgacatcattaagcaccccatggacctcagcactgtcaagcggaagatggagaaccgtgattaccgggatgcacaggagtttgctgctgatgtacggcttatgttctccaactgctataagtacaatcccccagatcacgatgttgtggcaatggcacgaaagctacaggatgtatttgagttccgttatgccaagatgccagatgaaccactagaaccagggcctttaccagtctctactgccatgccccctggcttggccaaatcgtcttcagagtcctccagtgaggaaagtagcagtgagagctcctctgaggaagaggaggaggaagatgaggaggacgaggaggaagaagagagtgaaagctcagactcagaggaagaaagggctcatcgcttagcagaactacaggaacagcttcgggcagtacatgaacaactggctgctctgtcccagggtccaatatccaagcccaagaggaaaagagagaaaaaagagaaaaagaagaaacggaaggcagagaagcatcgaggccgagctggggccgatgaagatgacaaggggcctagggcaccccgcccacctcaacctaagaagtccaagaaagcaagtggcagtgggggtggcagtgctgctttaggcccttctggctttggaccttctggaggaagtggcaccaagctccccaaaaaggccacaaagacagccccacctgccctgcctacaggttatgattcagaggaggaggaagagagcaggcccatgagttacgatgagaagcggcagctgagcctggacatcaacaaattacctggggagaagctgggccgagttgtgcatataatccaagccagggagccctctttacgtgattcaaacccagaagagattgagattgattttgaaacactcaagccatccacacttagagagcttgagcgctatgtcctttcctgcctacgtaagaaaccccggaagccctacaccattaagaagcctgtgggaaagacaaaggaggaactggctttggagaaaaagcgggaattagaaaagcggttacaagatgtcagcggacagctcaattctactaaaaagccccccaagaaagcgaatgagaaaacagagtcatcctctgcacagcaagtagcagtgtcacgccttagcgcttccagctccagctcagattccagctcctcctcttcctcgtcgtcgtcttcagacaccagtgattcagactcaggctaaggggtcaggccagatggggcaggaaggctccgcaggaccggacccctagaccaccctgccccacctgccccttccccctttgctgtgacacttcttcatctcacccccccctgcccccctctaggagagctggctctgcagtgggggagggatgcagggacatttactgaaggagggacatggacaaaacaacattgaattcccagccccattggggagtgatctcttggacacagagcccccattcaaaatggggcagggcaagggtgggagtgtgcaaagccctgatctggagttacctgaggccatagctgccctattcacttctaagggccctgttttgagattgtttgttctaatttattttaagctaggtaaggctggggggagggtggggccgtggtcccctcagcctccatggggagggaagaagggggagctctttttttacgttgatttttttttttctactctgttttccctttttccttccgctccatttggggccctgggggtttcagtcatctccccatttggtcccctggactgtctttgttgattctaacttgtaaataaagaaaatattattcaagttttgagttaccttaatatttgcttttgtagtgtttcaaaaggaacatcataagaattgtcttgataattttgagggaaatattactgcagtgagaaaaggcaatagctaacctataattggattgtcttaatttttaaaccagtaggcttttgctgtgtttttaataaagtaaatatgacttttgtaaattgag

SEQ ID NO: 379500 - DNA, 4213 bp, Homo sapiens
ccctggcgctgaccgatggaccagccgctccgtggggaggactccggaccctggtgggggggcgggggggttctttcgcccccgtggcggagggcccctgagaggcggatacgggtgtgcctttgggggtgatgtggcgtgtggggggaaaggtccgagctcgcctggagggggagggtttttcccttaagtcatccctcccaggacttgctttttctgctctgagccggacgccggaatggagtttgaggaagagattcttcgctgctgctgccttaccgccgagaaccaccacccgccaggcgtcttgcggccacacccctggcgggttcaggcaggctacgcccacgcgacccctcccgtttccctgctttggccaatggaggagctacgaatggcacgacctgctcgagcttggcagtctccagttgggctgtgcatggaagcttgggaagactttgttggaaggggaggcggggagagagtgctggaggctctggggcgatggcttccgcacctcttccaaccaccctctttccctggagtcggcggaccacagctcagccaattggcttggagatgtggcgggttgccacttccctgtgggtctctgcggcactcttctgcctggtgactgacaccttggaaatgaagtttatgacgtcatcgttgcggctggccaatagaaaaagctcccgcggagaggtgttccttccccttcgactcagcttcttcacccgcgtgagcgagcgcgcgcgcgcggagggggtggggaaaatctcaagcagggtggcgcgcatgagcggcgaagctcctcctccccgcctatatataaagggctggcgcggggctcggcggcgccatttcgtgctggagtggagcagcctctagaacgagctggaggattctgcctaccgatacagagccttcgagtcgtccggggccgccattacaatccacctccatccgcttggaaatggccttcgtcccggcctatgactggtcccagcgggcagtacagaccccctagaagcccctggagctcccctttttcgggccccgcccaatcctcggagtctgtccaccccctctactccgccctcaagaggatttcaaagatggaggcggcggctccctaaaccacttttcgtgttcatccgcctccatccgagatcgaaacgggacctcgtcggccccgtaggggcccgacaagaagagggaatccctgcagaccaacagcgggctatattgacgacggtgtctgagatcggggaccgtcttttgaagagtcagtccctccttagttgcccgcctcagctgaggccgccgccattttcttgctgtccgccgtctgcagagcgcgccaagctgcccggagctctccgagaggccccaaagagactgctttcgtgccggccaggcagggggtttgtcgcctggaggcccaagaggaacggcctccccccaacttagcgggttatgctggaccgggcggtgaggggaaccgaggccacccggactttccgcggctgagggcagcgccggttccttgcggtcaagatgctgcaaaacgtgactccccacaataagctccctggggaagggaatgcagggttgctggggctgggcccagaagcagcagcaccagggaaaaggattcgaaaaccctctctcttgtatgagggctttgagagccccacaatggcttcggtgcctgctttgcaacttacccctgccaacccaccacccccggaggtgtccaatcccaaaaagccaggacgagttaccaaccagctgcaatacctacacaaggtagtgatgaaggctctgtggaaacatcagttcgcatggccattccggcagcctgtggatgctgtcaaactgggtctaccggattatcacaaaattataaaacagcctatggacatgggtactattaagaggagacttgaaaacaattattattgggctgcttcagagtgtatgcaagattttaataccatgttcaccaactgttacatttacaacaagcccactgatgatattgtcctaatggcacaaacgctggaaaagatattcctacagaaggttgcatcaatgccacaagaagaacaagagctggtagtgaccatccctaagaacagccacaagaagggggccaagttggcagcgctccagggcagtgttaccagtgcccatcaggtgcctgccgtctcttctgtgtcacacacagccctgtatactcctccacctgagatacctaccactgtcctcaacattccccacccatcagtcatttcctctccacttctcaagtccttgcactctgctggacccccgctccttgctgttactgcagctcctccagcccagccccttgccaagaaaaaaggcgtaaagcggaaagcagatactaccacccctacacctacagccatcttggctcctggttctccagctagccctcctgggagtcttgagcctaaggcagcacggcttccccctatgcgtagagagagtggtcgccccatcaagcccccacgcaaagacttgcctgactctcagcaacaacaccagagctctaagaaaggaaagctttcagaacagttaaaacattgcaatggcattttgaaggagttactctctaagaagcatgctgcctatgcttggcctttctataaaccagtggatgcttctgcacttggcctgcatgactaccatgacatcattaagcaccccatggacctcagcactgtcaagcggaagatggagaaccgtgattaccgggatgcacaggagtttgctgctgatgtacggcttatgttctccaactgctataagtacaatcccccagatcacgatgttgtggcaatggcacgaaagctacaggatgtatttgagttccgttatgccaagatgccagatgaaccactagaaccagggcctttaccagtctctactgccatgccccctggcttggccaaatcgtcttcagagtcctccagtgaggaaagtagcagtgagagctcctctgaggaagaggaggaggaagatgaggaggacgaggaggaagaagagagtgaaagctcagactcagaggaagaaagggctcatcgcttagcagaactacaggaacagcttcgggcagtacatgaacaactggctgctctgtcccagggtccaatatccaagcccaagaggaaaagagagaaaaaaagcgggaattagaaaagcggttacaagatgtcagcggacagctcaattctactaaaaagccccccaagaaagcgaatgagaaaacagagtcatcctctgcacagcaagtagcagtgtcacgccttagcgcttccagctccagctcagattccagctcctcctcttcctcgtcgtcgtcttcagacaccagtgattcagactcaggctaaggggtcaggccagatggggcaggaaggctccgcaggaccggacccctagaccaccctgccccacctgccccttccccctttgctgtgacacttcttcatctcacccccccctgcccccctctaggagagctggctctgcagtgggggagggatgcagggacatttactgaaggagggacatggacaaaacaacattgaattcccagccccattggggagtgatctcttggacacagagcccccattcaaaatggggcagggcaagggtgggagtgtgcaaagccctgatctggagttacctgaggccatagctgccctattcacttctaagggccctgttttgagattgtttgttctaatttattttaagctaggtaaggctggggggagggtggggccgtggtcccctcagcctccatggggagggaagaagggggagctctttttttacgttgatttttttttttctactctgttttccctttttccttccgctccatttggggccctgggggtttcagtcatctccccatttggtcccctggactgtctttgttgattctaacttgtaaataaagaaaatattattcaagttttgagttaccttaatatttgcttttgtagtgtttcaaaaggaacatcataagaattgtcttgataattttgagggaaatattactgcagtgagaaaaggcaatagctaacctataattggattgtcttaatttttaaaccagtaggcttttgctgtgtttttaataaagtaaatatgacttttgtaaattgag

SEQ ID NO: 379501 - DNA, 5259 bp, Homo sapiens
ccctggcgctgaccgatggaccagccgctccgtggggaggactccggaccctggtgggggggcgggggggttctttcgcccccgtggcggagggcccctgagaggcggatacgggtgtgcctttgggggtgatgtggcgtgtggggggaaaggtccgagctcgcctggagggggagggtttttcccttaagtcatccctcccaggacttgctttttctgctctgagccggacgccggaatggagtttgaggaagagattcttcgctgctgctgccttaccgccgagaaccaccacccgccaggcgtcttgcggccacacccctggcgggttcaggcaggctacgcccacgcgacccctcccgtttccctgctttggccaatggaggagctacgaatggcacgacctgctcgagcttggcagtctccagttgggctgtgcatggaagcttgggaagactttgttggaaggggaggcggggagagagtgctggaggctctggggcgatggcttccgcacctcttccaaccaccctctttccctggagtcggcggaccacagctcagccaattggcttggagatgtggcgggttgccacttccctgtgggtctctgcggcactcttctgcctggtgactgacaccttggaaatgaagtttatgacgtcatcgttgcggctggccaatagaaaaagctcccgcggagaggtgttccttccccttcgactcagcttcttcacccgcgtgagcgagcgcgcgcgcgcggagggggtggggaaaatctcaagcagggtggcgcgcatgagcggcgaagctcctcctccccgcctatatataaagggctggcgcggggctcggcggcgccatttcgtgctggagtggagcagcctctagaacgagctggaggattctgcctaccgatacagagccttcgagtcgtccggggccgccattacaatccacctccatccgcttggaaatggccttcgtcccggcctatgactggtcccagcgggcagtacagaccccctagaagcccctggagctcccctttttcgggccccgcccaatcctcggagtctgtccaccccctctactccgccctcaagaggatttcaaagatggaggcggcggctccctaaaccacttttcgtgttcatccgcctccatccgagatcgaaacgggacctcgtcggccccgtaggggcccgacaagaagagggaatccctgcagaccaacagcgggctatattgacgacggtgtctgagatcggggaccgtcttttgaagagtcagtccctccttagttgcccgcctcagctgaggccgccgccattttcttgctgtccgccgtctgcagagcgcgccaagctgcccggagctctccgagaggccccaaagagactgctttcgtgccggccaggcagggggtttgtcgcctggaggcccaagaggaacggcctccccccaacttagcgggttatgctggaccgggcggtgaggggaaccgaggccacccggactttccgcggctgagggcagcgccggttccttgcggtcaagatgctgcaaaacgtgactccccacaataagctccctggggaagggaatgcagggttgctggggctgggcccagaagcagcagcaccagggaaaaggattcgaaaaccctctctcttgtatgagggctttgagagccccacaatggcttcggtgcctgctttgcaacttacccctgccaacccaccacccccggaggtgtccaatcccaaaaagccaggacgagttaccaaccagctgcaatacctacacaaggtagtgatgaaggctctgtggaaacatcagttcgcatggccattccggcagcctgtggatgctgtcaaactgggtctaccggattatcacaaaattataaaacagcctatggacatgggtactattaagaggagacttgaaaacaattattattgggctgcttcagagtgtatgcaagattttaataccatgttcaccaactgttacatttacaacaagcccactgatgatattgtcctaatggcacaaacgctggaaaagatattcctacagaaggttgcatcaatgccacaagaagaacaagagctggtagtgaccatccctaagaacagccacaagaagggggccaagttggcagcgctccagggcagtgttaccagtgcccatcaggtgcctgccgtctcttctgtgtcacacacagccctgtatactcctccacctgagatacctaccactgtcctcaacattccccacccatcagtcatttcctctccacttctcaagtccttgcactctgctggacccccgctccttgctgttactgcagctcctccagcccagccccttgccaagaaaaaaggcgtaaagcggaaagcagatactaccacccctacacctacagccatcttggctcctggttctccagctagccctcctgggagtcttgagcctaaggcagcacggcttccccctatgcgtagagagagtggtcgccccatcaagcccccacgcaaagacttgcctgactctcagcaacaacaccagagctctaagaaaggaaagctttcagaacagttaaaacattgcaatggcattttgaaggagttactctctaagaagcatgctgcctatgcttggcctttctataaaccagtggatgcttctgcacttggcctgcatgactaccatgacatcattaagcaccccatggacctcagcactgtcaaggtacccactgcatggggcagatgggatgctcaggcagtgatgggagcctaggtgcaaaacaataagtctccttatgtgggcacacagcagtctttggttcttggcattttacttttataaaataatagtggaacagaaggtctggtgttttgagaatttgtatttcttggagtttgaaacagtagggtggggtttctttgtcttgagaaaaatactgtctataattaagtactaatgtggcagtgttgggttaaggaagttatagggtggaaagacaggcataggccacctctctgtcacttagaaatgatttctttttctagacataaatatttcttcaacccacccaaattcctttgacttcaaacttgaaccccagggcacagatccttaaggtcatccccactgtgctctcaagagagggctcttcttgtggtgtctggggttggcagggaaaggtgagtcttcctgcctgtgcagcttctgatgctgcctccttctgcagcggaagatggagaaccgtgattaccgggatgcacaggagtttgctgctgatgtacggcttatgttctccaactgctataagtacaatcccccagatcacgatgttgtggcaatggcacgaaagctacaggatgtatttgagttccgttatgccaagatgccagatgaaccactagaaccagggcctttaccagtctctactgccatgccccctggcttggccaaatcgtcttcagagtcctccagtgaggaaagtagcagtgagagctcctctgaggaagaggaggaggaagatgaggaggacgaggaggaagaagagagtgaaagctcagactcagaggaagaaagggctcatcgcttagcagaactacaggaacagcttcgggcagtacatgaacaactggctgctctgtcccagggtccaatatccaagcccaagaggaaaagagagaaaaaagagaaaaagaagaaacggaaggcagagaagcatcgaggccgagctggggccgatgaagatgacaaggggcctagggcaccccgcccacctcaacctaagaagtccaagaaagcaagtggcagtgggggtggcagtgctgctttaggcccttctggctttggaccttctggaggaagtggcaccaagctccccaaaaaggccacaaagacagccccacctgccctgcctacaggttatgattcagaggaggaggaagagagcaggcccatgagttacgatgagaagcggcagctgagcctggacatcaacaaattacctggggagaagctgggccgagttgtgcatataatccaagccagggagccctctttacgtgattcaaacccagaagagattgagattgattttgaaacactcaagccatccacacttagagagcttgagcgctatgtcctttcctgcctacgtaagaaaccccggaagccctacaccattaagaagcctgtgggaaagacaaaggaggaactggctttggagaaaaagcgggaattagaaaagcggttacaagatgtcagcggacagctcaattctactaaaaagccccccaagaaagcgaatgagaaaacagagtcatcctctgcacagcaagtagcagtgtcacgccttagcgcttccagctccagctcagattccagctcctcctcttcctcgtcgtcgtcttcagacaccagtgattcagactcaggctaaggggtcaggccagatggggcaggaaggctccgcaggaccggacccctagaccaccctgccccacctgccccttccccctttgctgtgacacttcttcatctcacccccccctgcccccctctaggagagctggctctgcagtgggggagggatgcagggacatttactgaaggagggacatggacaaaacaacattgaattcccagccccattggggagtgatctcttggacacagagcccccattcaaaatggggcagggcaagggtgggagtgtgcaaagccctgatctggagttacctgaggccatagctgccctattcacttctaagggccctgttttgagattgtttgttctaatttattttaagctaggtaaggctggggggagggtggggccgtggtcccctcagcctccatggggagggaagaagggggagctctttttttacgttgatttttttttttctactctgttttccctttttccttccgctccatttggggccctgggggtttcagtcatctccccatttggtcccctggactgtctttgttgattctaacttgtaaataaagaaaatattattcaagttttgagttaccttaatatttgcttttgtagtgtttcaaaaggaacatcataagaattgtcttgataattttgagggaaatattactgcagtgagaaaaggcaatagctaacctataattggattgtcttaatttttaaaccagtaggcttttgctgtgtttttaataaagtaaatatgacttttgtaaattgag

SEQ ID NO: 379502 - DNA, 4936 bp, Homo sapiens
ccctggcgctgaccgatggaccagccgctccgtggggaggactccggaccctggtgggggggcgggggggttctttcgcccccgtggcggagggcccctgagaggcggatacgggtgtgcctttgggggtgatgtggcgtgtggggggaaaggtccgagctcgcctggagggggagggtttttcccttaagtcatccctcccaggacttgctttttctgctctgagccggacgccggaatggagtttgaggaagagattcttcgctgctgctgccttaccgccgagaaccaccacccgccaggcgtcttgcggccacacccctggcgggttcaggcaggctacgcccacgcgacccctcccgtttccctgctttggccaatggaggagctacgaatggcacgacctgctcgagcttggcagtctccagttgggctgtgcatggaagcttgggaagactttgttggaaggggaggcggggagagagtgctggaggctctggggcgatggcttccgcacctcttccaaccaccctctttccctggagtcggcggaccacagctcagccaattggcttggagatgtggcgggttgccacttccctgtgggtctctgcggcactcttctgcctggtgactgacaccttggaaatgaagtttatgacgtcatcgttgcggctggccaatagaaaaagctcccgcggagaggtgttccttccccttcgactcagcttcttcacccgcgtgagcgagcgcgcgcgcgcggagggggtggggaaaatctcaagcagggtggcgcgcatgagcggcgaagctcctcctccccgcctatatataaagggctggcgcggggctcggcggcgccatttcgtgctggagtggagcagcctctagaacgagctggaggattctgcctaccgatacagagccttcgagtcgtccggggccgccattacaatccacctccatccgcttggaaatggccttcgtcccggcctatgactggtcccagcgggcagtacagaccccctagaagcccctggagctcccctttttcgggccccgcccaatcctcggagtctgtccaccccctctactccgccctcaagaggatttcaaagatggaggcggcggctccctaaaccacttttcgtgttcatccgcctccatccgagatcgaaacgggacctcgtcggccccgtaggggcccgacaagaagagggaatccctgcagaccaacagcgggctatattgacgacggtgtctgagatcggggaccgtcttttgaagagtcagtccctccttagttgcccgcctcagctgaggccgccgccattttcttgctgtccgccgtctgcagagcgcgccaagctgcccggagctctccgagaggccccaaagagactgctttcgtgccggccaggcagggggtttgtcgcctggaggcccaagaggaacggcctccccccaacttagcgggttatgctggaccgggcggtgaggggaaccgaggccacccggactttccgcggctgagggcagcgccggttccttgcggtcaagatgctgcaaaacgtgactccccacaataagctccctggggaagggaatgcagggttgctggggctgggcccagaagcagcagcaccagggaaaaggattcgaaaaccctctctcttgtatgagggctttgagagccccacaatggcttcggtgcctgctttgcaacttacccctgccaacccaccacccccggaggtgtccaatcccaaaaagccaggacgagttaccaaccagctgcaatacctacacaaggtagtgatgaaggctctgtggaaacatcagttcgcatggccattccggcagcctgtggatgctgtcaaactgggtctaccggattatcacaaaattataaaacagcctatggacatgggtactattaagaggagacttgaaaacaattattattgggctgcttcagagtgtatgcaagattttaataccatgttcaccaactgttacatttacaacaagcccactgatgatattgtcctaatggcacaaacgctggaaaagatattcctacagaaggttgcatcaatgccacaagaagaacaagagctggtagtgaccatccctaagaacagccacaagaagggggccaagttggcagcgctccagggcagtgttaccagtgcccatcaggtgcctgccgtctcttctgtgtcacacacagccctgtatactcctccacctgagatacctaccactgtcctcaacattccccacccatcagtcatttcctctccacttctcaagtccttgcactctgctggacccccgctccttgctgttactgcagctcctccagcccagccccttgccaagaaaaaaggcgtaaagcggaaagcagatactaccacccctacacctacagccatcttggctcctggttctccagctagccctcctgggagtcttgagcctaaggcagcacggcttccccctatgcgtagagagagtggtcgccccatcaagcccccacgcaaagacttgcctgactctcagcaacaacaccagagctctaagaaaggaaagctttcagaacagttaaaacattgcaatggcattttgaaggagttactctctaagaagcatgctgcctatgcttggcctttctataaaccagtggatgcttctgcacttggcctgcatgactaccatgacatcattaagcaccccatggacctcagcactgtcaagacataaatatttcttcaacccacccaaattcctttgacttcaaacttgaaccccagggcacagatccttaaggtcatccccactgtgctctcaagagagggctcttcttgtggtgtctggggttggcagggaaaggtgagtcttcctgcctgtgcagcttctgatgctgcctccttctgcagcggaagatggagaaccgtgattaccgggatgcacaggagtttgctgctgatgtacggcttatgttctccaactgctataagtacaatcccccagatcacgatgttgtggcaatggcacgaaagctacaggatgtatttgagttccgttatgccaagatgccagatgaaccactagaaccagggcctttaccagtctctactgccatgccccctggcttggccaaatcgtcttcagagtcctccagtgaggaaagtagcagtgagagctcctctgaggaagaggaggaggaagatgaggaggacgaggaggaagaagagagtgaaagctcagactcagaggaagaaagggctcatcgcttagcagaactacaggaacagcttcgggcagtacatgaacaactggctgctctgtcccagggtccaatatccaagcccaagaggaaaagagagaaaaaagagaaaaagaagaaacggaaggcagagaagcatcgaggccgagctggggccgatgaagatgacaaggggcctagggcaccccgcccacctcaacctaagaagtccaagaaagcaagtggcagtgggggtggcagtgctgctttaggcccttctggctttggaccttctggaggaagtggcaccaagctccccaaaaaggccacaaagacagccccacctgccctgcctacaggttatgattcagaggaggaggaagagagcaggcccatgagttacgatgagaagcggcagctgagcctggacatcaacaaattacctggggagaagctgggccgagttgtgcatataatccaagccagggagccctctttacgtgattcaaacccagaagagattgagattgattttgaaacactcaagccatccacacttagagagcttgagcgctatgtcctttcctgcctacgtaagaaaccccggaagccctacaccattaagaagcctgtgggaaagacaaaggaggaactggctttggagaaaaagcgggaattagaaaagcggttacaagatgtcagcggacagctcaattctactaaaaagccccccaagaaagcgaatgagaaaacagagtcatcctctgcacagcaagtagcagtgtcacgccttagcgcttccagctccagctcagattccagctcctcctcttcctcgtcgtcgtcttcagacaccagtgattcagactcaggctaaggggtcaggccagatggggcaggaaggctccgcaggaccggacccctagaccaccctgccccacctgccccttccccctttgctgtgacacttcttcatctcacccccccctgcccccctctaggagagctggctctgcagtgggggagggatgcagggacatttactgaaggagggacatggacaaaacaacattgaattcccagccccattggggagtgatctcttggacacagagcccccattcaaaatggggcagggcaagggtgggagtgtgcaaagccctgatctggagttacctgaggccatagctgccctattcacttctaagggccctgttttgagattgtttgttctaatttattttaagctaggtaaggctggggggagggtggggccgtggtcccctcagcctccatggggagggaagaagggggagctctttttttacgttgatttttttttttctactctgttttccctttttccttccgctccatttggggccctgggggtttcagtcatctccccatttggtcccctggactgtctttgttgattctaacttgtaaataaagaaaatattattcaagttttgagttaccttaatatttgcttttgtagtgtttcaaaaggaacatcataagaattgtcttgataattttgagggaaatattactgcagtgagaaaaggcaatagctaacctataattggattgtcttaatttttaaaccagtaggcttttgctgtgtttttaataaagtaaatatgacttttgtaaattgag

SEQ ID NO: 379503 - DNA, 4137 bp, Homo sapiens
ccctggcgctgaccgatggaccagccgctccgtggggaggactccggaccctggtgggggggcgggggggttctttcgcccccgtggcggagggcccctgagaggcggatacgggtgtgcctttgggggtgatgtggcgtgtggggggaaaggtccgagctcgcctggagggggagggtttttcccttaagtcatccctcccaggacttgctttttctgctctgagccggacgccggaatggagtttgaggaagagattcttcgctgctgctgccttaccgccgagaaccaccacccgccaggcgtcttgcggccacacccctggcgggttcaggcaggctacgcccacgcgacccctcccgtttccctgctttggccaatggaggagctacgaatggcacgacctgctcgagcttggcagtctccagttgggctgtgcatggaagcttgggaagactttgttggaaggggaggcggggagagagtgctggaggctctggggcgatggcttccgcacctcttccaaccaccctctttccctggagtcggcggaccacagctcagccaattggcttggagatgtggcgggttgccacttccctgtgggtctctgcggcactcttctgcctggtgactgacaccttggaaatgaagtttatgacgtcatcgttgcggctggccaatagaaaaagctcccgcggagaggtgttccttccccttcgactcagcttcttcacccgcgtgagcgagcgcgcgcgcgcggagggggtggggaaaatctcaagcagggtggcgcgcatgagcggcgaagctcctcctccccgcctatatataaagggctggcgcggggctcggcggcgccatttcgtgctggagtggagcagcctctagaacgagctggaggattctgcctaccgatacagagccttcgagtcgtccggggccgccattacaatccacctccatccgcttggaaatggccttcgtcccggcctatgactggtcccagcgggcagtacagaccccctagaagcccctggagctcccctttttcgggccccgcccaatcctcggagtctgtccaccccctctactccgccctcaagaggatttcaaagatggaggcggcggctccctaaaccacttttcgtgttcatccgcctccatccgagatcgaaacgggacctcgtcggccccgtaggggcccgacaagaagagggaatccctgcagaccaacagcgggctatattgacgacggtgtctgagatcggggaccgtcttttgaagagtcagtccctccttagttgcccgcctcagctgaggccgccgccattttcttgctgtccgccgtctgcagagcgcgccaagctgcccggagctctccgagaggccccaaagagactgctttcgtgccggccaggcagggggtttgtcgcctggaggcccaagaggaacggcctccccccaacttagcgggttatgctggaccgggcggtgaggggaaccgaggccacccggactttccgcggctgagggcagcgccggttccttgcggtcaagatgctgcaaaacgtgactccccacaataagctccctggggaagggaatgcagggttgctggggctgggcccagaagcagcagcaccagggaaaaggattcgaaaaccctctctcttgtatgagggctttgagagccccacaatggcttcggtgcctgctttgcaacttacccctgccaacccaccacccccggaggtgtccaatcccaaaaagccaggacgagttaccaaccagctgcaatacctacacaaggtagtgatgaaggctctgtggaaacatcagttcgcatggccattccggcagcctgtggatgctgtcaaactgggtctaccggattatcacaaaattataaaacagcctatggacatgggtactattaagaggagacttgaaaacaattattattgggctgcttcagagtgtatgcaagattttaataccatgttcaccaactgttacatttacaacaagcccactgatgatattgtcctaatggcacaaacgctggaaaagatattcctacagaaggttgcatcaatgccacaagaagaacaagagctggtagtgaccatccctaagaacagccacaagaagggggccaagttggcagcgctccagggcagtgttaccagtgcccatcaggtgcctgccgtctcttctgtgtcacacacagccctgtatactcctccacctgagatacctaccactgtcctcaacattccccacccatcagtcatttcctctccacttctcaagtccttgcactctgctggacccccgctccttgctgttactgcagctcctccagcccagccccttgccaagaaaaaaggcgtaaagcggaaagcagatactaccacccctacacctacagccatcttggctcctggttctccagctagccctcctgggagtcttgagcctaaggcagcacggcttccccctatgcgtagagagagtggtcgccccatcaagcccccacgcaaagacttgcctgactctcagcaacaacaccagagctctaagaaaggaaagctttcagaacagttaaaacattgcaatggcattttgaaggagttactctctaagaagcatgctgcctatgcttggcctttctataaaccagtggatgcttctgcacttggcctgcatgactaccatgacatcattaagcaccccatggacctcagcactgtcaagcggaagatggagaaccgtgattaccgggatgcacaggagtttgctgctgatgtacggcttatgttctccaactgctataagtacaatcccccagatcacgatgttgtggcaatggcacgaaagctacaggatgtatttgagttccgttatgccaagatgccagatgaaccactagaaccagggcctttaccagtctctactgccatgccccctggcttggccaaatcgtcttcagagtcctccagtgaggaaagtagcagtgagagctcctctgaggaagaggaggaggaagatgaggaggacgaggaggaagaagagagtgaaagctcagactcagaggaagaaagggctcatcgcttagcagaactacaggaacagcttcgggcagtacatgaacaactggctgctctgtcccagggtccaatatccaagcccaagaggaaaagagagaaaaaagagaaaaagaagaaacggaaggcagagaagcatcgaggccgagctggggccgatgaagatgacaaggggcctagggcaccccgcccacctcaacctaagaagtccaagaaagcaagtggcagtgggggtggcagtgctgctttaggcccttctggctttggaccttctggaggaagtggcaccaagctccccaaaaaggccacaaagacagccccacctgccctgcctacaggttatgattcagaggaggaggaagagagcaggcccatgagttacgatgagaagcggcagctgagcctggacatcaacaaattacctggggagaagctgggccgagttgtgcatataatccaagccagggagccctctttacgtgattcaaacccagaagagattgagattgattttgaaacactcaagccatccacacttagagagcttgagcgctatgtcctttcctgcctacgtaagaaaccccggaagccctacaccattaagaagcctgtgggaaagacaaaggaggaactggctttggagaaaaagcgggaattagaaaagcggttacaagatgtcagcggacagctcaattctactaaaaagccccccaagaaagcgaatgagaaaacagagtcatcctctgcacagccatttaggtacctaaatggctgtgaactggtgggtcattatgtgttgtcgtgcaggtagaggcttactagaagtgtgaaaacgtaggcttggattaaggcgacaggatttctaggatagtcaagtagaattagaatggtgaagatgataagtgtagagggaaggtcaatggttgatatggctaggggtggcgcttccaattaaggtgcatgagtaggtggcctgcagtaatgttagcggttaggcgtacggccagggctattggttgaatgagta

SEQ ID NO: 379504 - DNA, 3727 bp, Homo sapiens
ccctggcgctgaccgatggaccagccgctccgtggggaggactccggaccctggtgggggggcgggggggttctttcgcccccgtggcggagggcccctgagaggcggatacgggtgtgcctttgggggtgatgtggcgtgtggggggaaaggtccgagctcgcctggagggggagggtttttcccttaagtcatccctcccaggacttgctttttctgctctgagccggacgccggaatggagtttgaggaagagattcttcgctgctgctgccttaccgccgagaaccaccacccgccaggcgtcttgcggccacacccctggcgggttcaggcaggctacgcccacgcgacccctcccgtttccctgctttggccaatggaggagctacgaatggcacgacctgctcgagcttggcagtctccagttgggctgtgcatggaagcttgggaagactttgttggaaggggaggcggggagagagtgctggaggctctggggcgatggcttccgcacctcttccaaccaccctctttccctggagtcggcggaccacagctcagccaattggcttggagatgtggcgggttgccacttccctgtgggtctctgcggcactcttctgcctggtgactgacaccttggaaatgaagtttatgacgtcatcgttgcggctggccaatagaaaaagctcccgcggagaggtgttccttccccttcgactcagcttcttcacccgcgtgagcgagcgcgcgcgcgcggagggggtggggaaaatctcaagcagggtggcgcgcatgagcggcgaagctcctcctccccgcctatatataaagggctggcgcggggctcggcggcgccatttcgtgctggagtggagcagcctctagaacgagctggaggattctgcctaccgatacagagccttcgagtcgtccggggccgccattacaatccacctccatccgcttggaaatggccttcgtcccggcctatgactggtcccagcgggcagtacagaccccctagaagcccctggagctcccctttttcgggccccgcccaatcctcggagtctgtccaccccctctactccgccctcaagaggatttcaaagatggaggcggcggctccctaaaccacttttcgtgttcatccgcctccatccgagatcgaaacgggacctcgtcggccccgtaggggcccgacaagaagagggaatccctgcagaccaacagcgggctatattgacgacggtgtctgagatcggggaccgtcttttgaagagtcagtccctccttagttgcccgcctcagctgaggccgccgccattttcttgctgtccgccgtctgcagagcgcgccaagctgcccggagctctccgagaggccccaaagagactgctttcgtgccggccaggcagggggtttgtcgcctggaggcccaagaggaacggcctccccccaacttagcgggttatgctggaccgggcggtgaggggaaccgaggccacccggactttccgcggctgagggcagcgccggttccttgcggtcaagatgctgcaaaacgtgactccccacaataagctccctggggaagggaatgcagggttgctggggctgggcccagaagcagcagcaccagggaaaaggattcgaaaaccctctctcttgtatgagggctttgagagccccacaatggcttcggtgcctgctttgcaacttacccctgccaacccaccacccccggaggtgtccaatcccaaaaagccaggacgagttaccaaccagctgcaatacctacacaaggtagtgatgaaggctctgtggaaacatcagttcgcatggccattccggcagcctgtggatgctgtcaaactgggtctaccggattatcacaaaattataaaacagcctatggacatgggtactattaagaggagacttgaaaacaattattattgggctgcttcagagtgtatgcaagattttaataccatgttcaccaactgttacatttacaacaagcccactgatgatattgtcctaatggcacaaacgctggaaaagatattcctacagaaggttgcatcaatgccacaagaagaacaagagctggtagtgaccatccctaagaacagccacaagaagggggccaagttggcagcgctccagggcagtgttaccagtgcccatcaggtgcctgccgtctcttctgtgtcacacacagccctgtatactcctccacctgagatacctaccactgtcctcaacattccccacccatcagtcatttcctctccacttctcaagtccttgcactctgctggacccccgctccttgctgttactgcagctcctccagcccagccccttgccaagaaaaaaggcgtaaagcggaaagcagatactaccacccctacacctacagccatcttggctcctggttctccagctagccctcctgggagtcttgagcctaaggcagcacggcttccccctatgcgtagagagagtggtcgccccatcaagcccccacgcaaagacttgcctgactctcagcaacaacaccagagctctaagaaaggaaagctttcagaacagttaaaacattgcaatggcattttgaaggagttactctctaagaagcatgctgcctatgcttggcctttctataaaccagtggatgcttctgcacttggcctgcatgactaccatgacatcattaagcaccccatggacctcagcactgtcaagcggaagatggagaaccgtgattaccgggatgcacaggagtttgctgctgatgtacggcttatgttctccaactgctataagtacaatcccccagatcacgatgttgtggcaatggcacgaaagctacaggatgtatttgagttccgttatgccaagatgccagatgaaccactagaaccagggcctttaccagtctctactgccatgccccctggcttggccaaatcgtcttcagagtcctccagtgaggaaagtagcagtgagagctcctctgaggaagaggaggaggaagatgaggaggacgaggaggaagaagagagtgaaagctcagactcagaggaagaaagggctcatcgcttagcagaactacaggaacagcttcgggcagtacatgaacaactggctgctctgtcccagggtccaatatccaagcccaagaggaaaagagagaaaaaagagaaaaagaagaaacggaaggcagagaagcatcgaggccgagctggggccgatgaagatgacaaggggcctagggcaccccgcccacctcaacctaagaagtccaagaaagcaagtggcagtgggggtggcagtgctgctttaggcccttctggctttggaccttctggaggaagtggcaccaagctccccaaaaaggccacaaagacagccccacctgccctgcctacaggttatgattcagaggaggaggaagagagcaggcccatgagttacgatgagaagcggcagctgagcctggacatcaacaaattacctggggagaagctgggccgagttgtgcatataatccaagccagggagccctctttacgtgattcaaacccagaagagattgagattgattttgaaacactcaagccatccacacttagagagcttgagcgctatgggccattcagtccgctgttcatggtcactagcatgtttcctattgtacggcgtccgacag

SEQ ID NO: 379505 - DNA, 3507 bp, Homo sapiens
ccctggcgctgaccgatggaccagccgctccgtggggaggactccggaccctggtgggggggcgggggggttctttcgcccccgtggcggagggcccctgagaggcggatacgggtgtgcctttgggggtgatgtggcgtgtggggggaaaggtccgagctcgcctggagggggagggtttttcccttaagtcatccctcccaggacttgctttttctgctctgagccggacgccggaatggagtttgaggaagagattcttcgctgctgctgccttaccgccgagaaccaccacccgccaggcgtcttgcggccacacccctggcgggttcaggcaggctacgcccacgcgacccctcccgtttccctgctttggccaatggaggagctacgaatggcacgacctgctcgagcttggcagtctccagttgggctgtgcatggaagcttgggaagactttgttggaaggggaggcggggagagagtgctggaggctctggggcgatggcttccgcacctcttccaaccaccctctttccctggagtcggcggaccacagctcagccaattggcttggagatgtggcgggttgccacttccctgtgggtctctgcggcactcttctgcctggtgactgacaccttggaaatgaagtttatgacgtcatcgttgcggctggccaatagaaaaagctcccgcggagaggtgttccttccccttcgactcagcttcttcacccgcgtgagcgagcgcgcgcgcgcggagggggtggggaaaatctcaagcagggtggcgcgcatgagcggcgaagctcctcctccccgcctatatataaagggctggcgcggggctcggcggcgccatttcgtgctggagtggagcagcctctagaacgagctggaggattctgcctaccgatacagagccttcgagtcgtccggggccgccattacaatccacctccatccgcttggaaatggccttcgtcccggcctatgactggtcccagcgggcagtacagaccccctagaagcccctggagctcccctttttcgggccccgcccaatcctcggagtctgtccaccccctctactccgccctcaagaggatttcaaagatggaggcggcggctccctaaaccacttttcgtgttcatccgcctccatccgagatcgaaacgggacctcgtcggccccgtaggggcccgacaagaagagggaatccctgcagaccaacagcgggctatattgacgacggtgtctgagatcggggaccgtcttttgaagagtcagtccctccttagttgcccgcctcagctgaggccgccgccattttcttgctgtccgccgtctgcagagcgcgccaagctgcccggagctctccgagaggccccaaagagactgctttcgtgccggccaggcagggggtttgtcgcctggaggcccaagaggaacggcctccccccaacttagcgggttatgctggaccgggcggtgaggggaaccgaggccacccggactttccgcggctgagggcagcgccggttccttgcggtcaagatgctgcaaaacgtgactccccacaataagctccctggggaagggaatgcagggttgctggggctgggcccagaagcagcagcaccagggaaaaggattcgaaaaccctctctcttgtatgagggctttgagagccccacaatggcttcggtgcctgctttgcaacttacccctgccaacccaccacccccggaggtgtccaatcccaaaaagccaggacgagttaccaaccagctgcaatacctacacaaggtagtgatgaaggctctgtggaaacatcagttcgcatggccattccggcagcctgtggatgctgtcaaactgggtctaccggattatcacaaaattataaaacagcctatggacatgggtactattaagaggagacttgaaaacaattattattgggctgcttcagagtgtatgcaagattttaataccatgttcaccaactgttacatttacaacaagcccactgatgatattgtcctaatggcacaaacgctggaaaagatattcctacagaaggttgcatcaatgccacaagaagaacaagagctggtagtgaccatccctaagaacagccacaagaagggggccaagttggcagcgctccagggcagtgttaccagtgcccatcaggtgcctgccgtctcttctgtgtcacacacagccctgtatactcctccacctgagatacctaccactgtcctcaacattccccacccatcagtcatttcctctccacttctcaagtccttgcactctgctggacccccgctccttgctgttactgcagctcctccagcccagccccttgccaagaaaaaaggcgtaaagcggaaagcagatactaccacccctacacctacagccatcttggctcctggttctccagctagccctcctgggagtcttgagcctaaggcagcacggcttccccctatgcgtagagagagtggtcgccccatcaagcccccacgcaaagacttgcctgactctcagcaacaacaccagagctctaagaaaggaaagctttcagaacagttaaaacattgcaatggcattttgaaggagttactctctaagaagcatgctgcctatgcttggcctttctataaaccagtggatgcttctgcacttggcctgcatgactaccatgacatcattaagcaccccatggacctcagcactgtcaagcggaagatggagaaccgtgattaccgggatgcacaggagtttgctgctgatgtacggcttatgttctccaactgctataagtacaatcccccagatcacgatgttgtggcaatggcacgaaagctacaggatgtatttgagttccgttatgccaagatgccagatgaaccactagaaccagggcctttaccagtctctactgccatgccccctggcttggccaaatcgtcttcagagtcctccagtgaggaaagtagcagtgagagctcctctgaggaagaggaggaggaagatgaggaggacgaggaggaagaagagagtgaaagctcagactcagaggaagaaagggctcatcgcttagcagaactacaggaacagcttcgggcagtacatgaacaactggctgctctgtcccagggtccaatatccaagcccaagaggaaaagagagaaaaaagagaaaaagaagaaacggaaggcagagaagcatcgaggccgagctggggccgatgaagatgacaaggggcctagggcaccccgcccacctcaacctaagaagtccaagaaagcaagtggcagtgggggtggcagtgctgctttaggcccttctggctttggaccttctggaggaagtggcaccaaagtgagttagagtaggaagcagagactagtttggctatttctgtctctctgggggatgccatctctctttgcaaagataattctaaatggccagttaacagataca

SEQ ID NO: 379506 - DNA, 3200 bp, Homo sapiens
attcgtcccctgggggtacagcagccgggagccaggctccctggggaagggaatgcagggttgctggggctgggcccagaagcagcagcaccagggaaaaggattcgaaaaccctctctcttgtatgagggctttgagagccccacaatggcttcggtgcctgctttgcaacttacccctgccaacccaccacccccggaggtgtccaatcccaaaaagccaggacgagttaccaaccagctgcaatacctacacaaggtagtgatgaaggctctgtggaaacatcagttcgcatggccattccggcagcctgtggatgctgtcaaactgggtctaccggattatcacaaaattataaaacagcctatggacatgggtactattaagaggagacttgaaaacaattattattgggctgcttcagagtgtatgcaagattttaataccatgttcaccaactgttacatttacaacaagcccactgatgatattgtcctaatggcacaaacgctggaaaagatattcctacagaaggttgcatcaatgccacaagaagaacaagagctggtagtgaccatccctaagaacagccacaagaagggggccaagttggcagcgctccagggcagtgttaccagtgcccatcaggtgcctgccgtctcttctgtgtcacacacagccctgtatactcctccacctgagatacctaccactgtcctcaacattccccacccatcagtcatttcctctccacttctcaagtccttgcactctgctggacccccgctccttgctgttactgcagctcctccagcccagccccttgccaagaaaaaaggcgtaaagcggaaagcagatactaccacccctacacctacagccatcttggctcctggttctccagctagccctcctgggagtcttgagcctaaggcagcacggcttccccctatgcgtagagagagtggtcgccccatcaagcccccacgcaaagacttgcctgactctcagcaacaacaccagagctctaagaaaggaaagctttcagaacagttaaaacattgcaatggcattttgaaggagttactctctaagaagcatgctgcctatgcttggcctttctataaaccagtggatgcttctgcacttggcctgcatgactaccatgacatcattaagcaccccatggacctcagcactgtcaagcggaagatggagaaccgtgattaccgggatgcacaggagtttgctgctgatgtacggcttatgttctccaactgctataagtacaatcccccagatcacgatgttgtggcaatggcacgaaagctacaggatgtatttgagttccgttatgccaagatgccagatgaaccactagaaccagggcctttaccagtctctactgccatgccccctggcttggccaaatcgtcttcagagtcctccagtgaggaaagtagcagtgagagctcctctgaggaagaggaggaggaagatgaggaggacgaggaggaagaagagagtgaaagctcagactcagaggaagaaagggctcatcgcttagcagaactacaggaacagcttcgggcagtacatgaacaactggctgctctgtcccagggtccaatatccaagcccaagaggaaaagagagaaaaaagagaaaaagaagaaacggaaggcagagaagcatcgaggccgagctggggccgatgaagatgacaaggggcctagggcaccccgcccacctcaacctaagaagtccaagaaagcaagtggcagtgggggtggcagtgctgctttaggcccttctggctttggaccttctggaggaagtggcaccaagctccccaaaaaggccacaaagacagccccacctgccctgcctacaggttatgattcagaggaggaggaagagagcaggcccatgagttacgatgagaagcggcagctgagcctggacatcaacaaattacctggggagaagctgggccgagttgtgcatataatccaagccagggagccctctttacgtgattcaaacccagaagagattgagattgattttgaaacactcaagccatccacacttagagagcttgagcgctatgtcctttcctgcctacgtaagaaaccccggaagccctacaccattaagaagcctgtgggaaagacaaaggaggaactggctttggagaaaaagcgggaattagaaaagcggttacaagatgtcagcggacagctcaattctactaaaaagccccccaagaaagcgaatgagaaaacagagtcatcctctgcacagcaagtagcagtgtcacgccttagcgcttccagctccagctcagattccagctcctcctcttcctcgtcgtcgtcttcagacaccagtgattcagactcaggctaaggggtcaggccagatggggcaggaaggctccgcaggaccggacccctagaccaccctgccccacctgccccttccccctttgctgtgacacttcttcatctcacccccccctgcccccctctaggagagctggctctgcagtgggggagggatgcagggacatttactgaaggagggacatggacaaaacaacattgaattcccagccccattggggagtgatctcttggacacagagcccccattcaaaatggggcagggcaagggtgggagtgtgcaaagccctgatctggagttacctgaggccatagctgccctattcacttctaagggccctgttttgagattgtttgttctaatttattttaagctaggtaaggctggggggagggtggggccgtggtcccctcagcctccatggggagggaagaagggggagctctttttttacgttgatttttttttttctactctgttttccctttttccttccgctccatttggggccctgggggtttcagtcatctccccatttggtcccctggactgtctttgttgattctaacttgtaaataaagaaaatattattcaagttttgagttaccttaatatttgcttttgtagtgtttcaaaaggaacatcataagaattgtcttgataattttgagggaaatattactgcagtgagaaaaggcaatagctaacctataattggattgtcttaatttttaaaccagtaggcttttgctgtgtttttaataaagtaaatatgacttttgtaaattgag

SEQ ID NO: 379507 - DNA, 2512 bp, Homo sapiens
  misc_feature (2)..(2): n is a, c, g, or t
tnacaaggggcctagggcaccccgcccacctcaacattccccacccatcagtcatttcctctccacttctcaagtccttgcactctgctggacccccgctccttgctgttactgcagctcctccagcccagccccttgccaagaaaaaaggcgtaaagcggaaagcagatactaccacccctacacctacagccatcttggctcctggttctccagctagccctcctgggagtcttgagcctaaggcagcacggcttccccctatgcgtagagagagtggtcgccccatcaagcccccacgcaaagacttgcctgactctcagcaacaacaccagagctctaagaaaggaaagctttcagaacagttaaaacattgcaatggcattttgaaggagttactctctaagaagcatgctgcctatgcttggcctttctataaaccagtggatgcttctgcacttggcctgcatgactaccatgacatcattaagcaccccatggacctcagcactgtcaagcggaagatggagaaccgtgattaccgggatgcacaggagtttgctgctgatgtacggcttatgttctccaactgctataagtacaatcccccagatcacgatgttgtggcaatggcacgaaagctacaggatgtatttgagttccgttatgccaagatgccagatgaaccactagaaccagggcctttaccagtctctactgccatgccccctggcttggccaaatcgtcttcagagtcctccagtgaggaaagtagcagtgagagctcctctgaggaagaggaggaggaagatgaggaggacgaggaggaagaagagagtgaaagctcagactcagaggaagaaagggctcatcgcttagcagaactacaggaacagcttcgggcagtacatgaacaactggctgctctgtcccagggtccaatatccaagcccaagaggaaaagagagaaaaaagagaaaaagaagaaacggaaggcagagaagcatcgaggccgagctggggccgatgaagatgacaaggggcctagggcaccccgcccacctcaacctaagaagtccaagaaagcaagtggcagtgggggtggcagtgctgctttaggcccttctggctttggaccttctggaggaagtggcaccaagctccccaaaaaggccacaaagacagccccacctgccctgcctacaggttatgattcagaggaggaggaagagagcaggcccatgagttacgatgagaagcggcagctgagcctggacatcaacaaattacctggggagaagctgggccgagttgtgcatataatccaagccagggagccctctttacgtgattcaaacccagaagagattgagattgattttgaaacactcaagccatccacacttagagagcttgagcgctatgtcctttcctgcctacgtaagaaaccccggaagccctacaccattaagaagcctgtgggaaagacaaaggaggaactggctttggagaaaaagcgggaattagaaaagcggttacaagatgtcagcggacagctcaattctactaaaaagccccccaagaaagcgaatgagaaaacagagtcatcctctgcacagcaagtagcagtgtcacgccttagcgcttccagctccagctcagattccagctcctcctcttcctcgtcgtcgtcttcagacaccagtgattcagactcaggctaaggggtcaggccagatggggcaggaaggctccgcaggaccggacccctagaccaccctgccccacctgccccttccccctttgctgtgacacttcttcatctcacccccccctgcccccctctaggagagctggctctgcagtgggggagggatgcagggacatttactgaaggagggacatggacaaaacaacattgaattcccagccccattggggagtgatctcttggacacagagcccccattcaaaatggggcagggcaagggtgggagtgtgcaaagccctgatctggagttacctgaggccatagctgccctattcacttctaagggccctgttttgagattgtttgttctaatttattttaagctaggtaaggctggggggagggtggggccgtggtcccctcagcctccatggggagggaagaagggggagctctttttttacgttgatttttttttttctactctgttttccctttttccttccgctccatttggggccctgggggtttcagtcatctccccatttggtcccctggactgtctttgttgattctaacttgtaaataaagaaaatattattcaagttttgagttaccttaatatttgcttttgtagtgtttcaaaaggaacatcataagaattgtcttgataattttgagggaaatattactgcagtgagaaaaggcaatagctaacctataattggattgtcttaatttttaaaccagtaggcttttgctgtgtttttaataaagtaaatatgacttttgtaaattgag

SEQ ID NO: 379508 - DNA, 2436 bp, Homo sapiens
ctgtgttctagagatcctgttcacgctcttgctgttactgagctctccagcccagccccttgccaagaaaaaaggcgtaaagcggaaagcagatactaccacccctacacctacagccatcttggctcctggttctccagctagccctcctgggagtcttgagcctaaggcagcacggcttccccctatgcgtagagagagtggtcgccccatcaagcccccacgcaaagacttgcctgactctcagcaacaacaccagagctctaagaaaggaaagctttcagaacagttaaaacattgcaatggcattttgaaggagttactctctaagaagcatgctgcctatgcttggcctttctataaaccagtggatgcttctgcacttggcctgcatgactaccatgacatcattaagcaccccatggacctcagcactgtcaagcggaagatggagaaccgtgattaccgggatgcacaggagtttgctgctgatgtacggcttatgttctccaactgctataagtacaatcccccagatcacgatgttgtggcaatggcacgaaagctacaggatgtatttgagttccgttatgccaagatgccagatgaaccactagaaccagggcctttaccagtctctactgccatgccccctggcttggccaaatcgtcttcagagtcctccagtgaggaaagtagcagtgagagctcctctgaggaagaggaggaggaagatgaggaggacgaggaggaagaagagagtgaaagctcagactcagaggaagaaagggctcatcgcttagcagaactacaggaacagcttcgggcagtacatgaacaactggctgctctgtcccagggtccaatatccaagcccaagaggaaaagagagaaaaaagagaaaaagaagaaacggaaggcagagaagcatcgaggccgagctggggccgatgaagatgacaaggggcctagggcaccccgcccacctcaacctaagaagtccaagaaagcaagtggcagtgggggtggcagtgctgctttaggcccttctggctttggaccttctggaggaagtggcaccaagctccccaaaaaggccacaaagacagccccacctgccctgcctacaggttatgattcagaggaggaggaagagagcaggcccatgagttacgatgagaagcggcagctgagcctggacatcaacaaattacctggggagaagctgggccgagttgtgcatataatccaagccagggagccctctttacgtgattcaaacccagaagagattgagattgattttgaaacactcaagccatccacacttagagagcttgagcgctatgtcctttcctgcctacgtaagaaaccccggaagccctacaccattaagaagcctgtgggaaagacaaaggaggaactggctttggagaaaaagcgggaattagaaaagcggttacaagatgtcagcggacagctcaattctactaaaaagccccccaagaaagcgaatgagaaaacagagtcatcctctgcacagcaagtagcagtgtcacgccttagcgcttccagctccagctcagattccagctcctcctcttcctcgtcgtcgtcttcagacaccagtgattcagactcaggctaaggggtcaggccagatggggcaggaaggctccgcaggaccggacccctagaccaccctgccccacctgccccttccccctttgctgtgacacttcttcatctcacccccccctgcccccctctaggagagctggctctgcagtgggggagggatgcagggacatttactgaaggagggacatggacaaaacaacattgaattcccagccccattggggagtgatctcttggacacagagcccccattcaaaatggggcagggcaagggtgggagtgtgcaaagccctgatctggagttacctgaggccatagctgccctattcacttctaagggccctgttttgagattgtttgttctaatttattttaagctaggtaaggctggggggagggtggggccgtggtcccctcagcctccatggggagggaagaagggggagctctttttttacgttgatttttttttttctactctgttttccctttttccttccgctccatttggggccctgggggtttcagtcatctccccatttggtcccctggactgtctttgttgattctaacttgtaaataaagaaaatattattcaagttttgagttaccttaatatttgcttttgtagtgtttcaaaaggaacatcataagaattgtcttgataattttgagggaaatattactgcagtgagaaaaggcaatagctaacctataattggattgtcttaatttttaaaccagtaggcttttgctgtgtttttaataaagtaaatatgacttttgtaaattgag

SEQ ID NO: 379509 - DNA, 3320 bp, Homo sapiens
ccctggcgctgaccgatggaccagccgctccgtggggaggactccggaccctggtgggggggcgggggggttctttcgcccccgtggcggagggcccctgagaggcggatacgggtgtgcctttgggggtgatgtggcgtgtggggggaaaggtccgagctcgcctggagggggagggtttttcccttaagtcatccctcccaggacttgctttttctgctctgagccggacgccggaatggagtttgaggaagagattcttcgctgctgctgccttaccgccgagaaccaccacccgccaggcgtcttgcggccacacccctggcgggttcaggcaggctacgcccacgcgacccctcccgtttccctgctttggccaatggaggagctacgaatggcacgacctgctcgagcttggcagtctccagttgggctgtgcatggaagcttgggaagactttgttggaaggggaggcggggagagagtgctggaggctctggggcgatggcttccgcacctcttccaaccaccctctttccctggagtcggcggaccacagctcagccaattggcttggagatgtggcgggttgccacttccctgtgggtctctgcggcactcttctgcctggtgactgacaccttggaaatgaagtttatgacgtcatcgttgcggctggccaatagaaaaagctcccgcggagaggtgttccttccccttcgactcagcttcttcacccgcgtgagcgagcgcgcgcgcgcggagggggtggggaaaatctcaagcagggtggcgcgcatgagcggcgaagctcctcctccccgcctatatataaagggctggcgcggggctcggcggcgccatttcgtgctggagtggagcagcctctagaacgagctggaggattctgcctaccgatacagagccttcgagtcgtccggggccgccattacaatccacctccatccgcttggaaatggccttcgtcccggcctatgactggtcccagcgggcagtacagaccccctagaagcccctggagctcccctttttcgggccccgcccaatcctcggagtctgtccaccccctctactccgccctcaagaggatttcaaagatggaggcggcggctccctaaaccacttttcgtgttcatccgcctccatccgagatcgaaacgggacctcgtcggccccgtaggggcccgacaagaagagggaatccctgcagaccaacagcgggctatattgacgacggtgtctgagatcggggaccgtcttttgaagagtcagtccctccttagttgcccgcctcagctgaggccgccgccattttcttgctgtccgccgtctgcagagcgcgccaagctgcccggagctctccgagaggccccaaagagactgctttcgtgccggccagatcacgatgttgtggcaatggcacgaaagctacaggatgtatttgagttccgttatgccaagatgccagatgaaccactagaaccagggcctttaccagtctctactgccatgccccctggcttggccaaatcgtcttcagagtcctccagtgaggaaagtagcagtgagagctcctctgaggaagaggaggaggaagatgaggaggacgaggaggaagaagagagtgaaagctcagactcagaggaagaaagggctcatcgcttagcagaactacaggaacagcttcgggcagtacatgaacaactggctgctctgtcccagggtccaatatccaagcccaagaggaaaagagagaaaaaagagaaaaagaagaaacggaaggcagagaagcatcgaggccgagctggggccgatgaagatgacaaggggcctagggcaccccgcccacctcaacctaagaagtccaagaaagcaagtggcagtgggggtggcagtgctgctttaggcccttctggctttggaccttctggaggaagtggcaccaagctccccaaaaaggccacaaagacagccccacctgccctgcctacaggttatgattcagaggaggaggaagagagcaggcccatgagttacgatgagaagcggcagctgagcctggacatcaacaaattacctggggagaagctgggccgagttgtgcatataatccaagccagggagccctctttacgtgattcaaacccagaagagattgagattgattttgaaacactcaagccatccacacttagagagcttgagcgctatgtcctttcctgcctacgtaagaaaccccggaagccctacaccattaagaagcctgtgggaaagacaaaggaggaactggctttggagaaaaagcgggaattagaaaagcggttacaagatgtcagcggacagctcaattctactaaaaagccccccaagaaagcgaatgagaaaacagagtcatcctctgcacagcaagtagcagtgtcacgccttagcgcttccagctccagctcagattccagctcctcctcttcctcgtcgtcgtcttcagacaccagtgattcagactcaggctaaggggtcaggccagatggggcaggaaggctccgcaggaccggacccctagaccaccctgccccacctgccccttccccctttgctgtgacacttcttcatctcacccccccctgcccccctctaggagagctggctctgcagtgggggagggatgcagggacatttactgaaggagggacatggacaaaacaacattgaattcccagccccattggggagtgatctcttggacacagagcccccattcaaaatggggcagggcaagggtgggagtgtgcaaagccctgatctggagttacctgaggccatagctgccctattcacttctaagggccctgttttgagattgtttgttctaatttattttaagctaggtaaggctggggggagggtggggccgtggtcccctcagcctccatggggagggaagaagggggagctctttttttacgttgatttttttttttctactctgttttccctttttccttccgctccatttggggccctgggggtttcagtcatctccccatttggtcccctggactgtctttgttgattctaacttgtaaataaagaaaatattattcaagttttgagttaccttaatatttgcttttgtagtgtttcaaaaggaacatcataagaattgtcttgataattttgagggaaatattactgcagtgagaaaaggcaatagctaacctataattggattgtcttaatttttaaaccagtaggcttttgctgtgtttttaataaagtaaatatgacttttgtaaattgag

SEQ ID NO: 379510 - DNA, 1842 bp, Homo sapiens
caggttgtactccaccggcaggttgtactccaccggcaggttgtactccaccgacaggttgtactccaccggcaggttgtacgagtcctccagtgaggaaagtagcagtgagagctcctctgaggaagaggaggaggaagatgaggaggacgaggaggaagaagagagtgaaagctcagactcagaggaagaaagggctcatcgcttagcagaactacaggaacagcttcgggcagtacatgaacaactggctgctctgtcccagggtccaatatccaagcccaagaggaaaagagagaaaaaagagaaaaagaagaaacggaaggcagagaagcatcgaggccgagctggggccgatgaagatgacaaggggcctagggcaccccgcccacctcaacctaagaagtccaagaaagcaagtggcagtgggggtggcagtgctgctttaggcccttctggctttggaccttctggaggaagtggcaccaagctccccaaaaaggccacaaagacagccccacctgccctgcctacaggttatgattcagaggaggaggaagagagcaggcccatgagttacgatgagaagcggcagctgagcctggacatcaacaaattacctggggagaagctgggccgagttgtgcatataatccaagccagggagccctctttacgtgattcaaacccagaagagattgagattgattttgaaacactcaagccatccacacttagagagcttgagcgctatgtcctttcctgcctacgtaagaaaccccggaagccctacaccattaagaagcctgtgggaaagacaaaggaggaactggctttggagaaaaagcgggaattagaaaagcggttacaagatgtcagcggacagctcaattctactaaaaagccccccaagaaagcgaatgagaaaacagagtcatcctctgcacagcaagtagcagtgtcacgccttagcgcttccagctccagctcagattccagctcctcctcttcctcgtcgtcgtcttcagacaccagtgattcagactcaggctaaggggtcaggccagatggggcaggaaggctccgcaggaccggacccctagaccaccctgccccacctgccccttccccctttgctgtgacacttcttcatctcacccccccctgcccccctctaggagagctggctctgcagtgggggagggatgcagggacatttactgaaggagggacatggacaaaacaacattgaattcccagccccattggggagtgatctcttggacacagagcccccattcaaaatggggcagggcaagggtgggagtgtgcaaagccctgatctggagttacctgaggccatagctgccctattcacttctaagggccctgttttgagattgtttgttctaatttattttaagctaggtaaggctggggggagggtggggccgtggtcccctcagcctccatggggagggaagaagggggagctctttttttacgttgatttttttttttctactctgttttccctttttccttccgctccatttggggccctgggggtttcagtcatctccccatttggtcccctggactgtctttgttgattctaacttgtaaataaagaaaatattattcaagttttgagttaccttaatatttgcttttgtagtgtttcaaaaggaacatcataagaattgtcttgataattttgagggaaatattactgcagtgagaaaaggcaatagctaacctataattggattgtcttaatttttaaaccagtaggcttttgctgtgtttttaataaagtaaatatgacttttgtaaattgag

SEQ ID NO: 379511 - DNA, 3125 bp, Homo sapiens
ccctggcgctgaccgatggaccagccgctccgtggggaggactccggaccctggtgggggggcgggggggttctttcgcccccgtggcggagggcccctgagaggcggatacgggtgtgcctttgggggtgatgtggcgtgtggggggaaaggtccgagctcgcctggagggggagggtttttcccttaagtcatccctcccaggacttgctttttctgctctgagccggacgccggaatggagtttgaggaagagattcttcgctgctgctgccttaccgccgagaaccaccacccgccaggcgtcttgcggccacacccctggcgggttcaggcaggctacgcccacgcgacccctcccgtttccctgctttggccaatggaggagctacgaatggcacgacctgctcgagcttggcagtctccagttgggctgtgcatggaagcttgggaagactttgttggaaggggaggcggggagagagtgctggaggctctggggcgatggcttccgcacctcttccaaccaccctctttccctggagtcggcggaccacagctcagccaattggcttggagatgtggcgggttgccacttccctgtgggtctctgcggcactcttctgcctggtgactgacaccttggaaatgaagtttatgacgtcatcgttgcggctggccaatagaaaaagctcccgcggagaggtgttccttccccttcgactcagcttcttcacccgcgtgagcgagcgcgcgcgcgcggagggggtggggaaaatctcaagcagggtggcgcgcatgagcggcgaagctcctcctccccgcctatatataaagggctggcgcggggctcggcggcgccatttcgtgctggagtggagcagcctctagaacgagctggaggattctgcctaccgatacagagccttcgagtcgtccggggccgccattacaatccacctccatccgcttggaaatggccttcgtcccggcctatgactggtcccagcgggcagtacagaccccctagaagcccctggagctcccctttttcgggccccgcccaatcctcggagtctgtccaccccctctactccgccctcaagaggatttcaaagatggaggcggcggctccctaaaccacttttcgtgttcatccgcctccatccgagatcgaaacgggacctcgtcggccccgtaggggcccgacaagaagagggaatccctgcagaccaacagcgggctatattgacgacggtgtctgagatcggggaccgtcttttgaagagtcagtccctccttagttgcccgcctcagctgaggccgccgccattttcttgctgtccgccgtctgcagagcgcgccaagctgcccggagctctccgagaggccccaaagagactgctttcgtgccggccaggcagggggtttgtcgcctggaggcccaagaggaacggcctccccccaacttagcgggttatgctggaccgggcggtgaggggaaccgaggccacccggactttccgcggctgagggcagcgccggttccttgcggtcaagatgctgcaaaacgtgactccccacaataagctccctggggaagggaatgcagggttgctggggctgggcccagaagcagcagcaccagggaaaaggattcgaaaaccctctctcttgtatgagggctttgagagccccacaatggcttcggtgcctgctttgcaacttacccctgccaacccaccacccccggaggtgtccaatcccaaaaagccaggacgagttaccaaccagctgcaatacctacacaaggtagtgatgaaggctctgtggaaacatcagttcgcatggccattccggcagcctgtggatgctgtcaaactgggtctaccggattatcacaaaattataaaacagcctatggacatgggtactattaagaggagacttgaaaacaattattattgggctgcttcagagtgtatgcaagattttaataccatgttcaccaactgttacatttacaacaagcccactgatgatattgtcctaatggcacaaacgctggaaaagatattcctacagaaggttgcatcaatgccacaagaagaacaagagctggtagtgaccatccctaagaacagccacaagaagggggccaagttggcagcgctccagggcagtgttaccagtgcccatcaggtgcctgccgtctcttctgtgtcacacacagccctgtatactcctccacctgagatacctaccactgtcctcaacattccccacccatcagtcatttcctctccacttctcaagtccttgcactctgctggacccccgctccttgctgttactgcagctcctccagcccagccccttgccaagaaaaaaggcgtaaagcggaaagcagatactaccacccctacacctacagccatcttggctcctggttctccagctagccctcctgggagtcttgagcctaaggcagcacggcttccccctatgcgtagagagagtggtcgccccatcaagcccccacgcaaagacttgcctgactctcagcaacaacaccagagctctaagaaaggaaagctttcagaacagttaaaacattgcaatggcattttgaaggagttactctctaagaagcatgctgcctatgcttggccctgttttgagattgtttgttctaatttattttaagctaggtaaggctggggggagggtggggccgtggtcccctcagcctccatggggagggaagaagggggagctctttttttacgttgatttttttttttctactctgttttccctttttccttccgctccatttggggccctgggggtttcagtcatctccccatttggtcccctggactgtctttgttgattctaacttgtaaataaagaaaatattattcaagttttgagttaccttaatatttgcttttgtagtgtttcaaaaggaacatcataagaattgtcttgataattttgagggaaatattactgcagtgagaaaaggcaatagctaacctataattggattgtcttaatttttaaaccagtaggcttttgctgtgtttttaataaagtaaatatgacttttgtaaattgag

SEQ ID NO: 379512 - DNA, 1923 bp, Homo sapiens
tggagacggggtttcgccatgttgggcaggctggtcttgaactcctgacctcaagtgatctgcccgccttggcctcccaaagtgctgggattacaaatctgagccactgcagctggcccatggtgtagtttggtagtgtttaagggagcagaaagacccatgtcagtatacctaaacaggtataccttgttttattgtgcttcactttacggagttttttttagatactacttttttttttagttgaagatttgtgacaaccctgtgtggagcaagtctttcaacagtttttccaacatgtttgtgtgtcacatttttagtaatattttttcattaaggtatgtacgtacattgtctttttaaagacatgttattgcctacttacagtcaagagcaaaatgctctgtttcactatacagtgtcccagtagcccacctcttacttggccattgaatggaaaaacagaagctccactctgggcaggaaataggatcactgaattataacagtgggaacatactggaagaggttaatgaagcttcttttgctgacaactctttttgcccttaggctccccaaaaaggccacaaagacagccccacctgccctgcctacaggttatgattcagaggaggaggaagagagcaggcccatgagttacgatgagaagcggcagctgagcctggacatcaacaaattacctggggagaagctgggccgagttgtgcatataatccaagccagggagccctctttacgtgattcaaacccagaagagattgagattgattttgaaacactcaagccatccacacttagagagcttgagcgctatgtcctttcctgcctacgtaagaaaccccggaagccctacaccattaagaagcctgtgggaaagacaaaggaggaactggctttggagaaaaagcgggaattagaaaagcggttacaagatgtcagcggacagctcaattctactaaaaagccccccaagaaagcgaatgagaaaacagagtcatcctctgcacagcaagtagcagtgtcacgccttagcgcttccagctccagctcagattccagctcctcctcttcctcgtcgtcgtcttcagacaccagtgattcagactcaggctaaggggtcaggccagatggggcaggaaggctccgcaggaccggacccctagaccaccctgccccacctgccccttccccctttgctgtgacacttcttcatctcacccccccctgcccccctctaggagagctggctctgcagtgggggagggatgcagggacatttactgaaggagggacatggacaaaacaacattgaattcccagccccattggggagtgatctcttggacacagagcccccattcaaaatggggcagggcaagggtgggagtgtgcaaagccctgatctggagttacctgaggccatagctgccctattcacttctaagggccctgttttgagattgtttgttctaatttattttaagctaggtaaggctggggggagggtggggccgtggtcccctcagcctccatggggagggaagaagggggagctctttttttacgttgatttttttttttctactctgttttccctttttccttccgctccatttggggccctgggggtttcagtcatctccccatttggtcccctggactgtctttgttgattctaacttgtaaataaagaaaatattattcaagttttgagttaccttaatatttgcttttgtagtgtttcaaaaggaacatcataagaattgtcttgataattttgagggaaatattactgcagtgagaaaaggcaatagctaacctataattggattgtcttaatttttaaaccagtaggcttttgctgtgtttttaataaagtaaatatgacttttgtaaattgag

SEQ ID NO: 379513 - DNA, 2684 bp, Homo sapiens
ccctggcgctgaccgatggaccagccgctccgtggggaggactccggaccctggtgggggggcgggggggttctttcgcccccgtggcggagggcccctgagaggcggatacgggtgtgcctttgggggtgatgtggcgtgtggggggaaaggtccgagctcgcctggagggggagggtttttcccttaagtcatccctcccaggacttgctttttctgctctgagccggacgccggaatggagtttgaggaagagattcttcgctgctgctgccttaccgccgagaaccaccacccgccaggcgtcttgcggccacacccctggcgggttcaggcaggctacgcccacgcgacccctcccgtttccctgctttggccaatggaggagctacgaatggcacgacctgctcgagcttggcagtctccagttgggctgtgcatggaagcttgggaagactttgttggaaggggaggcggggagagagtgctggaggctctggggcgatggcttccgcacctcttccaaccaccctctttccctggagtcggcggaccacagctcagccaattggcttggagatgtggcgggttgccacttccctgtgggtctctgcggcactcttctgcctggtgactgacaccttggaaatgaagtttatgacgtcatcgttgcggctggccaatagaaaaagctcccgcggagaggtgttccttccccttcgactcagcttcttcacccgcgtgagcgagcgcgcgcgcgcggagggggtggggaaaatctcaagcagggtggcgcgcatgagcggcgaagctcctcctccccgcctatatataaagggctggcgcggggctcggcggcgccatttcgtgctggagtggagcagcctctagaacgagctggaggattctgcctaccgatacagagccttcgagtcgtccggggccgccattacaatccacctccatccgcttggaaatggccttcgtcccggcctatgactggtcccagcgggcagtacagaccccctagaagcccctggagctcccctttttcgggccccgcccaatcctcggagtctgtccaccccctctactccgccctcaagaggatttcaaagatggaggcggcggctccctaaaccacttttcgtgttcatccgcctccatccgagatcgaaacgggacctcgtcggccccgtaggggcccgacaagaagagggaatccctgcagaccaacagcgggctatattgacgacggtgtctgagatcggggaccgtcttttgaagagtcagtccctccttagttgcccgcctcagctgaggccgccgccattttcttgctgtccgccgtctgcagagcgcgccaagctgcccggagctctccgagaggccccaaagagactgctttcgtgccggccaggcagggggtttgtcgcctggaggcccaagaggaacggcctccccccaacttagcgggttatgctggaccgggcggtgaggggaaccgaggccacccggactttccgcggctgagggcagcgccggttccttgcggtcaagatgctgcaaaacgtgactccccacaataagctccctggggaagggaatgcagggttgctggggctgggcccagaagcagcagcaccagggaaaaggattcgaaaaccctctctcttgtatgagggctttgagagccccacaatggcttcggtgcctgctttgcaacttacccctgccaacccaccacccccggaggtgtccaatcccaaaaagccaggacgagttaccaaccagctgcaatacctacacaaggtagtgatgaaggctctgtggaaacatcagttcgcatggccattccggcagcctgtggatgctgtcaaactgggtctaccgattcccacctcgggttgggagaggaccacggtggccaaaattcttagcttcttcctttccctcatgcagcccatggatagccagccccagaggattatcacaaaattataaaacagcctatggacatgggtactattaagaggagacttgaaaacaattattattgggctgcttcagagtgtatgcaagattttaataccatgttcaccaactgttacatttacaacaagcccactgatgatattgtcctaatggcacaaacgctggaaaagatattcctacagaaggttgcatcaatgccacaagaagaacaagagctggtagtgaccatccctaagaacagccacaagaagggggccaagttggcagcgctccagggcagtgttaccagtgcccatcaggtgcctgccgtctcttctgtgtcacacacagccctgtatactcctccacctgagatacctaccactgtcctcaacattccccacccatcagtcatttcctctccacttctcaagtccttgcactctgctggacccccgctccttgctgttactgcagctcctccagcccagccccttgccaagaaaaaaggcgtaaagcggaaagcagatactaccacccctacacctacagccatcttggctcctggttctccagctagccctcctgggagtcttgagcctaagggacaggcaacggggtttccccccctattgcgttaaagaagagggagttggtcagccccattcaaggcccccaaggcaaaagaaccttggcctttggattcctca

SEQ ID NO: 379514 - DNA, 1164 bp, Homo sapiens
taatgggatgtgttggttggcagctgacgttcaagaagggaacttgggaaccttaggggcccataataagatgcttggggcaatcttaatgtatcctgataaatttctttcattagccattaagaagcctgtgggaaagacaaaggaggaactggctttggagaaaaagcgggaattagaaaagcggttacaagatgtcagcggacagctcaattctactaaaaagccccccaagaaagcgaatgagaaaacagagtcatcctctgcacagcaagtagcagtgtcacgccttagcgcttccagctccagctcagattccagctcctcctcttcctcgtcgtcgtcttcagacaccagtgattcagactcaggctaaggggtcaggccagatggggcaggaaggctccgcaggaccggacccctagaccaccctgccccacctgccccttccccctttgctgtgacacttcttcatctcacccccccctgcccccctctaggagagctggctctgcagtgggggagggatgcagggacatttactgaaggagggacatggacaaaacaacattgaattcccagccccattggggagtgatctcttggacacagagcccccattcaaaatggggcagggcaagggtgggagtgtgcaaagccctgatctggagttacctgaggccatagctgccctattcacttctaagggccctgttttgagattgtttgttctaatttattttaagctaggtaaggctggggggagggtggggccgtggtcccctcagcctccatggggagggaagaagggggagctctttttttacgttgatttttttttttctactctgttttccctttttccttccgctccatttggggccctgggggtttcagtcatctccccatttggtcccctggactgtctttgttgattctaacttgtaaataaagaaaatattattcaagttttgagttaccttaatatttgcttttgtagtgtttcaaaaggaacatcataagaattgtcttgataattttgagggaaatattactgcagtgagaaaaggcaatagctaacctataattggattgtcttaatttttaaaccagtaggcttttgctgtgtttttaataaagtaaatatgacttttgtaaattgag

SEQ ID NO: 379515 - DNA, 370 bp, Homo sapiens
ctggaacgaggactgggattctgctttactttagcagacagtaggccatggagactctacaagtgggggcaatttgggggcaatttgatgagcaaaggcaattaagaacacagaaaattcttctcaatctttcacttcataaaggtggattaataaattcaggttcattctagaggtaggcaaacataagagggactgcaaaagattagatgataatgttgcctcccgagaagacttacagaaagtcttagaaccacattgtataaatctgtgtggattttaaagtgatgccaccttcctgtttatgccctccttcccacaatacacacttgtcgaaaggcgtagtcatgcaaaaatttaggcatatgga

SEQ ID NO: 379516 - DNA, 383 bp, Homo sapiens
agaggttgtttctcatgctgatgaaacagactaggactcttctacaatcttgtttctgacttttcttgagtgggatgataaaaattggagagctcctggccgggcgcggtggctcacgcctgtaatcccagcactttgggaggccgaggcgggcggatcacgaggtcaggagatcgagaccatcctggctaaaacggtgaaaccccgtctctactaaaaatacaaaaaattagccgggcgtgtggcgggcgcctgtagtcccagctacttgggaggctgaggcaggagaatggcgtgaacccgggaggcggagcttgcagtgagccgagatcccgccactgcactccagcctgggcgacagagcgagactccgtctcaaaaaa

SEQ ID NO: 379517 - DNA, 1941 bp, Homo sapiens
ggtcctctgtggtgcacagcccaccccccagccatgcgctctctccttctgggcaccttatgcctcctggctgtggccctggcagccgaggtgaagaaacctgtagaggccgcagcccctggtactgcggagaagctgagttccaaggcgaccacactggcagagcccagcacaggcctggccttcagcctgtatcaggcaatggccaaggaccaggcagtggagaacatcctggtgtcacccgtggtggtggcctcgtcgctgggtctcgtgtcgctgggcggcaaggcgaccacggcgtcgcaggccaaggcagtgctgagcgccgagcagctgcgcgacgaggaggtgcacgccggcctgggtgagctgctgcgctcactcagcaactcgacggcgcgcaacgtgacctggaagctgggcagccgactgtacggacccagctcagtgagcttcgctgatgacttcgtgcgcagcagcaagcagcactacaactgcgagcactccaagatcaacttcccggacaagcgcagcgcgctgcagtccatcaacgagtgggccgcgcagaccaccgacggcaagctgcccgaggtcaccaaggacgtggagcgcacggacggcgccctgctagtcaacgccatgttcttcaagccacactgggatgagaaattccaccacaagatggtggacaaccgtggcttcatggtgactcggtcctatactgtgggtgttacgatgatgcaccggacaggcctctacaactactacgacgacgagaaggagaagctgcagctggtggagatgcccctggctcacaagctctccagcctcatcatcctcatgccccatcacgtggagcctctcgagcgccttgaaaagctgctaaccaaagagcagctgaagatctggatggggaagatgcagaagaaggctgttgccatctccttgcccaagggtgtggtggaggtgacccatgacctgcagaaacacctggctgggctgggcctgactgaggccattgacaagaacaaggccgacttatcacgcatgtcaggcaagaaggacctgtacctggccagcgtgttccacgccaccgcctttgagttggacacagatggcaacccctttgaccaggacatctacgggcgcgaggagctgcgcagccccaagctgttctacgccgaccaccccttcatcttcctagtgcgggacacccaaagcggctccctgctattcattgggcgcctggtccggcctaagggtgacaagatgcgagacgagttatagggcctcagggtgcacacaggatggcaggaggcatccaaaggctcctgagacacatgggtgctattggggttgggggggaggtgaggtaccagccttggatactccatgggagaattcactccacttggacatgggccccagataccatgatgctgagcccggaaactccacatcctgtgggacctgggccatagtcattctgcctgccctgaaagtcccagatcaagcctgcctcaatcagtattcatatttatagccaggtaccttctcacctgtgagaccaaattgagctaggggggtcagccagccctcttctgacactaaaacacctcagctgcctccccagctctatcccaacctctcccaactataaaactaggtgctgcagcccctgggaccaggcacccccagaatgacctggccgcagtgaggcggattgagaaggagctcccaggaggggcttctgggaagactctggtcaagaagcatcgtgtctggcgttgtggggatgaactttttgttttgtttcttccttttttagttcttcaaagatagggagggaagggggaacatgagcctttgttgctatcaatccaagaacttatttgtacatttttttttctcactgaaaccttttccagtgccaaaaaaaaa

SEQ ID NO: 379518 - DNA, 1500 bp, Homo sapiens
  misc_feature (1500)..(1500): n is a, c, g, or t
gttaccggtagcgaggcctgggtggcggtggtggaggtgacccatgacctgcagaaacacctggctgggctgggcctgactgaggccattgacaagaacaaggccgacttatcacgcatgtcaggcaagaaggacctgtacctggccagcgtgttccacgccaccgcctttgagttggacacagatggcaacccctttgaccaggacatctacgggcgcgaggagctgcgcagccccaagctgttctacgccgaccaccccttcatcttcctagtgcgggacacccaaagcggctccctgctattcattgggcgcctggtccggcctaagggtgacaagatgcgagacgagttatagggcctcagggtgcacacaggatggcaggaggcatccaaaggctcctgagacacatgggtgctattggggttgggggggaggtgaggtaccagccttggatactccatggggtgggggtggaaaaacagaccggggttcccgtgtgcctgagcggaccttcccagctagaattcactccacttggacatgggccccagataccatgatgctgagcccggaaactccacatcctgtgggacctgggccatagtcattctgcctgccctgaaagtcccagatcaagcctgcctcaatcagtattcatatttatagccaggtaccttctcacctgtgagaccaaattgagctaggggggtcagccagccctcttctgacactaaaacacctcagctgcctccccagctctatcccaacctctcccaactataaaactaggtgctgcagcccctgggaccaggcacccccagaatgacctggccgcagtgaggcggattgagaaggagctcccaggaggggcttctgggaagactctggtcaagaagcatcgtgtctggcgttgtggggatgaactttttgttttgtttcttccttttttagttcttcaaagatagggagggaagggggaacatgagcctttgttgctatcaatccaagaacttatttgtacatttttttttcaataaaacttttccaatgacaaaaaaaaaaaacacaaaacacaataaacaaaaaggaaaagcatataaaaacccctatataaaaatttataacacatttttctccaccccccccccccatcacaattccggcgaggtataaaccggggaacaccagtggagacgcgaatgacccaaatacacaggaatctcgcaaaagagatatatcgcagaggctcaaccgtttaacaaacgcgccctttgagagtaaagtgggaaaccgcgatcaacagaggcaaaaaaaagagccccaaacggaggacatggagaacacaccagacaacaacaagccccgcgagaaaagcaacgaagctctcgcaaataagaggggagagaaaaccccgagtcagaacacagacggacacacacacaggtctgcgacgagatgacacaaaaccgacacccccctccacccaccccaacaagn

SEQ ID NO: 379519 - DNA, 1264 bp, Homo sapiens
  misc_feature (1264)..(1264): n is a, c, g, or t
gttaccggtagcgaggcctgggtggcggtggtggaggtgacccatgacctgcagaaacacctggctgggctgggcctgactgaggccattgacaagaacaaggccgacttatcacgcatgtcaggcaagaaggacctgtacctggccagcgtgttccacgccaccgcctttgagttggacacagatggcaacccctttgaccaggacatctacgggcgcgaggagctgcgcagccccaagctgttctacgccgaccaccccttcatcttcctagtgcgggacacccaaagcggctccctgctattcattgggcgcctggtccggcctaagggtgacaagatgcgagacgagttatagggcctcagggtgcacacaggatggcaggaggcatccaaaggctcctgagacacatgggtgctattggggttgggggggaggtgaggtaccagccttggatactccatggggtgggggtggaaaaacagaccggggttcccgtgtgcctgagcggaccttcccagctctctatcccaacctctcccaactataaaactaggtgctgcagcccctgggaccaggcacccccagaatgacctggccgcagtgaggcggattgagaaggagctcccaggaggggcttctgggaagactctggtcaagaagcatcgtgtctggcgttgtggggatgaactttttgttttgtttcttccttttttagttcttcaaagatagggagggaagggggaacatgagcctttgttgctatcaatccaagaacttatttgtacatttttttttcaataaaacttttccaatgacaaaaaaaaaaaacacaaaacacaataaacaaaaaggaaaagcatataaaaacccctatataaaaatttataacacatttttctccaccccccccccccatcacaattccggcgaggtataaaccggggaacaccagtggagacgcgaatgacccaaatacacaggaatctcgcaaaagagatatatcgcagaggctcaaccgtttaacaaacgcgccctttgagagtaaagtgggaaaccgcgatcaacagaggcaaaaaaaagagccccaaacggaggacatggagaacacaccagacaacaacaagccccgcgagaaaagcaacgaagctctcgcaaataagaggggagagaaaaccccgagtcagaacacagacggacacacacacaggtctgcgacgagatgacacaaaaccgacacccccctccacccaccccaacaagn

SEQ ID NO: 379520 - DNA, 285 bp, Homo sapiens
aaagtctcacttttttccttgcatatttccttgcatatcgtatttattgtacataaatcttggcttccatcttcagagagcaaagtctttggtctaaaaactgagaaaatactgctcgatccttgcggtgggtagtgattagaagagggcaggacgcgggttcctagggtgcaagtaacgttctgttaattgatctgggtgttcacttggtgaaaagtctggaagctgtacctgcgacatcgcactttcctaatgtacgttatatttcaataaaagattttttta

SEQ ID NO: 379521 - DNA, 413 bp, Homo sapiens
tcatttatatataggatgtgttttggtcatagtttcacattagtgattcagtatctatacactgacccaatggttttgtgcacatgaacggtaatttacttaaaagtatgattctggtacaaaaacaaacaaaggctttagcaggcatacgtgtctgggatgccgatacatacattaactactactgcagaaattcataagagccaaaaccttaaaaaaatagacctggtacttaagtgaaagtactaaagggaagaccagaccaaacatcacagcagttgctgccacattgtttcagcccacttagatttatctttcaaatgtacaattctgtattgaacatctcccagccatcttcaggaaatcgaatcaagtaaatcctttccaaccgaaaacatttcaactaactatag

SEQ ID NO: 379522 - DNA, 321 bp, Homo sapiens
acagaggtaaacacagatgtaaaactgtggctcgcagtaggcacttagtaaatggggacagtatgcatcagcccccgcctcccatctgtcccctgcatgtgtaggtgtctttgccatggccaagtccctggattctcttatttaaactgcaggcagaataggctttgctgtccttccttaaaatgtctgagtatggccgggcgcggtggctcacgcctgtaatcctagcaccttgggaggccgaggcaggcagattgcctgagctcaggagtttgagaccagcctgggcaacatggtgaaaccccgtctctactaaaatac

SEQ ID NO: 379523 - DNA, 294 bp, Homo sapiens
acagaggtaaacacagatgtaaaactgtggctcgcagtaggcacttagtaaatggggacagtatgcatcagcccccgcctcccatctgtcccctgcatgtgtaggtgtctttgccatggccaagtccctggattctcttatttaaactgcaggcagaataggctttgctgtccttccttaaaatgtctgagtatggccgggctggtctcaaactcctgagctcagcaatctgcctgcctcggcctcccaaggtgctaggattacaggcgtgagccaccgcgcccggcgtcgagc

SEQ ID NO: 379524 - DNA, 275 bp, Homo sapiens
ggcatcaaactgtatatagttttcacctgtattgtgaaatataacagatatagaaaaacatgaaaagcctatatgtaaagtttttgttgttgttgttgttgtttttttgttgttgttgtttttttgtagaagtggagtctcactgtgtttcccaggcttgtctgaattcctggcctcaagcaatattcctgtctcagccatatatgtaaagtttaacaaaaatgtataaaatgaaaacctgtgtcaccaccgaccaggtcgagaaatagaatgtt

SEQ ID NO: 379525 - DNA, 640 bp, Homo sapiens
agttgcaccctaccctgtaatgcccaatatcattgccctttgtcttcctttcattttgctgttccatatctcagaggaaaagggaaatacttctaatttctccatatctctaaactctgagttccaactacatttgtatatagtaattagccaacactttatattcatggaagctaaagaaacttagaaaacacatttccttctcccaaagcctggctttcaaaatcatgatcttgctgcgtgctccagaaattcagctttgtgagtaaagctgatccatcacacctttgctggaggcagaactgtcctactgtcccctggggcaagaggcctcatggctcagcctcagaggtggaaggctggaagggaccatgataccaaagcggattaaagtgcattgacttcacatcttcaaaatattaccaacaaatatgtacaaaaaagccctccttaggggtataaacaagtgtaagtaaactctccttgttcctttctctgaagctgtcttccttgcagtctaagaatcctgtgctgtatttggtcacaaatttccagtctataattttgttgtagccctttttaatttttgcagccagagtgggagagactcaagcttatcaacattttgcatcttgacaaa

SEQ ID NO: 379526 - DNA, 866 bp, Homo sapiens
cccgctcctgctatcttcgtcgtgcttctctctcggtggtgccctatcttgtgtggactcctgatggtctgtggcgactggtgtgagactccggctcatggggctgttctgcgcgagtgtgtatgcgcttgtgcgggggttatgacggcctgaatgggcgcctttattagcgccgcctgagttggggcggtccttcaatatggaggttgtaccgtttgtaccttgggcccccctagatgggatgcgcaaatttgtcataagggccccccccggtaacacaattttttgcgctttggggaacacaaggttctcggcccaaacttacctcccctgttgggccaagtaccccgccttgggcgaggtccaaaccaaatgggcatggctctgcttcagtaaaataataaaattactttgtaaataaatataaaaacaggtggttggctggatttggtcatggagccatagtttgctgatacctgatctaaaataattactgccacgttgatctttagatctgtctcttttgcttgctttgaaaaaaaagcataacatctaggaaatactaagagctatccctagtttttcctttgcatcactctacttcatgtcttctgcttccttttattcctctttgcagctcgtgatgcgttgggtattaaacacaccatggtgaagattcgtcccttgtcacaggccacaagagcagccaaggccaaagctagagcttatgctggtgagtctataatctctgggtttttttcttgctgatggtggtattattgttctttccagaagttttatagcatccagacatctaaagacatatcacttttatttttagtgttaaaagaaatatgtttttaaga

SEQ ID NO: 379527 - DNA, 457 bp, Homo sapiens
cacccatttctgcttcttgaaaggtagtatatctcaaggaaactatggcttagtatgttggggttggggtttagggcgtggatattatatggtcttatacttacaacaggaactggtttcaagaagcaggaagacttccagtgtcctactattgaagcctgcacctgctgcattgctgttttcctggtatgatttccacttgttgttatccttagatttttctctcctgggtttggttctccgaatatcgttagaactcatatcttcttcagacttcatttacctcttgcttaggtggatcacatcctctagtagttgtgttggattcaaaagatggtaccatgccagagagcatgaggatgacagccttcagcatgcctgccctctcacatagcttcaatctggattggttgccttctgctgctggtgcacagttaccatcctagagtcccattcg

SEQ ID NO: 379528 - DNA, 3557 bp, Homo sapiens
gagcggccgcgcggagacggcggaagcggagagcaacagcgcgccgagacttccagtgtcctactattgaagcctgcacctgctgcattgctgttttcctgagacggagttttgccatgttgtccaggctggtgtcgaaatcctgagctcaagtggtctgcctgcctcggcttcccaaagtgctgggattacaggtgaggctgctgtcagaaaggaacttttacacagtttgccttcagagacagtctatcggcatgttgtagagttttattactaagaaaataaatgttacttacatgattgtggtggtgccatgcagcaagaatcagagagatgcagagttagagccagaaggcctgacatggcactttatgtacctaaagctcgtaggggtgcagtactccttaagacaggtgatgaagaagaaagctgtggttcacctaactctgtggtgaaagaaaagcaaaaagaaagttctctctcccaaaaagaagtctttaaagacaaaccggaggctcgaagactaaatatcaatcctgatagaaaggagcataattgtagagaagaaaagaaatcttcaacaaaattaagaatggacacatgccttcaaaaaacaaatagagtttgttctaagagaggaaccactgaatccaaagaagtattatcccaaggacaacagcagggagccccaaatgctggggttataactaatgcacctttgcagagacattttaaaccaaagaaggtggagtgtttggaagttgaaactacggatgtgacaggacatgagaggatacttctttcacaggcctgtttagaaatcagcgaggctcaagttccaagcaaaccattccaaaatgtggaattctgtgacttcagtaggcatgaacctgatggggaagcatttgaagacaaagatttggaaggcagaattgaaactgataccaaggttttggagatactatatgagtttcctagagtttttagttctgtcatgaaacctgagaatatgattgtaccaataaaactaagctctgattctgaaattgtacaacaaagcatgcaaacatcagatggaatattgaatcccagcagcggaggcatcaccactacttctgttcctggaagtccagatggtgtctttgatcaaacttgcgtagattttgaagttgagagtgtaggtggtatagccaatagtacaggtttcatcttagatcaaaaagatacagattccattcctgcaactatgggtcacatctctctgtcagagagcacaaatgacactgttagtccagtaatgattagagaatgtgagaagaatgacagcactgctgatgagttacatgtaaagcacgaacctcctgatacagctgtccttgctcatgaaacacatagagatagtggatttaagaatgtaggtgacattaccaataaagcatgtatgatggacactacaggtatgtcctgtagtgatcatgtaactgttgatagcccttatgtagttgcagttagaatagctgatgagacctctattaatacacgaagtttctcaaagtttgtaggaatgagtgcagatgcaacccctcttcatgtagctagaagtgggaatgacactgaagatttcagcaacccttctgcttgctcagatatttatggtgagagtatttcatctcattttacagagtcaacaggaaagttgatagagagcttgtcagattgtgcttcctccttacctataaaaaagattgctggtagtaattataacacttttttggactctgaactcagtatgttaaatgggacaaaagttctttcagacagtgccgtgggcattgacctgggtagtactggtgatacaacagaagcattgcacgaactaagaactgccgaagagttcaaaacagaagagcaagatgactcagggagtatagaatttggtgtatcttttcctgatagggaatcatcatctatggaaacatccatcgaaccaaaagcaactgaaacttctcacacagagggaattactgccattgaggagagctgggagtctatgtttaacgatgatggtgactgcctggatccacgtcttctacaagaggctttggtatcaggatgatgctggcctcataaaatgagttatggaggattccctctttttctattgattggaatagtttcagaaggaatggtatcagctcctccttgtacctctggtaggactcagctgtgaatccgtctggtcctggactttttttgttatcagggaataccaagagcagagagagcatccaggaacctagatctgattactacaatcatgaagttcctgatattgacctcagtgattgtgaattcccacatgtcattgaaatttatgactttccccaagaatttcgtactgaagaccttctacgggttttctgcagttatcaaaagaaaggatttgatattaaatgggtggatgatacacatgccctaggagtattctccagtccaattacagctcgtgatgcgttgggtattaaacacaccatggtgaagattcgtcccttgtcacaggccacaagagcagccaaggccaaagctagagcttatgctgagttcctccagccagcaaaggagcgtcctgagacttcagcagccctagccagaaggttagtcatcagtgcccttggggttcgaagtaagcagagcaaaaccgaacgagaagcagagctcaagaaactgcaagaagccagagagagaaagcggttggaagccaagcaacgggaagacatctgggaaggcagagaccagtctacagtttgaacatcactcaatgaaagggataattccatgaatcagaaaatgtttccatagccttcagataagatgatccttccagagctctatgtacatgcagatgtgcatgttaaagagataaagtgatcgagacaaggactgactgggtatagaaggaagacagactcctgtcttcactcctaaatgcagttctttggaatcaccctactgtggtgggcgtagtagggagccatcagctaggaagaaacgtgggagatgtgaattccaagagttgcctggacagggcaagtcatgttagcgtgggtcacacttccaagatatttaaagcaaatacaaaacagaacagaggattcaaaccgcaagtatgggagatttaggccctgcagaggcagaccattccttagtatctcacaaagcagagtaatactggaggcagagtagggggtggttggagagcagttagtacaaagaggcagaacagtgtctggtttacttggcatacacagaatctgcactgccggttccagaactccaaagttggtgaactacaggagatgtgggtatttagactccaaagtttatactgagctcagtgcctgggaccgctccagctgcactgcagccaggggggataccagcttcattcctcagagtaaaccaaccttgggagctgtgtgccagttccagtgtaagcagtaataccatgttgtaagagggaacattaaagcccattttatgacataaaaaaaagtggt

SEQ ID NO: 379529 - DNA, 3249 bp, Homo sapiens
gagcggccgcgcggagacggcggaagcggagagcaacagcgcgccgagacggagttttgccatgttgtccaggctggtgtcgaaatcctgagctcaagtggtctgcctgcctcggcttcccaaagtgctgggattacaggtgaggctgctgtcagaaaggaacttttacacagtttgccttcagagacagtctatcggcatgttgtagagttttattactaagaaaataaatgttacttacatgattgtggtggtgccatgcagcaagaatcagagagatgcagagttagagccagaaggcctgacatggcactttatgtacctaaagctcgtaggggtgcagtactccttaagacaggtgatgaagaagaaagctgtggttcacctaactctgtggtgaaagaaaagcaaaaagaaagttctctctcccaaaaagaagtctttaaagacaaaccggaggctcgaagactaaatatcaatcctgatagaaaggagcataattgtagagaagaaaagaaatcttcaacaaaattaagaatggacacatgccttcaaaaaacaaatagagtttgttctaagagaggaaccactgaatccaaagaagtattatcccaaggacaacagcagggagccccaaatgctggggttataactaatgcacctttgcagagacattttaaaccaaagaaggtggagtgtttggaagttgaaactacggatgtgacaggacatgagaggatacttctttcacaggcctgtttagaaatcagcgaggctcaagttccaagcaaaccattccaaaatgtggaattctgtgacttcagtaggcatgaacctgatggggaagcatttgaagacaaagatttggaaggcagaattgaaactgataccaaggttttggagatactatatgagtttcctagagtttttagttctgtcatgaaacctgagaatatgattgtaccaataaaactaagctctgattctgaaattgtacaacaaagcatgcaaacatcagatggaatattgaatcccagcagcggaggcatcaccactacttctgttcctggaagtccagatggtgtctttgatcaaacttgcgtagattttgaagttgagagtgtaggtggtatagccaatagtacaggtttcatcttagatcaaaaagatacagattccattcctgcaactatgggtcacatctctctgtcagagagcacaaatgacactgttagtccagtaatgattagagaatgtgagaagaatgacagcactgctgatgagttacatgtaaagcacgaacctcctgatacagctgtccttgctcatgaaacacatagagatagtggatttaagaatgtaggtgacattaccaataaagcatgtatgatggacactacaggtatgtcctgtagtgatcatgtaactgttgatagcccttatgtagttgcagttagaatagctgatgagacctctattaatacacgaagtttctcaaagtttgtaggaatgagtgcagatgcaacccctcttcatgtagctagaagtgggaatgacactgaagatttcagcaacccttctgcttgctcagatatttatggtgagagtatttcatctcattttacagagtcaacaggaaagttgatagagagcttgtcagattgtgcttcctccttacctataaaaaagattgctggtagtaattataacacttttttggactctgaactcagtatgttaaatgggacaaaagttctttcagacagtgccgtgggcattgacctgggtagtactggtgatacaacagaagcattgcacgaactaagaactgccgaagagttcaaaacagaagagcaagatgactcagggagtatagaatttggtgtatcttttcctgatagggaatcatcatctatggaaacatccatcgaaccaaaagcaactgaaacttctcacacagagggaattactgccattgaggagagctgggagtctatgtttaacgatgatggtgactgcctggatccacgtcttctacaagaggctttggtatcaggatgatgctggcctcataaaatgagttatggaggattccctctttttctattgattggaatagtttcagaaggaatggtatcagctcctccttgtacctctggtaggactcagctgtgaatccgtctggtcctggactttttttgttatcagggaataccaagagcagagagagcatccaggaacctagatctgattactacaatcatgaagttcctgatattgacctcagtgattgtgaattcccacatgtcattgaaatttatgactttccccaagaatttcgtactgaagaccttctacgggttttctgcagttatcaaaagaaaggatttgatattaaatgggtggatgatacacatgccctaggagtattctccagtccaattacagctcgtgatgcgttgggtattaaacacaccatggtgaagattcgtcccttgtcacaggccacaagagcagccaaggccaaagctagagcttatgctgagttcctccagccagcaaaggagcgtcctgagacttcagcagccctagccagaaggttagtcatcagtgcccttggggttcgaagtaagcagagcaaaaccgaacgagaagcagagctcaagaaactgcaagaagccagagagagaaagcggttggaagccaagcaacgggaagacatctgggaaggcagagaccagtctacagtttgaacatcactcaatgaaagggataattccatgaatcagaaaatgtttccatagccttcagataagatgatccttccagagctctatgtacatgcagatgtgcatgttaaagagataaagtgatcgagacaaggactgactgggtatagaaggaagacagactcctgtcttcactcctaaatgcagttctttggaatcaccctactgtggtgggcgtagtagggagccatcagctaggaagaaacgtgggagatgtgaattccaagagttgcctggacagggcaagtcatgttagcgtgggtcacacttccaagatatttaaagcaaatacaaaacagaacagaggattcaaaccgcaagtatgggagatttaggccctgcagaggcagaccattccttagtatctcacaaagcagagtaatactggaggcagagtagggggtggttggagagcagttagtaacaggagtgctgacgttggtaccgagctcgattctat

SEQ ID NO: 379530 - DNA, 260 bp, Homo sapiens
aaccacaaagccaggcatggtggcatgtgtctggtcctagctactcaggaggcagaggtggaaggatcgcttgagcctggaagggcagaggttacagtgagctgagatcgctccactgtactctagcctgggtgacagtgtgagactctgtcccaaaaagaaaaaagaaaatattttggttcaatacattgtaattagtgtctaataattaaatcattcttctcttgcagattgtggtggtgccatgcagcaagaatcag

SEQ ID NO: 379531 - DNA, 3502 bp, Homo sapiens
gagcggccgcgcggagacggcggaagcggagagcaacagcgcgccgagacggagttttgccatgttgtccaggctggtgtcgaaatcctgagctcaagtggtctgcctgcctcggcttcccaaagtgctgggattacaggtgaggctgctgtcagaaaggaacttttacacagtttgccttcagagacagtctatcggcatgttgtagagttttattactaagaaaataaatgttacttacatgattgtggtggtgccatgcagcaagaatcagagagatgcagagttagagccagaaggcctgacatggcactttatgtacctaaagctcgtaggggtgcagtactccttaagacaggtgatgaagaagaaagctgtggttcacctaactctgtggtgaaagaaaagcaaaaagaaagttctctctcccaaaaagaagtctttaaagacaaaccggaggctcgaagactaaatatcaatcctgatagaaaggagcataattgtagagaagaaaagaaatcttcaacaaaattaagaatggacacatgccttcaaaaaacaaatagagtttgttctaagagaggaaccactgaatccaaagaagtattatcccaaggacaacagcagggagccccaaatgctggggttataactaatgcacctttgcagagacattttaaaccaaagaaggtggagtgtttggaagttgaaactacggatgtgacaggacatgagaggatacttctttcacaggcctgtttagaaatcagcgaggctcaagttccaagcaaaccattccaaaatgtggaattctgtgacttcagtaggcatgaacctgatggggaagcatttgaagacaaagatttggaaggcagaattgaaactgataccaaggttttggagatactatatgagtttcctagagtttttagttctgtcatgaaacctgagaatatgattgtaccaataaaactaagctctgattctgaaattgtacaacaaagcatgcaaacatcagatggaatattgaatcccagcagcggaggcatcaccactacttctgttcctggaagtccagatggtgtctttgatcaaacttgcgtagattttgaagttgagagtgtaggtggtatagccaatagtacaggtttcatcttagatcaaaaagatacagattccattcctgcaactatgggtcacatctctctgtcagagagcacaaatgacactgttagtccagtaatgattagagaatgtgagaagaatgacagcactgctgatgagttacatgtaaagcacgaacctcctgatacagctgtccttgctcatgaaacacatagagatagtggatttaagaatgtaggtgacattaccaataaagcatgtatgatggacactacaggtatgtcctgtagtgatcatgtaactgttgatagcccttatgtagttgcagttagaatagctgatgagacctctattaatacacgaagtttctcaaagtttgtaggaatgagtgcagatgcaacccctcttcatgtagctagaagtgggaatgacactgaagatttcagcaacccttctgcttgctcagatatttatggtgagagtatttcatctcattttacagagtcaacaggaaagttgatagagagcttgtcagattgtgcttcctccttacctataaaaaagattgctggtagtaattataacacttttttggactctgaactcagtatgttaaatgggacaaaagttctttcagacagtgccgtgggcattgacctgggtagtactggtgatacaacagaagcattgcacgaactaagaactgccgaagagttcaaaacagaagagcaagatgactcagggagtatagaatttggtgtatcttttcctgatagggaatcatcatctatggaaacatccatcgaaccaaaagcaactgaaacttctcacacagagggaattactgccattgaggagagctgggagtctatgtttaacgatgatggtgactgcctggatccacgtcttctacaagaggctttggtatcaggatgatgctggcctcataaaatgagttatggaggattccctctttttctattgattggaatagtttcagaaggaatggtatcagctcctccttgtacctctggtaggactcagctgtgaatccgtctggtcctggactttttttgttatcagggaataccaagagcagagagagcatccaggaacctagatctgattactacaatcatgaagttcctgatattgacctcagtgattgtgaattcccacatgtcattgaaatttatgactttccccaagaatttcgtactgaagaccttctacgggttttctgcagttatcaaaagaaaggatttgatattaaatgggtggatgatacacatgccctaggagtattctccagtccaattacagctcgtgatgcgttgggtattaaacacaccatggtgaagattcgtcccttgtcacaggccacaagagcagccaaggccaaagctagagcttatgctgagttcctccagccagcaaaggagcgtcctgagacttcagcagccctagccagaaggttagtcatcagtgcccttggggttcgaagtaagcagagcaaaaccgaacgagaagcagagctcaagaaactgcaagaagccagagagagaaagcggttggaagccaagcaacgggaagacatctgggaaggcagagaccagtctacagtttgaacatcactcaatgaaagggataattccatgaatcagaaaatgtttccatagccttcagataagatgatccttccagagctctatgtacatgcagatgtgcatgttaaagagataaagtgatcgagacaaggactgactgggtatagaaggaagacagactcctgtcttcactcctaaatgcagttctttggaatcaccctactgtggtgggcgtagtagggagccatcagctaggaagaaacgtgggagatgtgaattccaagagttgcctggacagggcaagtcatgttagcgtgggtcacacttccaagatatttaaagcaaatacaaaacagaacagaggattcaaaccgcaagtatgggagatttaggccctgcagaggcagaccattccttagtatctcacaaagcagagtaatactggaggcagagtagggggtggttggagagcagttagtacaaagaggcagaacagtgtctggtttacttggcatacacagaatctgcactgccggttccagaactccaaagttggtgaactacaggagatgtgggtatttagactccaaagtttatactgagctcagtgcctgggaccgctccagctgcactgcagccaggggggataccagcttcattcctcagagtaaaccaaccttgggagctgtgtgccagttccagtgtaagcagtaataccatgttgtaagagggaacattaaagcccattttatgacataaaaaaaagtggt

SEQ ID NO: 379532 - DNA, 3409 bp, Homo sapiens
gagcggccgcgcggagacggcggaagcggagagcaacagcgcgccggtgaggctgctgtcagaaaggaacttttacacagtttgccttcagagacagtctatcggcatgttgtagagttttattactaagaaaataaatgttacttacatgattgtggtggtgccatgcagcaagaatcagagagatgcagagttagagccagaaggcctgacatggcactttatgtacctaaagctcgtaggggtgcagtactccttaagacaggtgatgaagaagaaagctgtggttcacctaactctgtggtgaaagaaaagcaaaaagaaagttctctctcccaaaaagaagtctttaaagacaaaccggaggctcgaagactaaatatcaatcctgatagaaaggagcataattgtagagaagaaaagaaatcttcaacaaaattaagaatggacacatgccttcaaaaaacaaatagagtttgttctaagagaggaaccactgaatccaaagaagtattatcccaaggacaacagcagggagccccaaatgctggggttataactaatgcacctttgcagagacattttaaaccaaagaaggtggagtgtttggaagttgaaactacggatgtgacaggacatgagaggatacttctttcacaggcctgtttagaaatcagcgaggctcaagttccaagcaaaccattccaaaatgtggaattctgtgacttcagtaggcatgaacctgatggggaagcatttgaagacaaagatttggaaggcagaattgaaactgataccaaggttttggagatactatatgagtttcctagagtttttagttctgtcatgaaacctgagaatatgattgtaccaataaaactaagctctgattctgaaattgtacaacaaagcatgcaaacatcagatggaatattgaatcccagcagcggaggcatcaccactacttctgttcctggaagtccagatggtgtctttgatcaaacttgcgtagattttgaagttgagagtgtaggtggtatagccaatagtacaggtttcatcttagatcaaaaagatacagattccattcctgcaactatgggtcacatctctctgtcagagagcacaaatgacactgttagtccagtaatgattagagaatgtgagaagaatgacagcactgctgatgagttacatgtaaagcacgaacctcctgatacagctgtccttgctcatgaaacacatagagatagtggatttaagaatgtaggtgacattaccaataaagcatgtatgatggacactacaggtatgtcctgtagtgatcatgtaactgttgatagcccttatgtagttgcagttagaatagctgatgagacctctattaatacacgaagtttctcaaagtttgtaggaatgagtgcagatgcaacccctcttcatgtagctagaagtgggaatgacactgaagatttcagcaacccttctgcttgctcagatatttatggtgagagtatttcatctcattttacagagtcaacaggaaagttgatagagagcttgtcagattgtgcttcctccttacctataaaaaagattgctggtagtaattataacacttttttggactctgaactcagtatgttaaatgggacaaaagttctttcagacagtgccgtgggcattgacctgggtagtactggtgatacaacagaagcattgcacgaactaagaactgccgaagagttcaaaacagaagagcaagatgactcagggagtatagaatttggtgtatcttttcctgatagggaatcatcatctatggaaacatccatcgaaccaaaagcaactgaaacttctcacacagagggaattactgccattgaggagagctgggagtctatgtttaacgatgatggtgactgcctggatccacgtcttctacaagaggctttggtatcaggatgatgctggcctcataaaatgagttatggaggattccctctttttctattgattggaatagtttcagaaggaatggtatcagctcctccttgtacctctggtaggactcagctgtgaatccgtctggtcctggactttttttgttatcagggaataccaagagcagagagagcatccaggaacctagatctgattactacaatcatgaagttcctgatattgacctcagtgattgtgaattcccacatgtcattgaaatttatgactttccccaagaatttcgtactgaagaccttctacgggttttctgcagttatcaaaagaaaggatttgatattaaatgggtggatgatacacatgccctaggagtattctccagtccaattacagctcgtgatgcgttgggtattaaacacaccatggtgaagattcgtcccttgtcacaggccacaagagcagccaaggccaaagctagagcttatgctgagttcctccagccagcaaaggagcgtcctgagacttcagcagccctagccagaaggttagtcatcagtgcccttggggttcgaagtaagcagagcaaaaccgaacgagaagcagagctcaagaaactgcaagaagccagagagagaaagcggttggaagccaagcaacgggaagacatctgggaaggcagagaccagtctacagtttgaacatcactcaatgaaagggataattccatgaatcagaaaatgtttccatagccttcagataagatgatccttccagagctctatgtacatgcagatgtgcatgttaaagagataaagtgatcgagacaaggactgactgggtatagaaggaagacagactcctgtcttcactcctaaatgcagttctttggaatcaccctactgtggtgggcgtagtagggagccatcagctaggaagaaacgtgggagatgtgaattccaagagttgcctggacagggcaagtcatgttagcgtgggtcacacttccaagatatttaaagcaaatacaaaacagaacagaggattcaaaccgcaagtatgggagatttaggccctgcagaggcagaccattccttagtatctcacaaagcagagtaatactggaggcagagtagggggtggttggagagcagttagtacaaagaggcagaacagtgtctggtttacttggcatacacagaatctgcactgccggttccagaactccaaagttggtgaactacaggagatgtgggtatttagactccaaagtttatactgagctcagtgcctgggaccgctccagctgcactgcagccaggggggataccagcttcattcctcagagtaaaccaaccttgggagctgtgtgccagttccagtgtaagcagtaataccatgttgtaagagggaacattaaagcccattttatgacataaaaaaaagtggt

SEQ ID NO: 379533 - DNA, 190 bp, Homo sapiens
ggtcacacaaaatttgaatagatcttttcatgtatatttcttagccacctcattaggaaatgttttaaagctgaattatattttgtatctgggatcccatttatagccctagagatgatgttattcttctgaaatactaaaagaggccagctgtggttgctcacacctgtaatcccagccctttgggagg

SEQ ID NO: 379534 - DNA, 1853 bp, Homo sapiens
gcgcctgtaatctcagctactcgggaggctgaggcagagaattgcttgaacctgggaggcggaggttgcagtgagccgagatcgcgccactgcactccagcctgggcgacagagtgagactcggtctcaaaaaaaaaagaaagaactccctaactcttctgcagtagcaatgaatatatttgatactaaaatgttttcattttcctagtgggccatttactgtcaaatgaatgtccttaacttcaatttacagtagttacccaaaaaaggctatcttcactgactatgcatacctagaaaagcacatcatcctactcaccgaccttaacaacatcatctttcggccctaattaacaatgtgtttgtaggtttgcacacgcacacccatcaaacgaaggacaagtgttcttttataccctatgtatgtgatacaatgggctgtagtcgaaaaagattcctcattttggaaagaagtcataactttatgtagtagtctcctgtctcaagatcgcttgacacagctaatcttacatccgtctgaaagaagcgggggcgggggtgggggacggaagtgacagtttcctctttttttttttttttttttttttaattttatagagacagtggctcgccatattgccaaggctggcctcgaactcctgggctcaagcaatccttccgcctcgacatcccaaagtgctgagataacaggcgtaagccactgcgcccggcctcctatttttcatcaaataaaatacaaccgttcagagcagcatgctcagcaaccacgaggaccagtcccagcgcatccaaggtgccgggagggaaaggaacagaactcccccaggtaagccggtttccccacgccaaggcgcagtcgctcaccacccaaatcgtcgctggggagagacccacccggcgactgcgcgcttcgcactcgagtctgcgttaggaagcctctgaccctttcccgggcccctgcgcgtggaagcctcggacacaactcggagaaccagcgaaccccggcagcacagaattcgaaccgccgcgggagccgttgggacgcgcctacccggtcactgccccgccccggcgcagactgcgtgaggcgccgccggaggcgcggggcttgccggggatcgtggtcggcgagcgcgcccgagcccactagcggagcccgcccgggactacatttcccacaattaccgccatgatgcccattggtgggggaagccatgggaaccggaggccgtcagggggagaggcgggcggcgctcacgcctggcctgagggggccgagactgaggcggttgcggaataggactgctagccccgcccagagtccctaccctttggagaactgcgcttctctttcggagggagtgttcgccgccgccgcggccgccacctggagtttcttcagactccagatttccctgtcaaccacgaggagtccagagaggaaacgcggagcggagacaacagtacctgacgcctctttcagcccgggatcgccccagcagggatgggcgacaagatctggctgcccttccccgtgctccttctggccgctctgcctccggtgctgctgcctggggcggccggcttcacaccttccctcgatagcgacttcacctttacccttcccgccggccagaaggagtgcttctaccagcccatgcccctgaaggcctcgctggagatcgagtaccaagtaagtgcggaggataaaccagcctccttcctttaacccagctgcactgcgttgtcgcctctcacccgtttagaaacttctggtggacggccctggtggtgaagaggcgagggccgttcaggaagccagcccgctccgc

SEQ ID NO: 379535 - DNA, 5045 bp, Homo sapiens
gcgcctgtaatctcagctactcgggaggctgaggcagagaattgcttgaacctgggaggcggaggttgcagtgagccgagatcgcgccactgcactccagcctgggcgacagagtgagactcggtctcaaaaaaaaaagaaagaactccctaactcttctgcagtagcaatgaatatatttgatactaaaatgttttcattttcctagtgggccatttactgtcaaatgaatgtccttaacttcaatttacagtagttacccaaaaaaggctatcttcactgactatgcatacctagaaaagcacatcatcctactcaccgaccttaacaacatcatctttcggccctaattaacaatgtgtttgtaggtttgcacacgcacacccatcaaacgaaggacaagtgttcttttataccctatgtatgtgatacaatgggctgtagtcgaaaaagattcctcattttggaaagaagtcataactttatgtagtagtctcctgtctcaagatcgcttgacacagctaatcttacatccgtctgaaagaagcgggggcgggggtgggggacggaagtgacagtttcctctttttttttttttttttttttttaattttatagagacagtggctcgccatattgccaaggctggcctcgaactcctgggctcaagcaatccttccgcctcgacatcccaaagtgctgagataacaggcgtaagccactgcgcccggcctcctatttttcatcaaataaaatacaaccgttcagagcagcatgctcagcaaccacgaggaccagtcccagcgcatccaaggtgccgggagggaaaggaacagaactcccccaggtaagccggtttccccacgccaaggcgcagtcgctcaccacccaaatcgtcgctggggagagacccacccggcgactgcgcgcttcgcactcgagtctgcgttaggaagcctctgaccctttcccgggcccctgcgcgtggaagcctcggacacaactcggagaaccagcgaaccccggcagcacagaattcgaaccgccgcgggagccgttgggacgcgcctacccggtcactgccccgccccggcgcagactgcgtgaggcgccgccggaggcgcggggcttgccggggatcgtggtcggcgagcgcgcccgagcccactagcggagcccgcccgggactacatttcccacaattaccgccatgatgcccattggtgggggaagccatgggaaccggaggccgtcagggggagaggcgggcggcgctcacgcctggcctgagggggccgagactgaggcggttgcggaataggactgctagccccgcccagagtccctaccctttggagaactgcgcttctctttcggagggagtgttcgccgccgccgcggccgccacctggagtttcttcagactccagatttccctgtcaaccacgaggagtccagagaggaaacgcggagcggagacaacagtacctgacgcctctttcagcccgggatcgccccagcagggatgggcgacaagatctggctgcccttccccgtgctccttctggccgctctgcctccggtgctgctgcctggggcggccggcttcacaccttccctcgatagcgacttcacctttacccttcccgccggccagaaggagtgcttctaccagcccatgcccctgaaggcctcgctggagatcgagtaccaagttttagatggagcaggattagatattgatttccatcttgcctctccagaaggcaaaaccttagtttttgaacaaagaaaatcagatggagttcacactgtagagactgaagttggtgattacatgttctgctttgacaatacattcagcaccatttctgagaaggtgattttctttgaattaatcctggataatatgggagaacaggcacaagaacaagaagattggaagaaatatattactggcacagatatattggatatgaaactggaagacatcctggaatccatcaacagcatcaagtccagactaagcaaaagtgggcacatacaaattctgcttagagcatttgaagctcgtgatcgaaacatacaagaaagcaactttgatagagtcaatttctggtctatggttaatttagtggtcatggtggtggtgtcagccattcaagtttatatgctgaagagtctgtttgaagataagaggaaaagtagaacttaaaactccaaactagagtacgtaacattgaaaaatgaggcataaaaatgcaataaactgttacagtcaagaccattaatggtcttctccaaaatattttgagatataaaagtaggaaacaggtataattttaatgtgaaaattaagtcttcactttctgtgcaagtaatcctgctgatccagttgtacttaagtgtgtaacaggaatattttgcagaatataggtttaactgaatgaagccatattaataactgcattttcctaactttgaaaaattttgcaaatgtcttaggtgatttaaataaatgagtattgggcctaattgcaacaccagtctgtttttaacaggttctattacccagaacttttttgtaaatgcggcagttacaaattaactgtggaagttttcagttttaagttataaatcacctgagaattacctaatgatggattgaataaatctttagactacaaaagcccaacttttctctatttacatatgcatctctcctataatgtaaatagaataatagctttgaaatacaattaggtttttgagatttttataaccaaatacatttcagtgtaacatattagcagaaagcattagtctttgtactttgcttacattcccaaaagctgacattttcacgattcttaaaaacacaaagttacacttactaaaattaggacatgttttctctttgaaatgaagaatatagtttaaaagcttcctcctccatagggacacattttctctaacccttaactaaagtgtaggattttaaaattaaatgtgaggtaaaataagtttatttttaatagtatctgtcaagttaatatctgtcaacagttaataatcatgttatgttaattttaacatgattgctgacttggataattcattattaccagcagttatgaaggaaatattgctaaaatgatctgggcctaccataaataaatatctccttttctgagctctaagaattatcagaaacaggaaagaatttagaaaaacttgagaaaacctaatccaaaataaaattcacttaagtagaactataaataaatatctagaatctgactggctcatcatgacatcctactcataacataaatcaaaggagatgattaatttccagttagctggaagaaactttggctgtaggtttttattttctacaagaattctggtttgaattatttttgtaagcaggtacattttataaaatgtaagccctactgtaaggtttagcactgggtgtacatatttattaaaaatttttattataacaacttttattaaaatggcctttctgaacactttatttattgatgttgaagtaaggattagaaacatagactcccaagttttaaacacctaaatgtgaataacccatatatacaacaaagtttctgccatctagctttttgaagtctatgggggtcttactcaagtactagtaatttaacttcatcatgaatgaactataatttttaagttatgcccatttataacgttgtttatgactacattgtgagttagaaacaaacttaaaatttggggtatagaacccctcaacaggttagtaatgctggaattcttgatgagcaataatgataaccagagagtgatttcatttacactcatagtagtataaaaagagatacatttccctcttaggcccctgggagaagagcagcttagatttccctactggcaaggtttttaaaaatgaggtaaatgccgtatatgatcaattaccttaattggccaagaaaatgcttcaggtgtctaggggtatcctctgcaacacttgcagaacaaaggtcaataagatccttgcctatgaatacccctcccttttgcgctgttaaatttgcaatgagaagcaaatttacagtaccataactaataaagcagggtacagatataaactactgcatcttttctataaaactgtgattaagaattctacctctcctgtatggctgttactgtactgtactctctgactccttacctaacaatgaatttgttacataatcttctacatgtatgatttgtgccactgatcttaaacctatgattcagtaacttcttaccatataaaaacgataattgctttatttggaaaagaatttaggaatactaaggacaattatttttatagacaaagtaaaaagacagatatttaagaggcataaccaaaaaagcaaaacttgtaaacagagtaaaaatctttaatatttctaaagacatactgtttatctgcttcatatgctttttttaatttcactattccatttctaaattaaagttatgctaaattgagtaagctgtttatcacttaacagctcattttgtctttttcaatatacaaattttaaaaatactacaatatttaactaaggcccaaccgatttccataatgtagcagttaccgtgttcacctcacactaaggcctagagtttgctctgatatgcatttggatgattaatgttatgctgttctttcatgtgaatgtcaagacatggagggtgtttgtaattttatggtaaaattaatccttcttacacataatggtgtcttaaaattgacaaaaaatgagcacttacaattgtatgtctcctcaaatgaaaattctttatctgaaattttaaaagacattgattccgcatgtaaggatttttcatctgaagtacaataatgcacaatcagtgttgctcaaactgctttatacttataaacagccatcttaaataagcaacgtattgtgagtactgatatgtatataataaaaattatcaaagaaaattaactgcca

SEQ ID NO: 379536 - DNA, 4991 bp, Homo sapiens
gcgcctgtaatctcagctactcgggaggctgaggcagagaattgcttgaacctgggaggcggaggttgcagtgagccgagatcgcgccactgcactccagcctgggcgacagagtgagactcggtctcaaaaaaaaaagaaagaactccctaactcttctgcagtagcaatgaatatatttgatactaaaatgttttcattttcctagtgggccatttactgtcaaatgaatgtccttaacttcaatttacagtagttacccaaaaaaggctatcttcactgactatgcatacctagaaaagcacatcatcctactcaccgaccttaacaacatcatctttcggccctaattaacaatgtgtttgtaggtttgcacacgcacacccatcaaacgaaggacaagtgttcttttataccctatgtatgtgatacaatgggctgtagtcgaaaaagattcctcattttggaaagaagtcataactttatgtagtagtctcctgtctcaagatcgcttgacacagctaatcttacatccgtctgaaagaagcgggggcgggggtgggggacggaagtgacagtttcctctttttttttttttttttttttttaattttatagagacagtggctcgccatattgccaaggctggcctcgaactcctgggctcaagcaatccttccgcctcgacatcccaaagtgctgagataacaggcgtaagccactgcgcccggcctcctatttttcatcaaataaaatacaaccgttcagagcagcatgctcagcaaccacgaggaccagtcccagcgcatccaaggtgccgggagggaaaggaacagaactcccccaggtaagccggtttccccacgccaaggcgcagtcgctcaccacccaaatcgtcgctggggagagacccacccggcgactgcgcgcttcgcactcgagtctgcgttaggaagcctctgaccctttcccgggcccctgcgcgtggaagcctcggacacaactcggagaaccagcgaaccccggcagcacagaattcgaaccgccgcgggagccgttgggacgcgcctacccggtcactgccccgccccggcgcagactgcgtgaggcgccgccggaggcgcggggcttgccggggatcgtggtcggcgagcgcgcccgagcccactagcggagcccgcccgggactacatttcccacaattaccgccatgatgcccattggtgggggaagccatgggaaccggaggccgtcagggggagaggcgggcggcgctcacgcctggcctgagggggccgagactgaggcggttgcggaataggactgctagccccgcccagagtccctaccctttggagaactgcgcttctctttcggagggagtgttcgccgccgccgcggccgccacctggagtttcttcagactccagatttccctgtcaaccacgaggagtccagagaggaaacgcggagcggagacaacagtacctgacgcctctttcagcccgggatcgccccagcagggatgggcgacaagatctggctgcccttccccgtgctccttctggccgctctgcctccggtgctgctgcctggggcggccggcttcacaccttccctcgatagcgacttcacctttacccttcccgccggccagaaggagtgcttctaccagcccatgcccctgaaggcctcgctggagatcgagtaccaagttttagatggagcaggattagatattgatttccatcttgcctctccagaaggcaaaaccttagtttttgaacaaagaaaatcagatggagttcacactgtagagactgaagttggtgattacatgttctgctttgacaatacattcagcaccatttctgagaaggtgattttctttgaattaatcctggataatatgggagaacaggcacaagaacaagaagattggaagaaatatattactggcacagatatattggatatgaaactggaagacatcctggaatccatcaacagcatcaagtccagactaagcaaaagtgggcacatacaaattctgcttagagcatttgaagctcgtgatcgaaacatacaagaaagcaactttgatagagtcaatttctggtctatggttaatttagtggtcatggtggtggtgtcagccattcaagtttatatgctgaagagtctgtttgaagataagaggaaaagtagaacttaaaactccaaactagagtacgtaacattgaaaaatgaggcataaaaatgcaataaactgttacagtcaagaccattaatggtcttctccaaaatattttgagatataaaagtaggaaacaggtataattttaatgtgaaaattaagtcttcactttctgtgcaagtaatcctgctgatccagttgtacttaagtgtgtaacaggaatattttgcagaatataggtttaactgaatgaagccatattaataactgcattttcctaactttgaaaaattttgcaaatgtcttaggtgatttaaataaatgagtattgggcctaattgcaacaccagtctgtttttaacaggttctattacccagaacttttttgtaaatgcggcagttacaaattaactgtggaagttttcagttttaagttataaatcacctgagaattacctaatgatggattgaataaatctttagactacaaaagcccaacttttctctatttacatatgcatctctcctataatgtaaatagaataatagctttgaaatacaattaggtttttgagatttttataaccaaatacatttcagtgtaacatattagcagaaagcattagtctttgtactttgcttacattcccaaaagctgacattttcacgattcttaaaaacacaaagttacacttactaaaattaggacatgttttctctttgaaatgaagaatatagtttaaaagcttcctcctccatagggacacattttctctaacccttaactaaagtgtaggattttaaaattaaatgtgaggtaaaataagtttatttttaatagtatctgtcaagttaatatctgtcaacagttaataatcatgttatgttaattttaacatgattgctgacttggataattcattattaccagcagttatgaaggaaatattgctaaaatgatctgggcctaccataaataaatatctccttttctgagctctaagaattatcagaaacaggaaagaatttagaaaaacttgagaaaacctaatccaaaataaaattcacttaagtagaactataaataaatatctagaatctgactggctcatcatgacatcctactcataacataaatcaaaggagatgattaatttccagttagctggaagaaactttggctgtaggtttttattttctacaagaattctggtttgaattatttttgtaagcaggtacattttataaaatgtaagccctactgtaaggtttagcactgggtgtacatatttattaaaaatttttattataacaacttttattatagactcccaagttttaaacacctaaatgtgaataacccatatatacaacaaagtttctgccatctagctttttgaagtctatgggggtcttactcaagtactagtaatttaacttcatcatgaatgaactataatttttaagttatgcccatttataacgttgtttatgactacattgtgagttagaaacaaacttaaaatttggggtatagaacccctcaacaggttagtaatgctggaattcttgatgagcaataatgataaccagagagtgatttcatttacactcatagtagtataaaaagagatacatttccctcttaggcccctgggagaagagcagcttagatttccctactggcaaggtttttaaaaatgaggtaaatgccgtatatgatcaattaccttaattggccaagaaaatgcttcaggtgtctaggggtatcctctgcaacacttgcagaacaaaggtcaataagatccttgcctatgaatacccctcccttttgcgctgttaaatttgcaatgagaagcaaatttacagtaccataactaataaagcagggtacagatataaactactgcatcttttctataaaactgtgattaagaattctacctctcctgtatggctgttactgtactgtactctctgactccttacctaacaatgaatttgttacataatcttctacatgtatgatttgtgccactgatcttaaacctatgattcagtaacttcttaccatataaaaacgataattgctttatttggaaaagaatttaggaatactaaggacaattatttttatagacaaagtaaaaagacagatatttaagaggcataaccaaaaaagcaaaacttgtaaacagagtaaaaatctttaatatttctaaagacatactgtttatctgcttcatatgctttttttaatttcactattccatttctaaattaaagttatgctaaattgagtaagctgtttatcacttaacagctcattttgtctttttcaatatacaaattttaaaaatactacaatatttaactaaggcccaaccgatttccataatgtagcagttaccgtgttcacctcacactaaggcctagagtttgctctgatatgcatttggatgattaatgttatgctgttctttcatgtgaatgtcaagacatggagggtgtttgtaattttatggtaaaattaatccttcttacacataatggtgtcttaaaattgacaaaaaatgagcacttacaattgtatgtctcctcaaatgaaaattctttatctgaaattttaaaagacattgattccgcatgtaaggatttttcatctgaagtacaataatgcacaatcagtgttgctcaaactgctttatacttataaacagccatcttaaataagcaacgtattgtgagtactgatatgtatataataaaaattatcaaagaaaattaactgcca

SEQ ID NO: 379537 - DNA, 5309 bp, Homo sapiens
gcgcctgtaatctcagctactcgggaggctgaggcagagaattgcttgaacctgggaggcggaggttgcagtgagccgagatcgcgccactgcactccagcctgggcgacagagtgagactcggtctcaaaaaaaaaagaaagaactccctaactcttctgcagtagcaatgaatatatttgatactaaaatgttttcattttcctagtgggccatttactgtcaaatgaatgtccttaacttcaatttacagtagttacccaaaaaaggctatcttcactgactatgcatacctagaaaagcacatcatcctactcaccgaccttaacaacatcatctttcggccctaattaacaatgtgtttgtaggtttgcacacgcacacccatcaaacgaaggacaagtgttcttttataccctatgtatgtgatacaatgggctgtagtcgaaaaagattcctcattttggaaagaagtcataactttatgtagtagtctcctgtctcaagatcgcttgacacagctaatcttacatccgtctgaaagaagcgggggcgggggtgggggacggaagtgacagtttcctctttttttttttttttttttttttaattttatagagacagtggctcgccatattgccaaggctggcctcgaactcctgggctcaagcaatccttccgcctcgacatcccaaagtgctgagataacaggcgtaagccactgcgcccggcctcctatttttcatcaaataaaatacaaccgttcagagcagcatgctcagcaaccacgaggaccagtcccagcgcatccaaggtgccgggagggaaaggaacagaactcccccaggtaagccggtttccccacgccaaggcgcagtcgctcaccacccaaatcgtcgctggggagagacccacccggcgactgcgcgcttcgcactcgagtctgcgttaggaagcctctgaccctttcccgggcccctgcgcgtggaagcctcggacacaactcggagaaccagcgaaccccggcagcacagaattcgaaccgccgcgggagccgttgggacgcgcctacccggtcactgccccgccccggcgcagactgcgtgaggcgccgccggaggcgcggggcttgccggggatcgtggtcggcgagcgcgcccgagcccactagcggagcccgcccgggactacatttcccacaattaccgccatgatgcccattggtgggggaagccatgggaaccggaggccgtcagggggagaggcgggcggcgctcacgcctggcctgagggggccgagactgaggcggttgcggaataggactgctagccccgcccagagtccctaccctttggagaactgcgcttctctttcggagggagtgttcgccgccgccgcggccgccacctggagtttcttcagactccagatttccctgtcaaccacgaggagtccagagaggaaacgcggagcggagacaacagtacctgacgcctctttcagcccgggatcgccccagcagggatgggcgacaagatctggctgcccttccccgtgctccttctggccgctctgcctccggtgctgctgcctggggcggccggcttcacaccttccctcgatagcgacttcacctttacccttcccgccggccagaaggagtgcttctaccagcccatgcccctgaaggcctcgctggagatcgagtaccaagttttagatggagcaggattagatattgatttccatcttgcctctccagaaggcaaaaccttagtttttgaacaaagaaaatcagatggagttcacactgtagagactgaagttggtgattacatgttctgctttgacaatacattcagcaccatttctgagaaggtgattttctttgaattaatcctggataatatgggagaacaggcacaagaacaagaagattggaagaaatatattactggcacagatatattggatatgaaactggaagacatcctggtcagtatggtcttctaataaaataaaaattattaacagccagaggccttactatggtaataagttactgaactaagcattttatctgcattatccaggaaaatctgtttctaatattttatttttgccataaatactttgacctcaagtatcagcttaattttattttatattaatatagcccttttatagttttcaaataacttatcttccaggaccctattataaaaatagcttcagatgtgcaaataagactgcatcttggaatccatcaacagcatcaagtccagactaagcaaaagtgggcacatacaaattctgcttagagcatttgaagctcgtgatcgaaacatacaagaaagcaactttgatagagtcaatttctggtctatggttaatttagtggtcatggtggtggtgtcagccattcaagtttatatgctgaagagtctgtttgaagataagaggaaaagtagaacttaaaactccaaactagagtacgtaacattgaaaaatgaggcataaaaatgcaataaactgttacagtcaagaccattaatggtcttctccaaaatattttgagatataaaagtaggaaacaggtataattttaatgtgaaaattaagtcttcactttctgtgcaagtaatcctgctgatccagttgtacttaagtgtgtaacaggaatattttgcagaatataggtttaactgaatgaagccatattaataactgcattttcctaactttgaaaaattttgcaaatgtcttaggtgatttaaataaatgagtattgggcctaattgcaacaccagtctgtttttaacaggttctattacccagaacttttttgtaaatgcggcagttacaaattaactgtggaagttttcagttttaagttataaatcacctgagaattacctaatgatggattgaataaatctttagactacaaaagcccaacttttctctatttacatatgcatctctcctataatgtaaatagaataatagctttgaaatacaattaggtttttgagatttttataaccaaatacatttcagtgtaacatattagcagaaagcattagtctttgtactttgcttacattcccaaaagctgacattttcacgattcttaaaaacacaaagttacacttactaaaattaggacatgttttctctttgaaatgaagaatatagtttaaaagcttcctcctccatagggacacattttctctaacccttaactaaagtgtaggattttaaaattaaatgtgaggtaaaataagtttatttttaatagtatctgtcaagttaatatctgtcaacagttaataatcatgttatgttaattttaacatgattgctgacttggataattcattattaccagcagttatgaaggaaatattgctaaaatgatctgggcctaccataaataaatatctccttttctgagctctaagaattatcagaaacaggaaagaatttagaaaaacttgagaaaacctaatccaaaataaaattcacttaagtagaactataaataaatatctagaatctgactggctcatcatgacatcctactcataacataaatcaaaggagatgattaatttccagttagctggaagaaactttggctgtaggtttttattttctacaagaattctggtttgaattatttttgtaagcaggtacattttataaaatgtaagccctactgtaaggtttagcactgggtgtacatatttattaaaaatttttattataacaacttttattaaaatggcctttctgaacactttatttattgatgttgaagtaaggattagaaacatagactcccaagttttaaacacctaaatgtgaataacccatatatacaacaaagtttctgccatctagctttttgaagtctatgggggtcttactcaagtactagtaatttaacttcatcatgaatgaactataatttttaagttatgcccatttataacgttgtttatgactacattgtgagttagaaacaaacttaaaatttggggtatagaacccctcaacaggttagtaatgctggaattcttgatgagcaataatgataaccagagagtgatttcatttacactcatagtagtataaaaagagatacatttccctcttaggcccctgggagaagagcagcttagatttccctactggcaaggtttttaaaaatgaggtaaatgccgtatatgatcaattaccttaattggccaagaaaatgcttcaggtgtctaggggtatcctctgcaacacttgcagaacaaaggtcaataagatccttgcctatgaatacccctcccttttgcgctgttaaatttgcaatgagaagcaaatttacagtaccataactaataaagcagggtacagatataaactactgcatcttttctataaaactgtgattaagaattctacctctcctgtatggctgttactgtactgtactctctgactccttacctaacaatgaatttgttacataatcttctacatgtatgatttgtgccactgatcttaaacctatgattcagtaacttcttaccatataaaaacgataattgctttatttggaaaagaatttaggaatactaaggacaattatttttatagacaaagtaaaaagacagatatttaagaggcataaccaaaaaagcaaaacttgtaaacagagtaaaaatctttaatatttctaaagacatactgtttatctgcttcatatgctttttttaatttcactattccatttctaaattaaagttatgctaaattgagtaagctgtttatcacttaacagctcattttgtctttttcaatatacaaattttaaaaatactacaatatttaactaaggcccaaccgatttccataatgtagcagttaccgtgttcacctcacactaaggcctagagtttgctctgatatgcatttggatgattaatgttatgctgttctttcatgtgaatgtcaagacatggagggtgtttgtaattttatggtaaaattaatccttcttacacataatggtgtcttaaaattgacaaaaaatgagcacttacaattgtatgtctcctcaaatgaaaattctttatctgaaattttaaaagacattgattccgcatgtaaggatttttcatctgaagtacaataatgcacaatcagtgttgctcaaactgctttatacttataaacagccatcttaaataagcaacgtattgtgagtactgatatgtatataataaaaattatcaaagaaaattaactgcca

SEQ ID NO: 379538 - DNA, 4846 bp, Homo sapiens
gcgcctgtaatctcagctactcgggaggctgaggcagagaattgcttgaacctgggaggcggaggttgcagtgagccgagatcgcgccactgcactccagcctgggcgacagagtgagactcggtctcaaaaaaaaaagaaagaactccctaactcttctgcagtagcaatgaatatatttgatactaaaatgttttcattttcctagtgggccatttactgtcaaatgaatgtccttaacttcaatttacagtagttacccaaaaaaggctatcttcactgactatgcatacctagaaaagcacatcatcctactcaccgaccttaacaacatcatctttcggccctaattaacaatgtgtttgtaggtttgcacacgcacacccatcaaacgaaggacaagtgttcttttataccctatgtatgtgatacaatgggctgtagtcgaaaaagattcctcattttggaaagaagtcataactttatgtagtagtctcctgtctcaagatcgcttgacacagctaatcttacatccgtctgaaagaagcgggggcgggggtgggggacggaagtgacagtttcctctttttttttttttttttttttttaattttatagagacagtggctcgccatattgccaaggctggcctcgaactcctgggctcaagcaatccttccgcctcgacatcccaaagtgctgagataacaggcgtaagccactgcgcccggcctcctatttttcatcaaataaaatacaaccgttcagagcagcatgctcagcaaccacgaggaccagtcccagcgcatccaaggtgccgggagggaaaggaacagaactcccccaggtaagccggtttccccacgccaaggcgcagtcgctcaccacccaaatcgtcgctggggagagacccacccggcgactgcgcgcttcgcactcgagtctgcgttaggaagcctctgaccctttcccgggcccctgcgcgtggaagcctcggacacaactcggagaaccagcgaaccccggcagcacagaattcgaaccgccgcgggagccgttgggacgcgcctacccggtcactgccccgccccggcgcagactgcgtgaggcgccgccggaggcgcggggcttgccggggatcgtggtcggcgagcgcgcccgagcccactagcggagcccgcccgggactacatttcccacaattaccgccatgatgcccattggtgggggaagccatgggaaccggaggccgtcagggggagaggcgggcggcgctcacgcctggcctgagggggccgagactgaggcggttgcggaataggactgctagccccgcccagagtccctaccctttggagaactgcgcttctctttcggagggagtgttcgccgccgccgcggccgccacctggagtttcttcagactccagatttccctgtcaaccacgaggagtccagagaggaaacgcggagcggagacaacagtacctgacgcctctttcagcccgggatcgccccagcagggatgggcgacaagatctggctgcccttccccgtgctccttctggccgctctgcctccggtgctgctgcctggggcggccggcttcacaccttccctcgatagcgacttcacctttacccttcccgccggccagaaggagtgcttctaccagcccatgcccctgaaggcctcgctggagatcgagtaccaagttttagatggagcaggattagatattgatttccatcttgcctctccagaaggcaaaaccttagtttttgaacaaagaaaatcagatggagttcacactgtagagactgaagttggtgattacatgttctgctttgacaatacattcagcaccatttctgagaaggtgattttctttgaattaatcctggataatatgggagaacaggcacaagaacaagaagattggaagaaatatattactggcacagatatattggatatgaaactggaagacatcctggaatccatcaacagcatcaagtccagactaagcaaaagtgggcacatacaaattctgcttagagcatttgaagctcgtgatcgaaacatacaagaaagcaactttgatagagtcaatttctggtctatggttaatttagtggtcatggtggtggtgtcagccattcaagtttatatgctgaagagtctgtttgaagataagaggaaaagtagaacttaaaactccaaactagagtacgtaacattgaaaaatgaggcataaaaatgcaataaactgttacagtcaagaccattaatggtcttctccaaaatattttgagatataaaagtaggaaacaggtataattttaatgtgaaaattaagtcttcactttctgtgcaagtaatcctgctgatccagttgtacttaagtgtgtaacaggaatattttgcagaatataggtttaactgaatgaagccatattaataactgcattttcctaactttgaaaaattttgcaaatgtcttaggtgatttaaataaatgagtattgggcctaattgcaacaccagtctgtttttaacaggttctattacccagaacttttttgtaaatgcggcagttacaaattaactgtggaagttttcagttttaagttataaatcacctgagaattacctaatgatggattgaataaatctttagactacaaaagcccaacttttctctatttacatatgcatctctcctataatgtaaatagaataatagctttgaaatacaattaggtttttgagatttttataaccaaatacatttcagtgtaacatattagcagaaagcattagtctttgtactttgcttacattcccaaaagctgacattttcacgattcttaaaaacacaaagttacacttactaaaattaggacatgttttctctttgaaatgaagaatatagtttaaaagcttcctcctccatagggacacattttctctaacccttaactaaagtgtaggattttaaaattaaatgtgaggtaaaataagtttatttttaatagtatctgtcaagttaatatctgtcaacagttaataatcatgttatgttaattttaacatgattgctgacttggataattcattattaccagcagttatgaaggaaatattgctaaaatgatctgggcctaccataaataaatatctccttttctgagctctaagaattatcagaaacaggaaagaatttagaaaaacttgagaaaacctaatccaaaataaaattcacttaagtagaactataaataaatatctagaatctgactggctcatcatgacatcctactcataacataaatcaaaggagatgattaatttccagttagctggaagaaactttggctgtaggtttttattttctacaagaattctggtttgaattatttttgtaagcaggtacattttataaaatgtaagccctactgtaaggtttagcactgggtgtacatatttattaaaaatttttattataacaacttttattaaaatggcctttctgaacactttatttattgatgttgaagtaaggattagaaacatagactcccaagttttaaacacctaaatgtgaataacccatatatacaacaaagtttctgccatctagctttttgaagtctatgggggtcttactcaagtactagtaatttaacttcatcatgaatgaactataatttttaagttatgcccatttataacgttgtttatgactacattgtgagttagaaacaaacttaaaatttggggtatagaacccctcaacaggttagtaatgctggaattcttgatgagcaataatgataaccagagagtgatttcatttacactcatagtagtataaaaagagatacatttccctcttaggcccctgggagaagagcagcttagatttccctactggcaaggtttttaaaaatgaggtaaatgccgtatatgatcaattaccttaattggccaagaaaatgcttcaggtgtctaggggtatcctctgcaacacttgcagaacaaaggtcaataagatccttgcctatgaatacccctcccttttgcgctgttaaatttgcaatgagaagcaaatttacagtaccataactaataaagcagggtacagatataaactactgcatcttttctataaaactgtgattaagaattctacctctcctgtatggctgttactgtactgtactctctgactccttacctaacaatgaatttgttacataatcttctacatgtatgatttgtgccactgatcttaaacctatgattcagtaacttcttaccatataaaaacgataattgctttatttggaaaagaatttaggaatactaaggacaattatttttatagacaaagtaaaaagacagatatttaagaggcataaccaaaaaagcaaaacttgtaaacagagtaaaaatctttaatatttctaaagacatactgtttatctgcttcatatgctttttttaatttcactattccatttctaaattaaagttatgctaaattgagtaagctgtttatcacttaacagctcattttgtctttttcaatatacaaattttaaaaatactacaatatttaactaaggcccaaccgatttccataatgtagcagtacgtgtcactcaatagctaagttgtctgaaggatgggatagtatgggttccggagcacgcaggggtgaattatgaaaaactttaaaaggtctaatggaaggcaggtgtcagaatttgaaaaaagcgggttcagaaaaaggggttagcacaggggttttaaaaagcgcgggtgtgtttccaaaatgaag

SEQ ID NO: 379539 - DNA, 5380 bp, Homo sapiens
gcgcctgtaatctcagctactcgggaggctgaggcagagaattgcttgaacctgggaggcggaggttgcagtgagccgagatcgcgccactgcactccagcctgggcgacagagtgagactcggtctcaaaaaaaaaagaaagaactccctaactcttctgcagtagcaatgaatatatttgatactaaaatgttttcattttcctagtgggccatttactgtcaaatgaatgtccttaacttcaatttacagtagttacccaaaaaaggctatcttcactgactatgcatacctagaaaagcacatcatcctactcaccgaccttaacaacatcatctttcggccctaattaacaatgtgtttgtaggtttgcacacgcacacccatcaaacgaaggacaagtgttcttttataccctatgtatgtgatacaatgggctgtagtcgaaaaagattcctcattttggaaagaagtcataactttatgtagtagtctcctgtctcaagatcgcttgacacagctaatcttacatccgtctgaaagaagcgggggcgggggtgggggacggaagtgacagtttcctctttttttttttttttttttttttaattttatagagacagtggctcgccatattgccaaggctggcctcgaactcctgggctcaagcaatccttccgcctcgacatcccaaagtgctgagataacaggcgtaagccactgcgcccggcctcctatttttcatcaaataaaatacaaccgttcagagcagcatgctcagcaaccacgaggaccagtcccagcgcatccaaggtgccgggagggaaaggaacagaactcccccaggtaagccggtttccccacgccaaggcgcagtcgctcaccacccaaatcgtcgctggggagagacccacccggcgactgcgcgcttcgcactcgagtctgcgttaggaagcctctgaccctttcccgggcccctgcgcgtggaagcctcggacacaactcggagaaccagcgaaccccggcagcacagaattcgaaccgccgcgggagccgttgggacgcgcctacccggtcactgccccgccccggcgcagactgcgtgaggcgccgccggaggcgcggggcttgccggggatcgtggtcggcgagcgcgcccgagcccactagcggagcccgcccgggactacatttcccacaattaccgccatgatgcccattggtgggggaagccatgggaaccggaggccgtcagggggagaggcgggcggcgctcacgcctggcctgagggggccgagactgaggcggttgcggaataggactgctagccccgcccagagtccctaccctttggagaactgcgcttctctttcggagggagtgttcgccgccgccgcggccgccacctggagtttcttcagactccagatttccctgtcaaccacgaggagtccagagaggaaacgcggagcggagacaacagtacctgacgcctctttcagcccgggatcgccccagcagggatgggcgacaagatctggctgcccttccccgtgctccttctggccgctctgcctccggtgctgctgcctggggcggccggcttcacaccttccctcgatagcgacttcacctttacccttcccgccggccagaaggagtgcttctaccagcccatgcccctgaaggcctcgctggagatcgagtaccaagttttagatggagcaggattagatattgatttccatcttgcctctccagaaggcaaaaccttagtttttgaacaaagaaaatcagatggagttcacacgtgtataagaagtaaaaatgggccaggcactgcggttcacgcctataatcccagcactttccgaggccgagtgtagagactgaagttggtgattacatgttctgctttgacaatacattcagcaccatttctgagaaggtgattttctttgaattaatcctggataatatgggagaacaggcacaagaacaagaagattggaagaaatatattactggcacagatatattggatatgaaactggaagacatcctggtcagtatggtcttctaataaaataaaaattattaacagccagaggccttactatggtaataagttactgaactaagcattttatctgcattatccaggaaaatctgtttctaatattttatttttgccataaatactttgacctcaagtatcagcttaattttattttatattaatatagcccttttatagttttcaaataacttatcttccaggaccctattataaaaatagcttcagatgtgcaaataagactgcatcttggaatccatcaacagcatcaagtccagactaagcaaaagtgggcacatacaaattctgcttagagcatttgaagctcgtgatcgaaacatacaagaaagcaactttgatagagtcaatttctggtctatggttaatttagtggtcatggtggtggtgtcagccattcaagtttatatgctgaagagtctgtttgaagataagaggaaaagtagaacttaaaactccaaactagagtacgtaacattgaaaaatgaggcataaaaatgcaataaactgttacagtcaagaccattaatggtcttctccaaaatattttgagatataaaagtaggaaacaggtataattttaatgtgaaaattaagtcttcactttctgtgcaagtaatcctgctgatccagttgtacttaagtgtgtaacaggaatattttgcagaatataggtttaactgaatgaagccatattaataactgcattttcctaactttgaaaaattttgcaaatgtcttaggtgatttaaataaatgagtattgggcctaattgcaacaccagtctgtttttaacaggttctattacccagaacttttttgtaaatgcggcagttacaaattaactgtggaagttttcagttttaagttataaatcacctgagaattacctaatgatggattgaataaatctttagactacaaaagcccaacttttctctatttacatatgcatctctcctataatgtaaatagaataatagctttgaaatacaattaggtttttgagatttttataaccaaatacatttcagtgtaacatattagcagaaagcattagtctttgtactttgcttacattcccaaaagctgacattttcacgattcttaaaaacacaaagttacacttactaaaattaggacatgttttctctttgaaatgaagaatatagtttaaaagcttcctcctccatagggacacattttctctaacccttaactaaagtgtaggattttaaaattaaatgtgaggtaaaataagtttatttttaatagtatctgtcaagttaatatctgtcaacagttaataatcatgttatgttaattttaacatgattgctgacttggataattcattattaccagcagttatgaaggaaatattgctaaaatgatctgggcctaccataaataaatatctccttttctgagctctaagaattatcagaaacaggaaagaatttagaaaaacttgagaaaacctaatccaaaataaaattcacttaagtagaactataaataaatatctagaatctgactggctcatcatgacatcctactcataacataaatcaaaggagatgattaatttccagttagctggaagaaactttggctgtaggtttttattttctacaagaattctggtttgaattatttttgtaagcaggtacattttataaaatgtaagccctactgtaaggtttagcactgggtgtacatatttattaaaaatttttattataacaacttttattaaaatggcctttctgaacactttatttattgatgttgaagtaaggattagaaacatagactcccaagttttaaacacctaaatgtgaataacccatatatacaacaaagtttctgccatctagctttttgaagtctatgggggtcttactcaagtactagtaatttaacttcatcatgaatgaactataatttttaagttatgcccatttataacgttgtttatgactacattgtgagttagaaacaaacttaaaatttggggtatagaacccctcaacaggttagtaatgctggaattcttgatgagcaataatgataaccagagagtgatttcatttacactcatagtagtataaaaagagatacatttccctcttaggcccctgggagaagagcagcttagatttccctactggcaaggtttttaaaaatgaggtaaatgccgtatatgatcaattaccttaattggccaagaaaatgcttcaggtgtctaggggtatcctctgcaacacttgcagaacaaaggtcaataagatccttgcctatgaatacccctcccttttgcgctgttaaatttgcaatgagaagcaaatttacagtaccataactaataaagcagggtacagatataaactactgcatcttttctataaaactgtgattaagaattctacctctcctgtatggctgttactgtactgtactctctgactccttacctaacaatgaatttgttacataatcttctacatgtatgatttgtgccactgatcttaaacctatgattcagtaacttcttaccatataaaaacgataattgctttatttggaaaagaatttaggaatactaaggacaattatttttatagacaaagtaaaaagacagatatttaagaggcataaccaaaaaagcaaaacttgtaaacagagtaaaaatctttaatatttctaaagacatactgtttatctgcttcatatgctttttttaatttcactattccatttctaaattaaagttatgctaaattgagtaagctgtttatcacttaacagctcattttgtctttttcaatatacaaattttaaaaatactacaatatttaactaaggcccaaccgatttccataatgtagcagttaccgtgttcacctcacactaaggcctagagtttgctctgatatgcatttggatgattaatgttatgctgttctttcatgtgaatgtcaagacatggagggtgtttgtaattttatggtaaaattaatccttcttacacataatggtgtcttaaaattgacaaaaaatgagcacttacaattgtatgtctcctcaaatgaaaattctttatctgaaattttaaaagacattgattccgcatgtaaggatttttcatctgaagtacaataatgcacaatcagtgttgctcaaactgctttatacttataaacagccatcttaaataagcaacgtattgtgagtactgatatgtatataataaaaattatcaaagaaaattaactgcca

SEQ ID NO: 379540 - DNA, 4942 bp, Homo sapiens
gcgcctgtaatctcagctactcgggaggctgaggcagagaattgcttgaacctgggaggcggaggttgcagtgagccgagatcgcgccactgcactccagcctgggcgacagagtgagactcggtctcaaaaaaaaaagaaagaactccctaactcttctgcagtagcaatgaatatatttgatactaaaatgttttcattttcctagtgggccatttactgtcaaatgaatgtccttaacttcaatttacagtagttacccaaaaaaggctatcttcactgactatgcatacctagaaaagcacatcatcctactcaccgaccttaacaacatcatctttcggccctaattaacaatgtgtttgtaggtttgcacacgcacacccatcaaacgaaggacaagtgttcttttataccctatgtatgtgatacaatgggctgtagtcgaaaaagattcctcattttggaaagaagtcataactttatgtagtagtctcctgtctcaagatcgcttgacacagctaatcttacatccgtctgaaagaagcgggggcgggggtgggggacggaagtgacagtttcctctttttttttttttttttttttttaattttatagagacagtggctcgccatattgccaaggctggcctcgaactcctgggctcaagcaatccttccgcctcgacatcccaaagtgctgagataacaggcgtaagccactgcgcccggcctcctatttttcatcaaataaaatacaaccgttcagagcagcatgctcagcaaccacgaggaccagtcccagcgcatccaaggtgccgggagggaaaggaacagaactcccccaggtaagccggtttccccacgccaaggcgcagtcgctcaccacccaaatcgtcgctggggagagacccacccggcgactgcgcgcttcgcactcgagtctgcgttaggaagcctctgaccctttcccgggcccctgcgcgtggaagcctcggacacaactcggagaaccagcgaaccccggcagcacagaattcgaaccgccgcgggagccgttgggacgcgcctacccggtcactgccccgccccggcgcagactgcgtgaggcgccgccggaggcgcggggcttgccggggatcgtggtcggcgagcgcgcccgagcccactagcggagcccgcccgggactacatttcccacaattaccgccatgatgcccattggtgggggaagccatgggaaccggaggccgtcagggggagaggcgggcggcgctcacgcctggcctgagggggccgagactgaggcggttgcggaataggactgctagccccgcccagagtccctaccctttggagaactgcgcttctctttcggagggagtgttcgccgccgccgcggccgccacctggagtttcttcagactccagatttccctgtcaaccacgaggagtccagagaggaaacgcggagcggagacaacagtacctgacgcctctttcagcccgggatcgccccagcagggatgggcgacaagatctggctgcccttccccgtgctccttctggccgctctgcctccggtgctgcctcgctggagatcgagtaccaagttttagatggagcaggattagatattgatttccatcttgcctctccagaaggcaaaaccttagtttttgaacaaagaaaatcagatggagttcacactgtagagactgaagttggtgattacatgttctgctttgacaatacattcagcaccatttctgagaaggtgattttctttgaattaatcctggataatatgggagaacaggcacaagaacaagaagattggaagaaatatattactggcacagatatattggatatgaaactggaagacatcctggaatccatcaacagcatcaagtccagactaagcaaaagtgggcacatacaaattctgcttagagcatttgaagctcgtgatcgaaacatacaagaaagcaactttgatagagtcaatttctggtctatggttaatttagtggtcatggtggtggtgtcagccattcaagtttatatgctgaagagtctgtttgaagataagaggaaaagtagaacttaaaactccaaactagagtacgtaacattgaaaaatgaggcataaaaatgcaataaactgttacagtcaagaccattaatggtcttctccaaaatattttgagatataaaagtaggaaacaggtataattttaatgtgaaaattaagtcttcactttctgtgcaagtaatcctgctgatccagttgtacttaagtgtgtaacaggaatattttgcagaatataggtttaactgaatgaagccatattaataactgcattttcctaactttgaaaaattttgcaaatgtcttaggtgatttaaataaatgagtattgggcctaattgcaacaccagtctgtttttaacaggttctattacccagaacttttttgtaaatgcggcagttacaaattaactgtggaagttttcagttttaagttataaatcacctgagaattacctaatgatggattgaataaatctttagactacaaaagcccaacttttctctatttacatatgcatctctcctataatgtaaatagaataatagctttgaaatacaattaggtttttgagatttttataaccaaatacatttcagtgtaacatattagcagaaagcattagtctttgtactttgcttacattcccaaaagctgacattttcacgattcttaaaaacacaaagttacacttactaaaattaggacatgttttctctttgaaatgaagaatatagtttaaaagcttcctcctccatagggacacattttctctaacccttaactaaagtgtaggattttaaaattaaatgtgaggtaaaataagtttatttttaatagtatctgtcaagttaatatctgtcaacagttaataatcatgttatgttaattttaacatgattgctgacttggataattcattattaccagcagttatgaaggaaatattgctaaaatgatctgggcctaccataaataaatatctccttttctgagctctaagaattatcagaaacaggaaagaatttagaaaaacttgagaaaacctaatccaaaataaaattcacttaagtagaactataaataaatatctagaatctgactggctcatcatgacatcctactcataacataaatcaaaggagatgattaatttccagttagctggaagaaactttggctgtaggtttttattttctacaagaattctggtttgaattatttttgtaagcaggtacattttataaaatgtaagccctactgtaaggtttagcactgggtgtacatatttattaaaaatttttattataacaacttttattaaaatggcctttctgaacactttatttattgatgttgaagtaaggattagaaacatagactcccaagttttaaacacctaaatgtgaataacccatatatacaacaaagtttctgccatctagctttttgaagtctatgggggtcttactcaagtactagtaatttaacttcatcatgaatgaactataatttttaagttatgcccatttataacgttgtttatgactacattgtgagttagaaacaaacttaaaatttggggtatagaacccctcaacaggttagtaatgctggaattcttgatgagcaataatgataaccagagagtgatttcatttacactcatagtagtataaaaagagatacatttccctcttaggcccctgggagaagagcagcttagatttccctactggcaaggtttttaaaaatgaggtaaatgccgtatatgatcaattaccttaattggccaagaaaatgcttcaggtgtctaggggtatcctctgcaacacttgcagaacaaaggtcaataagatccttgcctatgaatacccctcccttttgcgctgttaaatttgcaatgagaagcaaatttacagtaccataactaataaagcagggtacagatataaactactgcatcttttctataaaactgtgattaagaattctacctctcctgtatggctgttactgtactgtactctctgactccttacctaacaatgaatttgttacataatcttctacatgtatgatttgtgccactgatcttaaacctatgattcagtaacttcttaccatataaaaacgataattgctttatttggaaaagaatttaggaatactaaggacaattatttttatagacaaagtaaaaagacagatatttaagaggcataaccaaaaaagcaaaacttgtaaacagagtaaaaatctttaatatttctaaagacatactgtttatctgcttcatatgctttttttaatttcactattccatttctaaattaaagttatgctaaattgagtaagctgtttatcacttaacagctcattttgtctttttcaatatacaaattttaaaaatactacaatatttaactaaggcccaaccgatttccataatgtagcagttaccgtgttcacctcacactaaggcctagagtttgctctgatatgcatttggatgattaatgttatgctgttctttcatgtgaatgtcaagacatggagggtgtttgtaattttatggtaaaattaatccttcttacacataatggtgtcttaaaattgacaaaaaatgagcacttacaattgtatgtctcctcaaatgaaaattctttatctgaaattttaaaagacattgattccgcatgtaaggatttttcatctgaagtacaataatgcacaatcagtgttgctcaaactgctttatacttataaacagccatcttaaataagcaacgtattgtgagtactgatatgtatataataaaaattatcaaagaaaattaactgcca

SEQ ID NO: 379541 - DNA, 3206 bp, Homo sapiens
gagaagattagcatggcccctgcgcaaggatgacacgcaaattcgtgaagcgtccatatttttggataatatgggagaacaggcacaagaacaagaagattggaagaaatatattactggcacagatatattggatatgaaactggaagacatcctggaatccatcaacagcatcaagtccagactaagcaaaagtgggcacatacaaattctgcttagagcatttgaagctcgtgatcgaaacatacaagaaagcaactttgatagagtcaatttctggtctatggttaatttagtggtcatggtggtggtgtcagccattcaagtttatatgctgaagagtctgtttgaagataagaggaaaagtagaacttaaaactccaaactagagtacgtaacattgaaaaatgaggcataaaaatgcaataaactgttacagtcaagaccattaatggtcttctccaaaatattttgagatataaaagtaggaaacaggtataattttaatgtgaaaattaagtcttcactttctgtgcaagtaatcctgctgatccagttgtacttaagtgtgtaacaggaatattttgcagaatataggtttaactgaatgaagccatattaataactgcattttcctaactttgaaaaattttgcaaatgtcttaggtgatttaaataaatgagtattgggcctaattgcaacaccagtctgtttttaacaggttctattacccagaacttttttgtaaatgcggcagttacaaattaactgtggaagttttcagttttaagttataaatcacctgagaattacctaatgatggattgaataaatctttagactacaaaagcccaacttttctctatttacatatgcatctctcctataatgtaaatagaataatagctttgaaatacaattaggtttttgagatttttataaccaaatacatttcagtgtaacatattagcagaaagcattagtctttgtactttgcttacattcccaaaagctgacattttcacgattcttaaaaacacaaagttacacttactaaaattaggacatgttttctctttgaaatgaagaatatagtttaaaagcttcctcctccatagggacacattttctctaacccttaactaaagtgtaggattttaaaattaaatgtgaggtaaaataagtttatttttaatagtatctgtcaagttaatatctgtcaacagttaataatcatgttatgttaattttaacatgattgctgacttggataattcattattaccagcagttatgaaggaaatattgctaaaatgatctgggcctaccataaataaatatctccttttctgagctctaagaattatcagaaacaggaaagaatttagaaaaacttgagaaaacctaatccaaaataaaattcacttaagtagaactataaataaatatctagaatctgactggctcatcatgacatcctactcataacataaatcaaaggagatgattaatttccagttagctggaagaaactttggctgtaggtttttattttctacaagaattctggtttgaattatttttgtaagcaggtacattttataaaatgtaagccctactgtaaggtttagcactgggtgtacatatttattaaaaatttttattataacaacttttattaaaatggcctttctgaacactttatttattgatgttgaagtaaggattagaaacatagactcccaagttttaaacacctaaatgtgaataacccatatatacaacaaagtttctgccatctagctttttgaagtctatgggggtcttactcaagtactagtaatttaacttcatcatgaatgaactataatttttaagttatgcccatttataacgttgtttatgactacattgtgagttagaaacaaacttaaaatttggggtatagaacccctcaacaggttagtaatgctggaattcttgatgagcaataatgataaccagagagtgatttcatttacactcatagtagtataaaaagagatacatttccctcttaggcccctgggagaagagcagcttagatttccctactggcaaggtttttaaaaatgaggtaaatgccgtatatgatcaattaccttaattggccaagaaaatgcttcaggtgtctaggggtatcctctgcaacacttgcagaacaaaggtcaataagatccttgcctatgaatacccctcccttttgcgctgttaaatttgcaatgagaagcaaatttacagtaccataactaataaagcagggtacagatataaactactgcatcttttctataaaactgtgattaagaattctacctctcctgtatggctgttactgtactgtactctctgactccttacctaacaatgaatttgttacataatcttctacatgtatgatttgtgccactgatcttaaacctatgattcagtaacttcttaccatataaaaacgataattgctttatttggaaaagaatttaggaatactaaggacaattatttttatagacaaagtaaaaagacagatatttaagaggcataaccaaaaaagcaaaacttgtaaacagagtaaaaatctttaatatttctaaagacatactgtttatctgcttcatatgctttttttaatttcactattccatttctaaattaaagttatgctaaattgagtaagctgtttatcacttaacagctcattttgtctttttcaatatacaaattttaaaaatactacaatatttaactaaggcccaaccgatttccataatgtagcagttaccgtgttcacctcacactaaggcctagagtttgctctgatatgcatttggatgattaatgttatgctgttctttcatgtgaatgtcaagacatggagggtgtttgtaattttatggtaaaattaatccttcttacacataatggtgtcttaaaattgacaaaaaatgagcacttacaattgtatgtctcctcaaatgaaaattctttatctgaaattttaaaagacattgattccgcatgtaaggatttttcatctgaagtacaataatgcacaatcagtgttgctcaaactgctttatacttataaacagccatcttaaataagcaacgtattgtgagtactgatatgtatataataaaaattatcaaagaaaattaactgcca

SEQ ID NO: 379542 - DNA, 2781 bp, Homo sapiens
gcgcctgtaatctcagctactcgggaggctgaggcagagaattgcttgaacctgggaggcggaggttgcagtgagccgagatcgcgccactgcactccagcctgggcgacagagtgagactcggtctcaaaaaaaaaagaaagaactccctaactcttctgcagtagcaatgaatatatttgatactaaaatgttttcattttcctagtgggccatttactgtcaaatgaatgtccttaacttcaatttacagtagttacccaaaaaaggctatcttcactgactatgcatacctagaaaagcacatcatcctactcaccgaccttaacaacatcatctttcggccctaattaacaatgtgtttgtaggtttgcacacgcacacccatcaaacgaaggacaagtgttcttttataccctatgtatgtgatacaatgggctgtagtcgaaaaagattcctcattttggaaagaagtcataactttatgtagtagtctcctgtctcaagatcgcttgacacagctaatcttacatccgtctgaaagaagcgggggcgggggtgggggacggaagtgacagtttcctctttttttttttttttttttttttaattttatagagacagtggctcgccatattgccaaggctggcctcgaactcctgggctcaagcaatccttccgcctcgacatcccaaagtgctgagataacaggcgtaagccactgcgcccggcctcctatttttcatcaaataaaatacaaccgttcagagcagcatgctcagcaaccacgaggaccagtcccagcgcatccaaggtgccgggagggaaaggaacagaactcccccaggtaagccggtttccccacgccaaggcgcagtcgctcaccacccaaatcgtcgctggggagagacccacccggcgactgcgcgcttcgcactcgagtctgcgttaggaagcctctgaccctttcccgggcccctgcgcgtggaagcctcggacacaactcggagaaccagcgaaccccggcagcacagaattcgaaccgccgcgggagccgttgggacgcgcctacccggtcactgccccgccccggcgcagactgcgtgaggcgccgccggaggcgcggggcttgccggggatcgtggtcggcgagcgcgcccgagcccactagcggagcccgcccgggactacatttcccacaattaccgccatgatgcccattggtgggggaagccatgggaaccggaggccgtcagggggagaggcgggcggcgctcacgcctggcctgagggggccgagactgaggcggttgcggaataggactgctagccccgcccagagtccctaccctttggagaactgcgcttctctttcggagggagtgttcgccgccgccgcggccgccacctggagtttcttcagactccagatttccctgtcaaccacgaggagtccagagaggaaacgcggagcggagacaacagtacctgacgcctctttcagcccgggatcgccccagcagggatgggcgacaagatctggctgcccttccccgtgctccttctggccgctctgcctccggtgctgctgcctggggcggccggcttcacaccttccctcgatagcgacttcacctttacccttcccgccggccagaaggagtgcttctaccagcccatgcccctgaaggcctcgctggagatcgagtaccaagttttagatggagcaggattagatattgatttccatcttgcctctccagaaggcaaaaccttagtttttgaacaaagaaaatcagatggagttcacactgtagagactgaagttggtgattacatgttctgctttgacaatacattcagcaccatttctgagaaggtgattttctttgaattaatcctggataatatgggagaacaggcacaagaacaagaagattggaagaaatatattactggcacagatatattggatatgaaactggaagacatcctggtcagtatggtcttctaataaaataaaaattattaacagccagaggccttactatggtaataagttactgaactaagcattttatctgcattatccaggaaaatctgtttctaatattttatttttgccataaatactttgacctcaagtatcagcttaattttattttatattaatatagcccttttatagttttcaaataacttatcttccaggaccctattataaaaatagcttcagatgtgcaaataagactgcatcttggtaagtttgttttataaatgtgcagttagaatttttaaattataaatagattatgcttctgattatacagcaggcatatgaaaagtaaaatgttttctaatttcacaactattttgtggtattaaaacattgggtgttttactgaatactaaattgttcagataaacatacaaagaaggaaatattataaacacatgcattatgtaataggtaaatacctaaagttatatcaattgggtttttaaaaatgaaatcatttgccaggcatggtagcaggtacctgtaatcccagctactcagaaggttagggggaggatcatttgagcccagttcaaggctgcagtgaaccatggtcacacatataaatagatactacactccaatatagcaagaccccatctctaaaaacttaatcatttgaccaggcacagtctcaggttgcaatgagccgagattgtgcctaggcaaactccatcccccgacaaaaaaaaaaaagtcgacgccggaattagtagtagtag

SEQ ID NO: 379543 - DNA, 405 bp, Homo sapiens
cccacctcagcctcccaagtagctgggaccacacttggtgctaccatacccatctttttgtagaggcagagtctgtctgtgttgtccagcccagtcttgaactcctgggttcaaggggtcctcctgccctagtctcccaaagttccaggattacaaggcatgagtcactgcacccagcctcattttttaattaagttaaaatttctgagcattctttaataataaaattattttatttatctccaggaatccatcaacagcatcaagtccagactaagcaaaagtgggcacatacaaattctgcttagagcatttgaagctcgtgatcgaaacatacaagaaagcaactttgatagagtcaatttctggtctatggttaatttagtggtcatggtggtggtgtca

SEQ ID NO: 379544 - DNA, 352 bp, Homo sapiens
aaagtcagtttatattgatatacttggaattaactgttttctctttgataggtgtataagaagtaaaaatgggccaggcactgcggttcacgcctataatcccagcactttccgaggccgaggtgggtggatcacgaggtcaagaaattgagaccatcctggccaacatggtgaaaccttgtctctactaaaaatacaaaaattagctggtcatggtggcacacgcctgtagtcccagctacttgggaggctgaggcagaattgcttgaaccccggaggcggaggttgcagtgagctgagatggcgccgctgtactccagcctggcgacagagactccatctcaaaaaaaaa

SEQ ID NO: 379545 - DNA, 5094 bp, Homo sapiens
gcgcctgtaatctcagctactcgggaggctgaggcagagaattgcttgaacctgggaggcggaggttgcagtgagccgagatcgcgccactgcactccagcctgggcgacagagtgagactcggtctcaaaaaaaaaagaaagaactccctaactcttctgcagtagcaatgaatatatttgatactaaaatgttttcattttcctagtgggccatttactgtcaaatgaatgtccttaacttcaatttacagtagttacccaaaaaaggctatcttcactgactatgcatacctagaaaagcacatcatcctactcaccgaccttaacaacatcatctttcggccctaattaacaatgtgtttgtaggtttgcacacgcacacccatcaaacgaaggacaagtgttcttttataccctatgtatgtgatacaatgggctgtagtcgaaaaagattcctcattttggaaagaagtcataactttatgtagtagtctcctgtctcaagatcgcttgacacagctaatcttacatccgtctgaaagaagcgggggcgggggtgggggacggaagtgacagtttcctctttttttttttttttttttttttaattttatagagacagtggctcgccatattgccaaggctggcctcgaactcctgggctcaagcaatccttccgcctcgacatcccaaagtgctgagataacaggcgtaagccactgcgcccggcctcctatttttcatcaaataaaatacaaccgttcagagcagcatgctcagcaaccacgaggaccagtcccagcgcatccaaggtgccgggagggaaaggaacagaactcccccaggtaagccggtttccccacgccaaggcgcagtcgctcaccacccaaatcgtcgctggggagagacccacccggcgactgcgcgcttcgcactcgagtctgcgttaggaagcctctgaccctttcccgggcccctgcgcgtggaagcctcggacacaactcggagaaccagcgaaccccggcagcacagaattcgaaccgccgcgggagccgttgggacgcgcctacccggtcactgccccgccccggcgcagactgcgtgaggcgccgccggaggcgcggggcttgccggggatcgtggtcggcgagcgcgcccgagcccactagcggagcccgcccgggactacatttcccacaattaccgccatgatgcccattggtgggggaagccatgggaaccggaggccgtcagggggagaggcgggcggcgctcacgcctggcctgagggggccgagactgaggcggttgcggaataggactgctagccccgcccagagtccctaccctttggagaactgcgcttctctttcggagggagtgttcgccgccgccgcggccgccacctggagtttcttcagactccagatttccctgtcaaccacgaggagtccagagaggaaacgcggagcggagacaacagtacctgacgcctctttcagcccgggatcgccccagcagggatgggcgacaagatctggctgcccttccccgtgctccttctggccgctctgcctccggtgctgctgcctggggcggccggcttcacaccttccctcgatagcgacttcacctttacccttcccgccggccagaaggagtgcttctaccagcccatgcccctgaaggcctcgctggagatcgagtaccaagttttagatggagcaggattagatattgatttccatcttgcctctccagaaggcaaaaccttagtttttgaacaaagaaaatcagatggagttcacactgtagagactgaagttggtgattacatgttctgctttgacaatacattcagcaccatttctgagaaggtgattttctttgaattaatcctggataatatgggagaacaggcacaagaacaagaagattggaagaaatatattactggcacagatatattggatatgaaactggaagacatcctggaccctattataaaaatagcttcagatgtgcaaataagactgcatcttggaatccatcaacagcatcaagtccagactaagcaaaagtgggcacatacaaattctgcttagagcatttgaagctcgtgatcgaaacatacaagaaagcaactttgatagagtcaatttctggtctatggttaatttagtggtcatggtggtggtgtcagccattcaagtttatatgctgaagagtctgtttgaagataagaggaaaagtagaacttaaaactccaaactagagtacgtaacattgaaaaatgaggcataaaaatgcaataaactgttacagtcaagaccattaatggtcttctccaaaatattttgagatataaaagtaggaaacaggtataattttaatgtgaaaattaagtcttcactttctgtgcaagtaatcctgctgatccagttgtacttaagtgtgtaacaggaatattttgcagaatataggtttaactgaatgaagccatattaataactgcattttcctaactttgaaaaattttgcaaatgtcttaggtgatttaaataaatgagtattgggcctaattgcaacaccagtctgtttttaacaggttctattacccagaacttttttgtaaatgcggcagttacaaattaactgtggaagttttcagttttaagttataaatcacctgagaattacctaatgatggattgaataaatctttagactacaaaagcccaacttttctctatttacatatgcatctctcctataatgtaaatagaataatagctttgaaatacaattaggtttttgagatttttataaccaaatacatttcagtgtaacatattagcagaaagcattagtctttgtactttgcttacattcccaaaagctgacattttcacgattcttaaaaacacaaagttacacttactaaaattaggacatgttttctctttgaaatgaagaatatagtttaaaagcttcctcctccatagggacacattttctctaacccttaactaaagtgtaggattttaaaattaaatgtgaggtaaaataagtttatttttaatagtatctgtcaagttaatatctgtcaacagttaataatcatgttatgttaattttaacatgattgctgacttggataattcattattaccagcagttatgaaggaaatattgctaaaatgatctgggcctaccataaataaatatctccttttctgagctctaagaattatcagaaacaggaaagaatttagaaaaacttgagaaaacctaatccaaaataaaattcacttaagtagaactataaataaatatctagaatctgactggctcatcatgacatcctactcataacataaatcaaaggagatgattaatttccagttagctggaagaaactttggctgtaggtttttattttctacaagaattctggtttgaattatttttgtaagcaggtacattttataaaatgtaagccctactgtaaggtttagcactgggtgtacatatttattaaaaatttttattataacaacttttattaaaatggcctttctgaacactttatttattgatgttgaagtaaggattagaaacatagactcccaagttttaaacacctaaatgtgaataacccatatatacaacaaagtttctgccatctagctttttgaagtctatgggggtcttactcaagtactagtaatttaacttcatcatgaatgaactataatttttaagttatgcccatttataacgttgtttatgactacattgtgagttagaaacaaacttaaaatttggggtatagaacccctcaacaggttagtaatgctggaattcttgatgagcaataatgataaccagagagtgatttcatttacactcatagtagtataaaaagagatacatttccctcttaggcccctgggagaagagcagcttagatttccctactggcaaggtttttaaaaatgaggtaaatgccgtatatgatcaattaccttaattggccaagaaaatgcttcaggtgtctaggggtatcctctgcaacacttgcagaacaaaggtcaataagatccttgcctatgaatacccctcccttttgcgctgttaaatttgcaatgagaagcaaatttacagtaccataactaataaagcagggtacagatataaactactgcatcttttctataaaactgtgattaagaattctacctctcctgtatggctgttactgtactgtactctctgactccttacctaacaatgaatttgttacataatcttctacatgtatgatttgtgccactgatcttaaacctatgattcagtaacttcttaccatataaaaacgataattgctttatttggaaaagaatttaggaatactaaggacaattatttttatagacaaagtaaaaagacagatatttaagaggcataaccaaaaaagcaaaacttgtaaacagagtaaaaatctttaatatttctaaagacatactgtttatctgcttcatatgctttttttaatttcactattccatttctaaattaaagttatgctaaattgagtaagctgtttatcacttaacagctcattttgtctttttcaatatacaaattttaaaaatactacaatatttaactaaggcccaaccgatttccataatgtagcagttaccgtgttcacctcacactaaggcctagagtttgctctgatatgcatttggatgattaatgttatgctgttctttcatgtgaatgtcaagacatggagggtgtttgtaattttatggtaaaattaatccttcttacacataatggtgtcttaaaattgacaaaaaatgagcacttacaattgtatgtctcctcaaatgaaaattctttatctgaaattttaaaagacattgattccgcatgtaaggatttttcatctgaagtacaataatgcacaatcagtgttgctcaaactgctttatacttataaacagccatcttaaataagcaacgtattgtgagtactgatatgtatataataaaaattatcaaagaaaattaactgcca

SEQ ID NO: 379546 - DNA, 5116 bp, Homo sapiens
gcgcctgtaatctcagctactcgggaggctgaggcagagaattgcttgaacctgggaggcggaggttgcagtgagccgagatcgcgccactgcactccagcctgggcgacagagtgagactcggtctcaaaaaaaaaagaaagaactccctaactcttctgcagtagcaatgaatatatttgatactaaaatgttttcattttcctagtgggccatttactgtcaaatgaatgtccttaacttcaatttacagtagttacccaaaaaaggctatcttcactgactatgcatacctagaaaagcacatcatcctactcaccgaccttaacaacatcatctttcggccctaattaacaatgtgtttgtaggtttgcacacgcacacccatcaaacgaaggacaagtgttcttttataccctatgtatgtgatacaatgggctgtagtcgaaaaagattcctcattttggaaagaagtcataactttatgtagtagtctcctgtctcaagatcgcttgacacagctaatcttacatccgtctgaaagaagcgggggcgggggtgggggacggaagtgacagtttcctctttttttttttttttttttttttaattttatagagacagtggctcgccatattgccaaggctggcctcgaactcctgggctcaagcaatccttccgcctcgacatcccaaagtgctgagataacaggcgtaagccactgcgcccggcctcctatttttcatcaaataaaatacaaccgttcagagcagcatgctcagcaaccacgaggaccagtcccagcgcatccaaggtgccgggagggaaaggaacagaactcccccaggtaagccggtttccccacgccaaggcgcagtcgctcaccacccaaatcgtcgctggggagagacccacccggcgactgcgcgcttcgcactcgagtctgcgttaggaagcctctgaccctttcccgggcccctgcgcgtggaagcctcggacacaactcggagaaccagcgaaccccggcagcacagaattcgaaccgccgcgggagccgttgggacgcgcctacccggtcactgccccgccccggcgcagactgcgtgaggcgccgccggaggcgcggggcttgccggggatcgtggtcggcgagcgcgcccgagcccactagcggagcccgcccgggactacatttcccacaattaccgccatgatgcccattggtgggggaagccatgggaaccggaggccgtcagggggagaggcgggcggcgctcacgcctggcctgagggggccgagactgaggcggttgcggaataggactgctagccccgcccagagtccctaccctttggagaactgcgcttctctttcggagggagtgttcgccgccgccgcggccgccacctggagtttcttcagactccagatttccctgtcaaccacgaggagtccagagaggaaacgcggagcggagacaacagtacctgacgcctctttcagcccgggatcgccccagcagggatgggcgacaagatctggctgcccttccccgtgctccttctggccgctctgcctccggtgctgctgcctggggcggccggcttcacaccttccctcgatagcgacttcacctttacccttcccgccggccagaaggagtgcttctaccagcccatgcccctgaaggcctcgctggagatcgagtaccaagttttagatggagcaggattagatattgatttccatcttgcctctccagaaggcaaaaccttagtttttgaacaaagaaaatcagatggagttcacacgtgtataagaagtaaaaatgggccaggcactgcggttcacgcctataatcccagcactttccgaggccgagtgtagagactgaagttggtgattacatgttctgctttgacaatacattcagcaccatttctgagaaggtgattttctttgaattaatcctggataatatgggagaacaggcacaagaacaagaagattggaagaaatatattactggcacagatatattggatatgaaactggaagacatcctggaatccatcaacagcatcaagtccagactaagcaaaagtgggcacatacaaattctgcttagagcatttgaagctcgtgatcgaaacatacaagaaagcaactttgatagagtcaatttctggtctatggttaatttagtggtcatggtggtggtgtcagccattcaagtttatatgctgaagagtctgtttgaagataagaggaaaagtagaacttaaaactccaaactagagtacgtaacattgaaaaatgaggcataaaaatgcaataaactgttacagtcaagaccattaatggtcttctccaaaatattttgagatataaaagtaggaaacaggtataattttaatgtgaaaattaagtcttcactttctgtgcaagtaatcctgctgatccagttgtacttaagtgtgtaacaggaatattttgcagaatataggtttaactgaatgaagccatattaataactgcattttcctaactttgaaaaattttgcaaatgtcttaggtgatttaaataaatgagtattgggcctaattgcaacaccagtctgtttttaacaggttctattacccagaacttttttgtaaatgcggcagttacaaattaactgtggaagttttcagttttaagttataaatcacctgagaattacctaatgatggattgaataaatctttagactacaaaagcccaacttttctctatttacatatgcatctctcctataatgtaaatagaataatagctttgaaatacaattaggtttttgagatttttataaccaaatacatttcagtgtaacatattagcagaaagcattagtctttgtactttgcttacattcccaaaagctgacattttcacgattcttaaaaacacaaagttacacttactaaaattaggacatgttttctctttgaaatgaagaatatagtttaaaagcttcctcctccatagggacacattttctctaacccttaactaaagtgtaggattttaaaattaaatgtgaggtaaaataagtttatttttaatagtatctgtcaagttaatatctgtcaacagttaataatcatgttatgttaattttaacatgattgctgacttggataattcattattaccagcagttatgaaggaaatattgctaaaatgatctgggcctaccataaataaatatctccttttctgagctctaagaattatcagaaacaggaaagaatttagaaaaacttgagaaaacctaatccaaaataaaattcacttaagtagaactataaataaatatctagaatctgactggctcatcatgacatcctactcataacataaatcaaaggagatgattaatttccagttagctggaagaaactttggctgtaggtttttattttctacaagaattctggtttgaattatttttgtaagcaggtacattttataaaatgtaagccctactgtaaggtttagcactgggtgtacatatttattaaaaatttttattataacaacttttattaaaatggcctttctgaacactttatttattgatgttgaagtaaggattagaaacatagactcccaagttttaaacacctaaatgtgaataacccatatatacaacaaagtttctgccatctagctttttgaagtctatgggggtcttactcaagtactagtaatttaacttcatcatgaatgaactataatttttaagttatgcccatttataacgttgtttatgactacattgtgagttagaaacaaacttaaaatttggggtatagaacccctcaacaggttagtaatgctggaattcttgatgagcaataatgataaccagagagtgatttcatttacactcatagtagtataaaaagagatacatttccctcttaggcccctgggagaagagcagcttagatttccctactggcaaggtttttaaaaatgaggtaaatgccgtatatgatcaattaccttaattggccaagaaaatgcttcaggtgtctaggggtatcctctgcaacacttgcagaacaaaggtcaataagatccttgcctatgaatacccctcccttttgcgctgttaaatttgcaatgagaagcaaatttacagtaccataactaataaagcagggtacagatataaactactgcatcttttctataaaactgtgattaagaattctacctctcctgtatggctgttactgtactgtactctctgactccttacctaacaatgaatttgttacataatcttctacatgtatgatttgtgccactgatcttaaacctatgattcagtaacttcttaccatataaaaacgataattgctttatttggaaaagaatttaggaatactaaggacaattatttttatagacaaagtaaaaagacagatatttaagaggcataaccaaaaaagcaaaacttgtaaacagagtaaaaatctttaatatttctaaagacatactgtttatctgcttcatatgctttttttaatttcactattccatttctaaattaaagttatgctaaattgagtaagctgtttatcacttaacagctcattttgtctttttcaatatacaaattttaaaaatactacaatatttaactaaggcccaaccgatttccataatgtagcagttaccgtgttcacctcacactaaggcctagagtttgctctgatatgcatttggatgattaatgttatgctgttctttcatgtgaatgtcaagacatggagggtgtttgtaattttatggtaaaattaatccttcttacacataatggtgtcttaaaattgacaaaaaatgagcacttacaattgtatgtctcctcaaatgaaaattctttatctgaaattttaaaagacattgattccgcatgtaaggatttttcatctgaagtacaataatgcacaatcagtgttgctcaaactgctttatacttataaacagccatcttaaataagcaacgtattgtgagtactgatatgtatataataaaaattatcaaagaaaattaactgcca

SEQ ID NO: 379547 - DNA, 5014 bp, Homo sapiens
gcgcctgtaatctcagctactcgggaggctgaggcagagaattgcttgaacctgggaggcggaggttgcagtgagccgagatcgcgccactgcactccagcctgggcgacagagtgagactcggtctcaaaaaaaaaagaaagaactccctaactcttctgcagtagcaatgaatatatttgatactaaaatgttttcattttcctagtgggccatttactgtcaaatgaatgtccttaacttcaatttacagtagttacccaaaaaaggctatcttcactgactatgcatacctagaaaagcacatcatcctactcaccgaccttaacaacatcatctttcggccctaattaacaatgtgtttgtaggtttgcacacgcacacccatcaaacgaaggacaagtgttcttttataccctatgtatgtgatacaatgggctgtagtcgaaaaagattcctcattttggaaagaagtcataactttatgtagtagtctcctgtctcaagatcgcttgacacagctaatcttacatccgtctgaaagaagcgggggcgggggtgggggacggaagtgacagtttcctctttttttttttttttttttttttaattttatagagacagtggctcgccatattgccaaggctggcctcgaactcctgggctcaagcaatccttccgcctcgacatcccaaagtgctgagataacaggcgtaagccactgcgcccggcctcctatttttcatcaaataaaatacaaccgttcagagcagcatgctcagcaaccacgaggaccagtcccagcgcatccaaggtgccgggagggaaaggaacagaactcccccaggtaagccggtttccccacgccaaggcgcagtcgctcaccacccaaatcgtcgctggggagagacccacccggcgactgcgcgcttcgcactcgagtctgcgttaggaagcctctgaccctttcccgggcccctgcgcgtggaagcctcggacacaactcggagaaccagcgaaccccggcagcacagaattcgaaccgccgcgggagccgttgggacgcgcctacccggtcactgccccgccccggcgcagactgcgtgaggcgccgccggaggcgcggggcttgccggggatcgtggtcggcgagcgcgcccgagcccactagcggagcccgcccgggactacatttcccacaattaccgccatgatgcccattggtgggggaagccatgggaaccggaggccgtcagggggagaggcgggcggcgctcacgcctggcctgagggggccgagactgaggcggttgcggaataggactgctagccccgcccagagtccctaccctttggagaactgcgcttctctttcggagggagtgttcgccgccgccgcggccgccacctggagtttcttcagactccagatttccctgtcaaccacgaggagtccagagaggaaacgcggagcggagacaacagtacctgacgcctctttcagcccgggatcgccccttccccgtgctccttctggccgctctgcctccggtgctgctgcctggggcggccggcttcacaccttccctcgatagcgacttcacctttacccttcccgccggccagaaggagtgcttctaccagcccatgcccctgaaggcctcgctggagatcgagtaccaagttttagatggagcaggattagatattgatttccatcttgcctctccagaaggcaaaaccttagtttttgaacaaagaaaatcagatggagttcacactgtagagactgaagttggtgattacatgttctgctttgacaatacattcagcaccatttctgagaaggtgattttctttgaattaatcctggataatatgggagaacaggcacaagaacaagaagattggaagaaatatattactggcacagatatattggatatgaaactggaagacatcctggaatccatcaacagcatcaagtccagactaagcaaaagtgggcacatacaaattctgcttagagcatttgaagctcgtgatcgaaacatacaagaaagcaactttgatagagtcaatttctggtctatggttaatttagtggtcatggtggtggtgtcagccattcaagtttatatgctgaagagtctgtttgaagataagaggaaaagtagaacttaaaactccaaactagagtacgtaacattgaaaaatgaggcataaaaatgcaataaactgttacagtcaagaccattaatggtcttctccaaaatattttgagatataaaagtaggaaacaggtataattttaatgtgaaaattaagtcttcactttctgtgcaagtaatcctgctgatccagttgtacttaagtgtgtaacaggaatattttgcagaatataggtttaactgaatgaagccatattaataactgcattttcctaactttgaaaaattttgcaaatgtcttaggtgatttaaataaatgagtattgggcctaattgcaacaccagtctgtttttaacaggttctattacccagaacttttttgtaaatgcggcagttacaaattaactgtggaagttttcagttttaagttataaatcacctgagaattacctaatgatggattgaataaatctttagactacaaaagcccaacttttctctatttacatatgcatctctcctataatgtaaatagaataatagctttgaaatacaattaggtttttgagatttttataaccaaatacatttcagtgtaacatattagcagaaagcattagtctttgtactttgcttacattcccaaaagctgacattttcacgattcttaaaaacacaaagttacacttactaaaattaggacatgttttctctttgaaatgaagaatatagtttaaaagcttcctcctccatagggacacattttctctaacccttaactaaagtgtaggattttaaaattaaatgtgaggtaaaataagtttatttttaatagtatctgtcaagttaatatctgtcaacagttaataatcatgttatgttaattttaacatgattgctgacttggataattcattattaccagcagttatgaaggaaatattgctaaaatgatctgggcctaccataaataaatatctccttttctgagctctaagaattatcagaaacaggaaagaatttagaaaaacttgagaaaacctaatccaaaataaaattcacttaagtagaactataaataaatatctagaatctgactggctcatcatgacatcctactcataacataaatcaaaggagatgattaatttccagttagctggaagaaactttggctgtaggtttttattttctacaagaattctggtttgaattatttttgtaagcaggtacattttataaaatgtaagccctactgtaaggtttagcactgggtgtacatatttattaaaaatttttattataacaacttttattaaaatggcctttctgaacactttatttattgatgttgaagtaaggattagaaacatagactcccaagttttaaacacctaaatgtgaataacccatatatacaacaaagtttctgccatctagctttttgaagtctatgggggtcttactcaagtactagtaatttaacttcatcatgaatgaactataatttttaagttatgcccatttataacgttgtttatgactacattgtgagttagaaacaaacttaaaatttggggtatagaacccctcaacaggttagtaatgctggaattcttgatgagcaataatgataaccagagagtgatttcatttacactcatagtagtataaaaagagatacatttccctcttaggcccctgggagaagagcagcttagatttccctactggcaaggtttttaaaaatgaggtaaatgccgtatatgatcaattaccttaattggccaagaaaatgcttcaggtgtctaggggtatcctctgcaacacttgcagaacaaaggtcaataagatccttgcctatgaatacccctcccttttgcgctgttaaatttgcaatgagaagcaaatttacagtaccataactaataaagcagggtacagatataaactactgcatcttttctataaaactgtgattaagaattctacctctcctgtatggctgttactgtactgtactctctgactccttacctaacaatgaatttgttacataatcttctacatgtatgatttgtgccactgatcttaaacctatgattcagtaacttcttaccatataaaaacgataattgctttatttggaaaagaatttaggaatactaaggacaattatttttatagacaaagtaaaaagacagatatttaagaggcataaccaaaaaagcaaaacttgtaaacagagtaaaaatctttaatatttctaaagacatactgtttatctgcttcatatgctttttttaatttcactattccatttctaaattaaagttatgctaaattgagtaagctgtttatcacttaacagctcattttgtctttttcaatatacaaattttaaaaatactacaatatttaactaaggcccaaccgatttccataatgtagcagttaccgtgttcacctcacactaaggcctagagtttgctctgatatgcatttggatgattaatgttatgctgttctttcatgtgaatgtcaagacatggagggtgtttgtaattttatggtaaaattaatccttcttacacataatggtgtcttaaaattgacaaaaaatgagcacttacaattgtatgtctcctcaaatgaaaattctttatctgaaattttaaaagacattgattccgcatgtaaggatttttcatctgaagtacaataatgcacaatcagtgttgctcaaactgctttatacttataaacagccatcttaaataagcaacgtattgtgagtactgatatgtatataataaaaattatcaaagaaaattaactgcca

SEQ ID NO: 379548 - DNA, 3307 bp, Homo sapiens
cacgaggccagtaggcactttcttactttttgcagacagtttttcagatggagttcacactgttaacacggacctgtagagactgaagttggtgattacatgttctgctttgacaatacattcagcaccatttctgagaaggtgattttctttgaattaatcctggataatatgggagaacaggcacaagaacaagaagattggaagaaatatattactggcacagatatattggatatgaaactggaagacatcctggaatccatcaacagcatcaagtccagactaagcaaaagtgggcacatacaaattctgcttagagcatttgaagctcgtgatcgaaacatacaagaaagcaactttgatagagtcaatttctggtctatggttaatttagtggtcatggtggtggtgtcagccattcaagtttatatgctgaagagtctgtttgaagataagaggaaaagtagaacttaaaactccaaactagagtacgtaacattgaaaaatgaggcataaaaatgcaataaactgttacagtcaagaccattaatggtcttctccaaaatattttgagatataaaagtaggaaacaggtataattttaatgtgaaaattaagtcttcactttctgtgcaagtaatcctgctgatccagttgtacttaagtgtgtaacaggaatattttgcagaatataggtttaactgaatgaagccatattaataactgcattttcctaactttgaaaaattttgcaaatgtcttaggtgatttaaataaatgagtattgggcctaattgcaacaccagtctgtttttaacaggttctattacccagaacttttttgtaaatgcggcagttacaaattaactgtggaagttttcagttttaagttataaatcacctgagaattacctaatgatggattgaataaatctttagactacaaaagcccaacttttctctatttacatatgcatctctcctataatgtaaatagaataatagctttgaaatacaattaggtttttgagatttttataaccaaatacatttcagtgtaacatattagcagaaagcattagtctttgtactttgcttacattcccaaaagctgacattttcacgattcttaaaaacacaaagttacacttactaaaattaggacatgttttctctttgaaatgaagaatatagtttaaaagcttcctcctccatagggacacattttctctaacccttaactaaagtgtaggattttaaaattaaatgtgaggtaaaataagtttatttttaatagtatctgtcaagttaatatctgtcaacagttaataatcatgttatgttaattttaacatgattgctgacttggataattcattattaccagcagttatgaaggaaatattgctaaaatgatctgggcctaccataaataaatatctccttttctgagctctaagaattatcagaaacaggaaagaatttagaaaaacttgagaaaacctaatccaaaataaaattcacttaagtagaactataaataaatatctagaatctgactggctcatcatgacatcctactcataacataaatcaaaggagatgattaatttccagttagctggaagaaactttggctgtaggtttttattttctacaagaattctggtttgaattatttttgtaagcaggtacattttataaaatgtaagccctactgtaaggtttagcactgggtgtacatatttattaaaaatttttattataacaacttttattaaaatggcctttctgaacactttatttattgatgttgaagtaaggattagaaacatagactcccaagttttaaacacctaaatgtgaataacccatatatacaacaaagtttctgccatctagctttttgaagtctatgggggtcttactcaagtactagtaatttaacttcatcatgaatgaactataatttttaagttatgcccatttataacgttgtttatgactacattgtgagttagaaacaaacttaaaatttggggtatagaacccctcaacaggttagtaatgctggaattcttgatgagcaataatgataaccagagagtgatttcatttacactcatagtagtataaaaagagatacatttccctcttaggcccctgggagaagagcagcttagatttccctactggcaaggtttttaaaaatgaggtaaatgccgtatatgatcaattaccttaattggccaagaaaatgcttcaggtgtctaggggtatcctctgcaacacttgcagaacaaaggtcaataagatccttgcctatgaatacccctcccttttgcgctgttaaatttgcaatgagaagcaaatttacagtaccataactaataaagcagggtacagatataaactactgcatcttttctataaaactgtgattaagaattctacctctcctgtatggctgttactgtactgtactctctgactccttacctaacaatgaatttgttacataatcttctacatgtatgatttgtgccactgatcttaaacctatgattcagtaacttcttaccatataaaaacgataattgctttatttggaaaagaatttaggaatactaaggacaattatttttatagacaaagtaaaaagacagatatttaagaggcataaccaaaaaagcaaaacttgtaaacagagtaaaaatctttaatatttctaaagacatactgtttatctgcttcatatgctttttttaatttcactattccatttctaaattaaagttatgctaaattgagtaagctgtttatcacttaacagctcattttgtctttttcaatatacaaattttaaaaatactacaatatttaactaaggcccaaccgatttccataatgtagcagttaccgtgttcacctcacactaaggcctagagtttgctctgatatgcatttggatgattaatgttatgctgttctttcatgtgaatgtcaagacatggagggtgtttgtaattttatggtaaaattaatccttcttacacataatggtgtcttaaaattgacaaaaaatgagcacttacaattgtatgtctcctcaaatgaaaattctttatctgaaattttaaaagacattgattccgcatgtaaggatttttcatctgaagtacaataatgcacaatcagtgttgctcaaactgctttatacttataaacagccatcttaaataagcaacgtattgtgagtactgatatgtatataataaaaattatcaaagaaaattaactgcca

SEQ ID NO: 379549 - DNA, 333 bp, Homo sapiens
actaattctataacagtgtccagaaatctctccttcgtaattgtagtcatttaaaacatacctgtactgtattacaccacaaacttttcatattctctagaaatttacaacatagagagttcactgtttagccttgcttttctaggtaactgcatactcagaaatactgatatattttagaatcatgtaactttcgatttgaaagaggtcattgcagatctcactgacaagtggttttaaagtcatggtgtgtggaattcttggcactttagaaggagcatgggtgggaagaggagagtgggaaaccagactgtctccctttttcatctccaa

SEQ ID NO: 379550 - DNA, 392 bp, Homo sapiens
accttctatgtgtttccaaaagcaaaagaaatgaatacatttctggtgttggtgttgtttgaggatgtggctaaggacttcacttgggaggagtgaccagatctggatgatgcttagcagaccctgtacagagacatgatgctggagacctacagcagcttggtatccttgggacactgcattaccaaacctgagattatcttctggagcaaggatcagagccatggacaaaagggcccaaaacacagcctcccagccatgtgaaggtgcctgctaccactttgccttgtgccataagtcagagttccctgagacctccccagaatcagatggtgccatgcttcctgtacagcccagacaatcgtgagccagttaaacctattttctttata

SEQ ID NO: 379551 - DNA, 889 bp, Homo sapiens
ggcacgaggattaccccagatccagaaagatggctgccaatgcgagaacgttcttactaccggggaagaaagaagggtaaaaagaaggatcagattggaaaagggacccagggagcaactgcaggagcttcatctgaagtggatgccagtaaaactgtgagcagcccacccacctccccaagacctggcagtgctgcaacagtatctgcctctacaagtaacatcatacccccaagacaccagaaacctgcaggggctccagcaacaaaaaagaaacagcaacagaaaaagaagaaaggtggaaaaggtggctggtgatgagaatattcttgttgcaggggctccagcaacaaaaaagaaacagcaacagaaaaagaagaaaggtggaaaaggtggctggtgatgagaatattcttgttgcaggctgtttttaaactagtgtcagtgacactaggaatataataaaggtaacacagcaagaaacacagaactgctccctcttcatctccgtattttcataatttcttgtgtttcaaatggggaaacatcttcctcaaaggctgcctagtgagatatggcctactggttgcctcataactttgtacagattatgaggactgaaaataattgggcatttacccatcttggtatctgttgtatcctttatctgtgtgtgctgattcgatcttttttcagtttcacataccttatctaaggtttcccaggatttaaacagaaactatttctacgatttcagctagagtcagaagatacttgtttctgttcaagtctcactttaaattatgtcttaggaggccttaggcaactgaaagtggaatcttctgagcattcctaaatatctgcttagaaatatcatgtgataaagagg

SEQ ID NO: 379552 - DNA, 361 bp, Homo sapiens
tggaagaaagacttgaagaagttattgaatatatcagagagaaacagattgaaaacacacaaaaaaaatggtttaaaactgtaaaggacaaaaagagaatgtcagacatatgtgtaatcaaagctccaaaaaaaaaagaagttctaagtcctcagattcaaaaagctggtcctaaccaagatatataagaagaaaactccactgctagacatatatcattgctaaactagaaaacaagacacaaaaatattaattataatggaaagggacttcaacagcaatataggaagccagaagacaacaaaatgacatctccaatatgaggttagaataaggacatcttcagataaacaaaactaag

SEQ ID NO: 379553 - DNA, 5147 bp, Homo sapiens
tgcctgtttcctgtcgccgtcgttgcccgggccatggcgacctgcatttggctgcggagctgtggggcccggcgcctcgggtcgacgtttccaggctgccgcctccgcccccgcgccggcggcctggtccctgcctccgggcctgcgcccggcccggcccagctccgctgctacgctgggcgcctggcgggcctctctgcggcgctgctgcgcaccgacagcttcgtgggcggccgctggctcccggccgccgccaccttccccgtgcaagacccggccagcggcgccgctctgggcatggtagccgactgcggggtgcgagaggcccgcgccgccgtgcgcgctgcctacgaggctttctgccgctggagggaggtctccgccaaggagaggagttcattacttcggaagtggtacaatttaatgatacaaaataaggatgaccttgccagaataatcacagctgaaagtggaaagccactgaaggaggcacatggagaaattctctattccgcctttttcctagagtggttctctgaggaagcccgccgtgtttacggagacattatccacaccccggcaaaggacaggcgggccctggtcctcaagcagcccataggcgtggctgcagtcatcaccccgtggaatttccccagtgccatgatcacccggaaggtgggggccgccctggcagccggctgtactgtcgtggtgaagcctgccgaagacacgcccttctccgccctggccctggctgagcttgcaagccaggctgggattccttcaggtgtatacaatgttattccctgttctcgaaagaatgccaaggaagtaggggaggcaatttgtactgatcctctggtgtccaaaatttcctttactggttcaacaactacaggaaagatcctgttgcaccacgcagcaaactctgtgaaaagggtctctatggagctgggcggccttgctccatttatagtatttgacagtgccaacgtggaccaggctgtagcaggggccatggcatctaaatttaggaacactggacagacttgtgtttgctcaaaccaattcttggtgcaaaggggcatccatgatgcctttgtaaaagcattcgccgaggccatgaagaagaacctgcgcgtaggtaatggatttgaggaaggaactactcagggcccattaattaatgaaaaagcggtagaaaaggtggagaaacaggtgaatgatgccgtttctaaaggtgccaccgttgtgacaggtggaaaacgacaccaacttggaaaaaatttctttgagcctaccctgctgtgcaatgtcacccaggacatgctgtgcactcatgaagagactttcgggcctctggcaccagttatcaagttcgatacagaggaggaggctatagcaatcgctaacgcagctgatgttgggttagcaggttatttttactctcaagacccagcccagatctggagagtggcagagcagctggaagtgggcatggttggcgtcaacgaaggattaatttcctctgtggagtgcccttttggtggagtgaagcagtccggccttgggcgagaggggtccaagtatggcattgatgagtatctggaactcaagtatgtgtgttacgggggcttgtaggattctttggttctttaaaaaaatttaaaaggagacttatctacatatataggtacatgccatccattattttaaataaactaataggttttcagaattatgaatttttcagaactcatccagtccttgtaatcttaaacagatgcaaatcctacccctgcccttaatgtaactagggaccaatatgtgccacgtgcctgtggctgcagactcccagagaaccagcactgggtttacagaatgaggccctggctccccaccacagccccagctgcctcagagcaggcacagcacaaggcaggcccagccccatgggccgtcacaaaggcttgatcactgcctgggcagtggcacaaccatcccccatgtcgctacagaacatgggcccagagcaccttgaaggagacccttgactgtgactggcaggcaggtgaggggcacagcacccctccccggcatctgccagctcagcacagaagacaccgaatgtgcatctggaggtgttgcggcagaggtttgagtgaaccctctttcaaagacaataaatagcacagaattgtccgtgcttctgtgaggcacgaaggagcacctctccctattcctgaaccatattttaattgatgcctttattgtcccaaatttaccacttaaagaattctattttcatttctgtcctgtttgccacttcatttcatttccttgagtaaatgagctgaagtgtaaagcaaagaatagcagaagcagcttggtaggatggaaggcacgcagtggcatggcctggctccttccctgagtggccttgttgccttgggcgtgtgttcagcacctcccatcccatggatacagtggagattccatacaggccttacttagctccttgcgatactgtgagccagagagaaagtaaaagcacttcacaaaaaaatgaaaattctaaggacatacaagagccattgttacgagcagcaccgcccagcccttccttgcctactgtcagtggctttgccaagatgggaggaggccagtgcccacttgcccaccgacctgagcctgagtaagtggctgtcacctgagcctgttctttctgtcctggtgtggtgctgctccctcacctccaaaagagcaaaagtactttcaccacagtcaacccaaaagggaaagaatttctgtaattgccaacccactttgtagaagaggcatgagcccttgaatttcaggcaccttttatctaatgagagtttttacagctcatcattcaaataacgcacaaaaaacaaaagccgctatgaccggcgttgcctctcactttgaaagaaagactccgtaatcttaaacagatgcaaatccaattaggcggccaagtaggtggagacgaagcaccttcctttccccatctctgtctgtgtagactccacttacatcttgtggttattctgggttgtggaaggaaaatgtgaatgaaagtagtgctggatgcaattactcctgaaccccacctaggatttaacatccctcattgagccactgggaagctatggttgagtaactaaaggtctggcaagaccctgggcacacagggagctgcctagcatctggcctggagtgtactagccacattcccaaggtcccaaggagaaggaagagctgaaattcatctcctagtgacagtgccccggccctgtcaagaatcacatactcagcattttgacagttaatgtcttctctttatttgtgtagtttttaggtggttttatataacattttaattacttgtgatttagatgtatccatcctttttctattaagaatacaaatgctgggctgggcacagtggctcacgcctgtaatcccaacaccttgggaggccaaggcaggcagatcacgacatcaggagatcgagaccatcctggctaacacggtgaaaccccgtctctactaaaaatacaaaaaaaattagtcggatgtggtggcaggtgcctgtagtcccagctactctggaggctgaggcaggagaatggcgtgaacccaggaggcggagcttgcagtgagcagagatcacgccactgcactccagcctggatgacagagcgagactccgcctcaaaaaaagaatacaaatgctccaacattattttttataactctggattaccgatgctgagatgtgtgcaggaatacttccaaataaatttttaacattgtaagccagtagattctttggctgggtggcaaattttgagtcttcttgcatatttggctcatgggttcataaattgaggccagagactcattgtatatccttgatcaattttctaattaaaggaaatagcttattgtttagtaaaatggcccttggttgtgggaagaaagagaattatttttaactgaacgtttttgttgttttttaaataaagtagccatatgtaacgggattttaaaaatatatacattttacaacatggactagaaaaggaccattagatcaggggttggcaaactatggcccacgaatcaaacctggcctgccacctgtttttatacaacctgtgagctaagaatggtttatatgttttcaaatgattgggcagaaaatcaaaagaagaacaatatttcatgacacctgaaaattctatgaaattcagatttcagtgtccataaacaaaatgttattagagcatagccacacccattcatttatggtattgtctgggactgctttcttggcagagttgaatagttgggacagggacagtatagcctgcaaagcctaaaagatttactacttgtctccttaaagaaaaagtttgccagctcctgatctagaccaagagggagatattgaccttacttgcatttatccggcattatttcaacacctcctgtgaagaaagtacttttctggcatagctaccgtgagttctcagcaggaacttcccagcgatgataatgtacatgaaattagccacgtaacaagagtctatttgccttgaaaaaacaattatccttgaacttcctccagctatgcagggattctcattaaagagctgatctgcatctgtttatccattttagtagcttttaaatatgattttatgtgaagtgccatttctttattctactaaagagagacagcagaaataaagatcagaagcaaatgtgagcaaatctgttttactgttaacttcaattatgaacttgaaattgtgccacatgactttttcctctaaaaactggatcctagtgttttaattacctgtgtgcagctattttaaatagcattttacttgaataatatgtatgttgtcattgtttcatgctatactttgtgggataaaacttgggaatgagtgtggtaagaaatttataaagttttgcttttaaaacgtggacataactcatttttctagtttttgacaattgtgtgttttagtgtctagtctgcagagagctgtgtgattaataaacgtggaattaacagaatttcctctccctgtaaaaaaaaaaat

SEQ ID NO: 379554 - DNA, 4977 bp, Homo sapiens
tgcctgtttcctgtcgccgtcgttgcccgggccatggcgacctgcatttggctgcggagctgtggggcccggcgcctcgggtcgacgtttccaggctgccgcctccgcccccgcgccggcggcctggtccctgcctccgggcctgcgcccggcccggcccagctccgctgctacgctgggcgcctggcgggcctctctgcggcgctgctgcgcaccgacagcttcgtgggcggccgctggctcccggccgccgccaccttccccgtgcaagacccggccagcggcgccgctctgggcatggtagccgactgcggggtgcgagaggcccgcgccgccgtgcgcgctgcctacgaggctttctgccgctggagggaggtctccgccaaggagaggagttcattacttcggaagtggtacaatttaatgatacaaaataaggatgaccttgccagaataatcacagctgaaagtggaaagccactgaaggaggcacatggagaaattctctattccgcctttttcctagagtggttctctgaggaagcccgccgtgtttacggagacattatccacaccccggcaaaggacaggcgggccctggtcctcaagcagcccataggcgtggctgcagtcatcaccccgtggaatttccccagtgccatgatcacccggaaggtgggggccgccctggcagccggctgtactgtcgtggtgaagcctgccgaagacacgcccttctccgccctggccctggctgagcttgcaagccaggctgggattccttcaggtgtatacaatgttattccctgttctcgaaagaatgccaaggaagtaggggaggcaatttgtactgatcctctggtgtccaaaatttcctttactggttcaacaactacaggaaagatcctgttgcaccacgcagcaaactctgtgaaaagggtctctatggagctgggcggccttgctccatttatagtatttgacagtgccaacgtggaccaggctgtagcaggggccatggcatctaaatttaggaacactggacagacttgtgtttgctcaaaccaattcttggtgcaaaggggcatccatgatgcctttgtaaaagcattcgccgaggccatgaagaagaacctgcgcgtaggtaatggatttgaggaaggaactactcagggcccattaattaatgaaaaagcggtagaaaaggttcgatacagaggaggaggctatagcaatcgctaacgcagctgatgttgggttagcaggttatttttactctcaagacccagcccagatctggagagtggcagagcagctggaagtgggcatggttggcgtcaacgaaggattaatttcctctgtggagtgcccttttggtggagtgaagcagtccggccttgggcgagaggggtccaagtatggcattgatgagtatctggaactcaagtatgtgtgttacgggggcttgtaggattctttggttctttaaaaaaatttaaaaggagacttatctacatatataggtacatgccatccattattttaaataaactaataggttttcagaattatgaatttttcagaactcatccagtccttgtaatcttaaacagatgcaaatcctacccctgcccttaatgtaactagggaccaatatgtgccacgtgcctgtggctgcagactcccagagaaccagcactgggtttacagaatgaggccctggctccccaccacagccccagctgcctcagagcaggcacagcacaaggcaggcccagccccatgggccgtcacaaaggcttgatcactgcctgggcagtggcacaaccatcccccatgtcgctacagaacatgggcccagagcaccttgaaggagacccttgactgtgactggcaggcaggtgaggggcacagcacccctccccggcatctgccagctcagcacagaagacaccgaatgtgcatctggaggtgttgcggcagaggtttgagtgaaccctctttcaaagacaataaatagcacagaattgtccgtgcttctgtgaggcacgaaggagcacctctccctattcctgaaccatattttaattgatgcctttattgtcccaaatttaccacttaaagaattctattttcatttctgtcctgtttgccacttcatttcatttccttgagtaaatgagctgaagtgtaaagcaaagaatagcagaagcagcttggtaggatggaaggcacgcagtggcatggcctggctccttccctgagtggccttgttgccttgggcgtgtgttcagcacctcccatcccatggatacagtggagattccatacaggccttacttagctccttgcgatactgtgagccagagagaaagtaaaagcacttcacaaaaaaatgaaaattctaaggacatacaagagccattgttacgagcagcaccgcccagcccttccttgcctactgtcagtggctttgccaagatgggaggaggccagtgcccacttgcccaccgacctgagcctgagtaagtggctgtcacctgagcctgttctttctgtcctggtgtggtgctgctccctcacctccaaaagagcaaaagtactttcaccacagtcaacccaaaagggaaagaatttctgtaattgccaacccactttgtagaagaggcatgagcccttgaatttcaggcaccttttatctaatgagagtttttacagctcatcattcaaataacgcacaaaaaacaaaagccgctatgaccggcgttgcctctcactttgaaagaaagactccgtaatcttaaacagatgcaaatccaattaggcggccaagtaggtggagacgaagcaccttcctttccccatctctgtctgtgtagactccacttacatcttgtggttattctgggttgtggaaggaaaatgtgaatgaaagtagtgctggatgcaattactcctgaaccccacctaggatttaacatccctcattgagccactgggaagctatggttgagtaactaaaggtctggcaagaccctgggcacacagggagctgcctagcatctggcctggagtgtactagccacattcccaaggtcccaaggagaaggaagagctgaaattcatctcctagtgacagtgccccggccctgtcaagaatcacatactcagcattttgacagttaatgtcttctctttatttgtgtagtttttaggtggttttatataacattttaattacttgtgatttagatgtatccatcctttttctattaagaatacaaatgctgggctgggcacagtggctcacgcctgtaatcccaacaccttgggaggccaaggcaggcagatcacgacatcaggagatcgagaccatcctggctaacacggtgaaaccccgtctctactaaaaatacaaaaaaaattagtcggatgtggtggcaggtgcctgtagtcccagctactctggaggctgaggcaggagaatggcgtgaacccaggaggcggagcttgcagtgagcagagatcacgccactgcactccagcctggatgacagagcgagactccgcctcaaaaaaagaatacaaatgctccaacattattttttataactctggattaccgatgctgagatgtgtgcaggaatacttccaaataaatttttaacattgtaagccagtagattctttggctgggtggcaaattttgagtcttcttgcatatttggctcatgggttcataaattgaggccagagactcattgtatatccttgatcaattttctaattaaaggaaatagcttattgtttagtaaaatggcccttggttgtgggaagaaagagaattatttttaactgaacgtttttgttgttttttaaataaagtagccatatgtaacgggattttaaaaatatatacattttacaacatggactagaaaaggaccattagatcaggggttggcaaactatggcccacgaatcaaacctggcctgccacctgtttttatacaacctgtgagctaagaatggtttatatgttttcaaatgattgggcagaaaatcaaaagaagaacaatatttcatgacacctgaaaattctatgaaattcagatttcagtgtccataaacaaaatgttattagagcatagccacacccattcatttatggtattgtctgggactgctttcttggcagagttgaatagttgggacagggacagtatagcctgcaaagcctaaaagatttactacttgtctccttaaagaaaaagtttgccagctcctgatctagaccaagagggagatattgaccttacttgcatttatccggcattatttcaacacctcctgtgaagaaagtacttttctggcatagctaccgtgagttctcagcaggaacttcccagcgatgataatgtacatgaaattagccacgtaacaagagtctatttgccttgaaaaaacaattatccttgaacttcctccagctatgcagggattctcattaaagagctgatctgcatctgtttatccattttagtagcttttaaatatgattttatgtgaagtgccatttctttattctactaaagagagacagcagaaataaagatcagaagcaaatgtgagcaaatctgttttactgttaacttcaattatgaacttgaaattgtgccacatgactttttcctctaaaaactggatcctagtgttttaattacctgtgtgcagctattttaaatagcattttacttgaataatatgtatgttgtcattgtttcatgctatactttgtgggataaaacttgggaatgagtgtggtaagaaatttataaagttttgcttttaaaacgtggacataactcatttttctagtttttgacaattgtgtgttttagtgtctagtctgcagagagctgtgtgattaataaacgtggaattaacagaatttcctctccctgtaaaaaaaaaaat

SEQ ID NO: 379555 - DNA, 4142 bp, Homo sapiens
cttctgacagactgtgtgggtttgtttttgtctcctgtccagacttgtgtttgctcaaaccaattcttggtgcaaaggggcatccatgatgcctttgtaaaagcattcgccgaggccatgaagaagaacctgcgcgtaggtaatggatttgaggaaggaactactcagggcccattaattaatgaaaaagcggtagaaaaggtggagaaacaggtgaatgatgccgtttctaaaggtgccaccgttgtgacaggtggaaaacgacaccaacttggaaaaaatttctttgagcctaccctgctgtgcaatgtcacccaggacatgctgtgcactcatgaagagactttcgggcctctggcaccagttatcaagttcgatacagaggaggaggctatagcaatcgctaacgcagctgatgttgggttagcaggttatttttactctcaagacccagcccagatctggagagtggcagagcagctggaagtgggcatggttggcgtcaacgaaggattaatttcctctgtggagtgcccttttggtggagtgaagcagtccggccttgggcgagaggggtccaagtatggcattgatgagtatctggaactcaagtatgtgtgttacgggggcttgtaggattctttggttctttaaaaaaatttaaaaggagacttatctacatatataggtacatgccatccattattttaaataaactaataggttttcagaattatgaatttttcagaactcatccagtccttgtaatcttaaacagatgcaaatcctacccctgcccttaatgtaactagggaccaatatgtgccacgtgcctgtggctgcagactcccagagaaccagcactgggtttacagaatgaggccctggctccccaccacagccccagctgcctcagagcaggcacagcacaaggcaggcccagccccatgggccgtcacaaaggcttgatcactgcctgggcagtggcacaaccatcccccatgtcgctacagaacatgggcccagagcaccttgaaggagacccttgactgtgactggcaggcaggtgaggggcacagcacccctccccggcatctgccagctcagcacagaagacaccgaatgtgcatctggaggtgttgcggcagaggtttgagtgaaccctctttcaaagacaataaatagcacagaattgtccgtgcttctgtgaggcacgaaggagcacctctccctattcctgaaccatattttaattgatgcctttattgtcccaaatttaccacttaaagaattctattttcatttctgtcctgtttgccacttcatttcatttccttgagtaaatgagctgaagtgtaaagcaaagaatagcagaagcagcttggtaggatggaaggcacgcagtggcatggcctggctccttccctgagtggccttgttgccttgggcgtgtgttcagcacctcccatcccatggatacagtggagattccatacaggccttacttagctccttgcgatactgtgagccagagagaaagtaaaagcacttcacaaaaaaatgaaaattctaaggacatacaagagccattgttacgagcagcaccgcccagcccttccttgcctactgtcagtggctttgccaagatgggaggaggccagtgcccacttgcccaccgacctgagcctgagtaagtggctgtcacctgagcctgttctttctgtcctggtgtggtgctgctccctcacctccaaaagagcaaaagtactttcaccacagtcaacccaaaagggaaagaatttctgtaattgccaacccactttgtagaagaggcatgagcccttgaatttcaggcaccttttatctaatgagagtttttacagctcatcattcaaataacgcacaaaaaacaaaagccgctatgaccggcgttgcctctcactttgaaagaaagactccgtaatcttaaacagatgcaaatccaattaggcggccaagtaggtggagacgaagcaccttcctttccccatctctgtctgtgtagactccacttacatcttgtggttattctgggttgtggaaggaaaatgtgaatgaaagtagtgctggatgcaattactcctgaaccccacctaggatttaacatccctcattgagccactgggaagctatggttgagtaactaaaggtctggcaagaccctgggcacacagggagctgcctagcatctggcctggagtgtactagccacattcccaaggtcccaaggagaaggaagagctgaaattcatctcctagtgacagtgccccggccctgtcaagaatcacatactcagcattttgacagttaatgtcttctctttatttgtgtagtttttaggtggttttatataacattttaattacttgtgatttagatgtatccatcctttttctattaagaatacaaatgctgggctgggcacagtggctcacgcctgtaatcccaacaccttgggaggccaaggcaggcagatcacgacatcaggagatcgagaccatcctggctaacacggtgaaaccccgtctctactaaaaatacaaaaaaaattagtcggatgtggtggcaggtgcctgtagtcccagctactctggaggctgaggcaggagaatggcgtgaacccaggaggcggagcttgcagtgagcagagatcacgccactgcactccagcctggatgacagagcgagactccgcctcaaaaaaagaatacaaatgctccaacattattttttataactctggattaccgatgctgagatgtgtgcaggaatacttccaaataaatttttaacattgtaagccagtagattctttggctgggtggcaaattttgagtcttcttgcatatttggctcatgggttcataaattgaggccagagactcattgtatatccttgatcaattttctaattaaaggaaatagcttattgtttagtaaaatggcccttggttgtgggaagaaagagaattatttttaactgaacgtttttgttgttttttaaataaagtagccatatgtaacgggattttaaaaatatatacattttacaacatggactagaaaaggaccattagatcaggggttggcaaactatggcccacgaatcaaacctggcctgccacctgtttttatacaacctgtgagctaagaatggtttatatgttttcaaatgattgggcagaaaatcaaaagaagaacaatatttcatgacacctgaaaattctatgaaattcagatttcagtgtccataaacaaaatgttattagagcatagccacacccattcatttatggtattgtctgggactgctttcttggcagagttgaatagttgggacagggacagtatagcctgcaaagcctaaaagatttactacttgtctccttaaagaaaaagtttgccagctcctgatctagaccaagagggagatattgaccttacttgcatttatccggcattatttcaacacctcctgtgaagaaagtacttttctggcatagctaccgtgagttctcagcaggaacttcccagcgatgataatgtacatgaaattagccacgtaacaagagtctatttgccttgaaaaaacaattatccttgaacttcctccagctatgcagggattctcattaaagagctgatctgcatctgtttatccattttagtagcttttaaatatgattttatgtgaagtgccatttctttattctactaaagagagacagcagaaataaagatcagaagcaaatgtgagcaaatctgttttactgttaacttcaattatgaacttgaaattgtgccacatgactttttcctctaaaaactggatcctagtgttttaattacctgtgtgcagctattttaaatagcattttacttgaataatatgtatgttgtcattgtttcatgctatactttgtgggataaaacttgggaatgagtgtggtaagaaatttataaagttttgcttttaaaacgtggacataactcatttttctagtttttgacaattgtgtgttttagtgtctagtctgcagagagctgtgtgattaataaacgtggaattaacagaatttcctctccctgtaaaaaaaaaaat

SEQ ID NO: 379556 - DNA, 3880 bp, Homo sapiens
actctgatttactccttgtgattatttgggaaacaaatcagaagaaaacaaaactggtttcctttcctctcccccttacattttttatgacctatcttaactttggcaggttcgatacagaggaggaggctatagcaatcgctaacgcagctgatgttgggttagcaggttatttttactctcaagacccagcccagatctggagagtggcagagcagctggaagtgggcatggttggcgtcaacgaaggattaatttcctctgtggagtgcccttttggtggagtgaagcagtccggccttgggcgagaggggtccaagtatggcattgatgagtatctggaactcaagtatgtgtgttacgggggcttgtaggattctttggttctttaaaaaaatttaaaaggagacttatctacatatataggtacatgccatccattattttaaataaactaataggttttcagaattatgaatttttcagaactcatccagtccttgtaatcttaaacagatgcaaatcctacccctgcccttaatgtaactagggaccaatatgtgccacgtgcctgtggctgcagactcccagagaaccagcactgggtttacagaatgaggccctggctccccaccacagccccagctgcctcagagcaggcacagcacaaggcaggcccagccccatgggccgtcacaaaggcttgatcactgcctgggcagtggcacaaccatcccccatgtcgctacagaacatgggcccagagcaccttgaaggagacccttgactgtgactggcaggcaggtgaggggcacagcacccctccccggcatctgccagctcagcacagaagacaccgaatgtgcatctggaggtgttgcggcagaggtttgagtgaaccctctttcaaagacaataaatagcacagaattgtccgtgcttctgtgaggcacgaaggagcacctctccctattcctgaaccatattttaattgatgcctttattgtcccaaatttaccacttaaagaattctattttcatttctgtcctgtttgccacttcatttcatttccttgagtaaatgagctgaagtgtaaagcaaagaatagcagaagcagcttggtaggatggaaggcacgcagtggcatggcctggctccttccctgagtggccttgttgccttgggcgtgtgttcagcacctcccatcccatggatacagtggagattccatacaggccttacttagctccttgcgatactgtgagccagagagaaagtaaaagcacttcacaaaaaaatgaaaattctaaggacatacaagagccattgttacgagcagcaccgcccagcccttccttgcctactgtcagtggctttgccaagatgggaggaggccagtgcccacttgcccaccgacctgagcctgagtaagtggctgtcacctgagcctgttctttctgtcctggtgtggtgctgctccctcacctccaaaagagcaaaagtactttcaccacagtcaacccaaaagggaaagaatttctgtaattgccaacccactttgtagaagaggcatgagcccttgaatttcaggcaccttttatctaatgagagtttttacagctcatcattcaaataacgcacaaaaaacaaaagccgctatgaccggcgttgcctctcactttgaaagaaagactccgtaatcttaaacagatgcaaatccaattaggcggccaagtaggtggagacgaagcaccttcctttccccatctctgtctgtgtagactccacttacatcttgtggttattctgggttgtggaaggaaaatgtgaatgaaagtagtgctggatgcaattactcctgaaccccacctaggatttaacatccctcattgagccactgggaagctatggttgagtaactaaaggtctggcaagaccctgggcacacagggagctgcctagcatctggcctggagtgtactagccacattcccaaggtcccaaggagaaggaagagctgaaattcatctcctagtgacagtgccccggccctgtcaagaatcacatactcagcattttgacagttaatgtcttctctttatttgtgtagtttttaggtggttttatataacattttaattacttgtgatttagatgtatccatcctttttctattaagaatacaaatgctgggctgggcacagtggctcacgcctgtaatcccaacaccttgggaggccaaggcaggcagatcacgacatcaggagatcgagaccatcctggctaacacggtgaaaccccgtctctactaaaaatacaaaaaaaattagtcggatgtggtggcaggtgcctgtagtcccagctactctggaggctgaggcaggagaatggcgtgaacccaggaggcggagcttgcagtgagcagagatcacgccactgcactccagcctggatgacagagcgagactccgcctcaaaaaaagaatacaaatgctccaacattattttttataactctggattaccgatgctgagatgtgtgcaggaatacttccaaataaatttttaacattgtaagccagtagattctttggctgggtggcaaattttgagtcttcttgcatatttggctcatgggttcataaattgaggccagagactcattgtatatccttgatcaattttctaattaaaggaaatagcttattgtttagtaaaatggcccttggttgtgggaagaaagagaattatttttaactgaacgtttttgttgttttttaaataaagtagccatatgtaacgggattttaaaaatatatacattttacaacatggactagaaaaggaccattagatcaggggttggcaaactatggcccacgaatcaaacctggcctgccacctgtttttatacaacctgtgagctaagaatggtttatatgttttcaaatgattgggcagaaaatcaaaagaagaacaatatttcatgacacctgaaaattctatgaaattcagatttcagtgtccataaacaaaatgttattagagcatagccacacccattcatttatggtattgtctgggactgctttcttggcagagttgaatagttgggacagggacagtatagcctgcaaagcctaaaagatttactacttgtctccttaaagaaaaagtttgccagctcctgatctagaccaagagggagatattgaccttacttgcatttatccggcattatttcaacacctcctgtgaagaaagtacttttctggcatagctaccgtgagttctcagcaggaacttcccagcgatgataatgtacatgaaattagccacgtaacaagagtctatttgccttgaaaaaacaattatccttgaacttcctccagctatgcagggattctcattaaagagctgatctgcatctgtttatccattttagtagcttttaaatatgattttatgtgaagtgccatttctttattctactaaagagagacagcagaaataaagatcagaagcaaatgtgagcaaatctgttttactgttaacttcaattatgaacttgaaattgtgccacatgactttttcctctaaaaactggatcctagtgttttaattacctgtgtgcagctattttaaatagcattttacttgaataatatgtatgttgtcattgtttcatgctatactttgtgggataaaacttgggaatgagtgtggtaagaaatttataaagttttgcttttaaaacgtggacataactcatttttctagtttttgacaattgtgtgttttagtgtctagtctgcagagagctgtgtgattaataaacgtggaattaacagaatttcctctccctgtaaaaaaaaaaat

SEQ ID NO: 379557 - DNA, 1601 bp, Homo sapiens
  misc_feature (20)..(20): n is a, c, g, or t
aacggcagtactccacgggntatgtagcgaggctgggtggcgacaaaattagtcggatgtggtggcaggtgcctgtagtcccagctactctggaggctgaggcaggagaatggcgtgaacccaggaggcggagcttgcagtgagcagagatcacgccactgcactccagcctggatgacagagcgagactccgcctcaaaaaaagaatacaaatgctccaacattattttttataactctggattaccgatgctgagatgtgtgcaggaatacttccaaataaatttttaacattgtaagccagtagattctttggctgggtggcaaattttgagtcttcttgcatatttggctcatgggttcataaattgaggccagagactcattgtatatccttgatcaattttctaattaaaggaaatagcttattgtttagtaaaatggcccttggttgtgggaagaaagagaattatttttaactgaacgtttttgttgttttttaaataaagtagccatatgtaacgggattttaaaaatatatacattttacaacatggactagaaaaggaccattagatcaggggttggcaaactatggcccacgaatcaaacctggcctgccacctgtttttatacaacctgtgagctaagaatggtttatatgttttcaaatgattgggcagaaaatcaaaagaagaacaatatttcatgacacctgaaaattctatgaaattcagatttcagtgtccataaacaaaatgttattagagcatagccacacccattcatttatggtattgtctgggactgctttcttggcagagttgaatagttgggacagggacagtatagcctgcaaagcctaaaagatttactacttgtctccttaaagaaaaagtttgccagctcctgatctagaccaagagggagatattgaccttacttgcatttatccggcattatttcaacacctcctgtgaagaaagtacttttctggcatagctaccgtgagttctcagcaggaacttcccagcgatgataatgtacatgaaattagccacgtaacaagagtctatttgccttgaaaaaacaattatccttgaacttcctccagctatgcagggattctcattaaagagctgatctgcatctgtttatccattttagtagcttttaaatatgattttatgtgaagtgccatttctttattctactaaagagagacagcagaaataaagatcagaagcaaatgtgagcaaatctgttttactgttaacttcaattatgaacttgaaattgtgccacatgactttttcctctaaaaactggatcctagtgttttaattacctgtgtgcagctattttaaatagcattttacttgaataatatgtatgttgtcattgtttcatgctatactttgtgggataaaacttgggaatgagtgtggtaagaaatttataaagttttgcttttaaaacgtggacataactcatttttctagtttttgacaattgtgtgttttagtgtctagtctgcagagagctgtgtgattaataaacgtggaattaacagaatttcctctccctgtaaaaaaaaaaat

SEQ ID NO: 379558 - DNA, 650 bp, Homo sapiens
tgcctgtttcctgtcgccgtcgttgcccgggccatggcgacctgcatttggctgcggagctgtggggcccggcgcctcgggtcgacgtttccaggctgccgcctccgcccccgcgccggcggcctggtccctgcctccgggcctgcgcccggcccggcccagctccgctgctacgctgggcgcctggcgggcctctctgcggcgctgctgcgcaccgacagcttcgtgggcggccgctggctcccggccgccgccaccttccccgtgcaagacccggccagcggcgccgctctgggcatggtagccgactgcggggtgcgagaggcccgcgccgccgtgcgcgctgcctacgaggctttctgccgctggagggaggtctccgccaaggtgagagagcccggatgcagggggccagagctggccggggacacggcggggagcagagggggctttaccccaaagtgacaccagccgcgtcgcctccctcctgtgctcagttccccagggtatacaaagtggaaagtcagagcaacaagggagacgaccgacaaataagtttggagcttccactttgagccgggcactagggacacgacccctgccctcaagcctcatcaagttatgcactgcccagtaggggaggcagaacg

SEQ ID NO: 379559 - DNA, 5094 bp, Homo sapiens
tgcctgtttcctgtcgccgtcgttgcccgggccatggcgacctgcatttggctgcggagctgtggggcccggcgcctcgggtcgacgtttccaggctgccgcctccgcccccgcgccggcggcctggtccctgcctccgggcctgcgcccggcccggcccagctccgctgctacgctgggcgcctggcgggcctctctgcggcgctgctgcgcaccgacagcttcgtgggcggccgctggctcccggccgccgccaccttccccgtgcaagacccggccagcggcgccgctctgggcatggtagccgactgcggggtgcgagaggcccgcgccgccgtgcgcgctgcctacgaggctttctgccgctggagggaggtctccgccaaggagaggagttcattacttcggaagtggtacaatttaatgatacaaaataaggatgaccttgccagaataatcacagctgaaagtggaaagccactgaaggaggcacatggagaaattctctattccgcctttttcctagagtggttctctgaggaagcccgccgtgtttacggagacattatccacaccccggcaaaggacaggcgggccctggtcctcaagcagcccataggcgtggctgcagtcatcaccccgtggaatttccccagtgccatgatcacccggaaggtgggggccgccctggcagccggctgtactgtcgtggtgaagcctgccgaagacacgcccttctccgccctggccctggctgagcttgcaagccaggctgggattccttcaggtgtatacaatgttattccctgttctcgaaagaatgccaaggaagtaggggaggcaatttgtactgatcctctggtgtccaaaatttcctttactggttcaacaactacaggaaagatcctgttgcaccacgcagcaaactctgtgaaaagggtctctatggagctgggcggccttgctccatttatagtatttgacagtgccaacgtggaccaggctgtagcaggggccatggcatctaaatttaggaacactggacagacttgtgtttgctcaaaccaattcttggtgcaaaggggcatccatgatgcctttgtaaaagcattcgccgaggccatgaagaagaacctgcgcgtaggtaatggatttgaggaaggaactactcagggcccattaattaatgaaaaagcggtagaaaaggtggagaaacaggtgaatgatgccgtttctaaaggtgccaccgttgtgacaggtggaaaacgacaccaacttggaaaaaatttctttgagcctaccctgctgtgcaatgtcacccaggacatgctgtgcactcatgaagagactttcgggcctctggcaccagttatcaagttcgatacagaggaggaggctatagcaatcgctaacgcagctgatgttgggttagcaggttatttttactctcaagacccagcccagatctggagagtggcagagcagctggaagtgggcatggttggcgtcaacgaaggattaatttcctctgtggagtgcccttttggtggagtgaagcagtccggccttgggcgagaggggtccaagtatggcattgatgagtatctggaactcaagtatgtgtgttacgggggcttgtaggattctttggttctttaaaaaaatttaaaaggagacttatctacatatataggtacatgccatccattattttaaataaactaataggttttcagaattatgaatttttcagaactcatccagtccttgtaatcttaaacagatgcaaatcctacccctgcccttaatgtaactagggaccaatatgtgccacgtgcctgtggctgcagactcccagagaaccagcactgggtttacagaatgaggccctggctccccaccacagccccagctgcctcagagcaggcacagcacaaggcaggcccagccccatgggccgtcacaaaggcttgatcactgcctgggcagtggcacaaccatcccccatgtcgctacagaacatgggcccagagcaccttgaaggagacccttgactgtgactggcaggcaggtgaggggcacagcacccctccccggcatctgccagctcagcacagaagacaccgaatgtgcatctggaggtgttgcggcagaggtttgagtgaaccctctttcaaagacaataaatagcacagaattgtccgtgcttctgtgaggcacgaaggagcacctctccctattcctgaaccatattttaattgatgcctttattgtcccaaatttaccacttaaagaattctattttcatttctgtcctgtttgccacttcatttcatttccttgagtaaatgagctgaagtgtaaagcaaagaatagcagaagcagcttggtaggatggaaggcacgcagtggcatggcctggctccttccctgagtggccttgttgccttgggcgtgtgttcagcacctcccatcccatggatacagtggagattccatacaggccttacttagctccttgcgatactgtgagccagagagaaagtaaaagcacttcacaaaaaaatgaaaattctaaggacatacaagagccattgttacgagcagcaccgcccagcccttccttgcctactgtcagtggctttgccaagatgggaggaggccagtgcccacttgcccaccgacctgagcctgagtaagtggctgtcacctgagcctgttctttctgtcctggtgtggtgctgctccctcacctccaaaagagcaaaagtactttcaccacagtcaacccaaaagggaaagaatttctgtaattgccaacccactttgtagaagaggcatgagcccttgaatttcaggcaccttttatctaatgagagtttttacagctcatcattcaaataacgcacaaaaaacaaaagccgctatgaccggcgttgcctctcactttgaaagaaagactccgtaatcttaaacagatgcaaatccaattaggcggccaagtaggtggagacgaagcaccttcctttccccatctctgtctgtgtagactccacttacatcttgtggttattctgggttgtggaaggatttaacatccctcattgagccactgggaagctatggttgagtaactaaaggtctggcaagaccctgggcacacagggagctgcctagcatctggcctggagtgtactagccacattcccaaggtcccaaggagaaggaagagctgaaattcatctcctagtgacagtgccccggccctgtcaagaatcacatactcagcattttgacagttaatgtcttctctttatttgtgtagtttttaggtggttttatataacattttaattacttgtgatttagatgtatccatcctttttctattaagaatacaaatgctgggctgggcacagtggctcacgcctgtaatcccaacaccttgggaggccaaggcaggcagatcacgacatcaggagatcgagaccatcctggctaacacggtgaaaccccgtctctactaaaaatacaaaaaaaattagtcggatgtggtggcaggtgcctgtagtcccagctactctggaggctgaggcaggagaatggcgtgaacccaggaggcggagcttgcagtgagcagagatcacgccactgcactccagcctggatgacagagcgagactccgcctcaaaaaaagaatacaaatgctccaacattattttttataactctggattaccgatgctgagatgtgtgcaggaatacttccaaataaatttttaacattgtaagccagtagattctttggctgggtggcaaattttgagtcttcttgcatatttggctcatgggttcataaattgaggccagagactcattgtatatccttgatcaattttctaattaaaggaaatagcttattgtttagtaaaatggcccttggttgtgggaagaaagagaattatttttaactgaacgtttttgttgttttttaaataaagtagccatatgtaacgggattttaaaaatatatacattttacaacatggactagaaaaggaccattagatcaggggttggcaaactatggcccacgaatcaaacctggcctgccacctgtttttatacaacctgtgagctaagaatggtttatatgttttcaaatgattgggcagaaaatcaaaagaagaacaatatttcatgacacctgaaaattctatgaaattcagatttcagtgtccataaacaaaatgttattagagcatagccacacccattcatttatggtattgtctgggactgctttcttggcagagttgaatagttgggacagggacagtatagcctgcaaagcctaaaagatttactacttgtctccttaaagaaaaagtttgccagctcctgatctagaccaagagggagatattgaccttacttgcatttatccggcattatttcaacacctcctgtgaagaaagtacttttctggcatagctaccgtgagttctcagcaggaacttcccagcgatgataatgtacatgaaattagccacgtaacaagagtctatttgccttgaaaaaacaattatccttgaacttcctccagctatgcagggattctcattaaagagctgatctgcatctgtttatccattttagtagcttttaaatatgattttatgtgaagtgccatttctttattctactaaagagagacagcagaaataaagatcagaagcaaatgtgagcaaatctgttttactgttaacttcaattatgaacttgaaattgtgccacatgactttttcctctaaaaactggatcctagtgttttaattacctgtgtgcagctattttaaatagcattttacttgaataatatgtatgttgtcattgtttcatgctatactttgtgggataaaacttgggaatgagtgtggtaagaaatttataaagttttgcttttaaaacgtggacataactcatttttctagtttttgacaattgtgtgttttagtgtctagtctgcagagagctgtgtgattaataaacgtggaattaacagaatttcctctccctgtaaaaaaaaaaat

SEQ ID NO: 379560 - DNA, 5186 bp, Homo sapiens
tgcctgtttcctgtcgccgtcgttgcccgggccatggcgacctgcatttggctgcggagctgtggggcccggcgcctcgggtcgacgtttccaggctgccgcctccgcccccgcgccggcggcctggtccctgcctccgggcctgcgcccggcccggcccagctccgctgctacgctgggcgcctggcgggcctctctgcggcgctgctgcgcaccgacagcttcgtgggcggccgctggctcccggccgccgccaccttccccgtgcaagacccggccagcggcgccgctctgggcatggtagccgactgcggggtgcgagaggcccgcgccgccgtgcgcgctgcctacgaggctttctgccgctggagggaggtctccgccaaggagaggagttcattacttcggaagtggtacaatttaatgatacaaaataaggatgaccttgccagaataatcacagctgaaagtggaaagccactgaaggaggcacatggagaaattctctattccgcctttttcctagagtggttctctgaggaagcccgccgtgtttacggagacattatccacaccccggcaaaggacaggcgggccctggtcctcaagcagcccataggcgtggctgcagtcatcaccccgtggaatttccccagtgccatgatcacccggaaggtgggggccgccctggcagccggctgtactgtcgtggtgaagcctgccgaagacacgcccttctccgccctggccctggctgaggtaaatcagggatttcttcttgatttggatccattgttgcttgcaagccaggctgggattccttcaggtgtatacaatgttattccctgttctcgaaagaatgccaaggaagtaggggaggcaatttgtactgatcctctggtgtccaaaatttcctttactggttcaacaactacaggaaagatcctgttgcaccacgcagcaaactctgtgaaaagggtctctatggagctgggcggccttgctccatttatagtatttgacagtgccaacgtggaccaggctgtagcaggggccatggcatctaaatttaggaacactggacagacttgtgtttgctcaaaccaattcttggtgcaaaggggcatccatgatgcctttgtaaaagcattcgccgaggccatgaagaagaacctgcgcgtaggtaatggatttgaggaaggaactactcagggcccattaattaatgaaaaagcggtagaaaaggtggagaaacaggtgaatgatgccgtttctaaaggtgccaccgttgtgacaggtggaaaacgacaccaacttggaaaaaatttctttgagcctaccctgctgtgcaatgtcacccaggacatgctgtgcactcatgaagagactttcgggcctctggcaccagttatcaagttcgatacagaggaggaggctatagcaatcgctaacgcagctgatgttgggttagcaggttatttttactctcaagacccagcccagatctggagagtggcagagcagctggaagtgggcatggttggcgtcaacgaaggattaatttcctctgtggagtgcccttttggtggagtgaagcagtccggccttgggcgagaggggtccaagtatggcattgatgagtatctggaactcaagtatgtgtgttacgggggcttgtaggattctttggttctttaaaaaaatttaaaaggagacttatctacatatataggtacatgccatccattattttaaataaactaataggttttcagaattatgaatttttcagaactcatccagtccttgtaatcttaaacagatgcaaatcctacccctgcccttaatgtaactagggaccaatatgtgccacgtgcctgtggctgcagactcccagagaaccagcactgggtttacagaatgaggccctggctccccaccacagccccagctgcctcagagcaggcacagcacaaggcaggcccagccccatgggccgtcacaaaggcttgatcactgcctgggcagtggcacaaccatcccccatgtcgctacagaacatgggcccagagcaccttgaaggagacccttgactgtgactggcaggcaggtgaggggcacagcacccctccccggcatctgccagctcagcacagaagacaccgaatgtgcatctggaggtgttgcggcagaggtttgagtgaaccctctttcaaagacaataaatagcacagaattgtccgtgcttctgtgaggcacgaaggagcacctctccctattcctgaaccatattttaattgatgcctttattgtcccaaatttaccacttaaagaattctattttcatttctgtcctgtttgccacttcatttcatttccttgagtaaatgagctgaagtgtaaagcaaagaatagcagaagcagcttggtaggatggaaggcacgcagtggcatggcctggctccttccctgagtggccttgttgccttgggcgtgtgttcagcacctcccatcccatggatacagtggagattccatacaggccttacttagctccttgcgatactgtgagccagagagaaagtaaaagcacttcacaaaaaaatgaaaattctaaggacatacaagagccattgttacgagcagcaccgcccagcccttccttgcctactgtcagtggctttgccaagatgggaggaggccagtgcccacttgcccaccgacctgagcctgagtaagtggctgtcacctgagcctgttctttctgtcctggtgtggtgctgctccctcacctccaaaagagcaaaagtactttcaccacagtcaacccaaaagggaaagaatttctgtaattgccaacccactttgtagaagaggcatgagcccttgaatttcaggcaccttttatctaatgagagtttttacagctcatcattcaaataacgcacaaaaaacaaaagccgctatgaccggcgttgcctctcactttgaaagaaagactccgtaatcttaaacagatgcaaatccaattaggcggccaagtaggtggagacgaagcaccttcctttccccatctctgtctgtgtagactccacttacatcttgtggttattctgggttgtggaaggaaaatgtgaatgaaagtagtgctggatgcaattactcctgaaccccacctaggatttaacatccctcattgagccactgggaagctatggttgagtaactaaaggtctggcaagaccctgggcacacagggagctgcctagcatctggcctggagtgtactagccacattcccaaggtcccaaggagaaggaagagctgaaattcatctcctagtgacagtgccccggccctgtcaagaatcacatactcagcattttgacagttaatgtcttctctttatttgtgtagtttttaggtggttttatataacattttaattacttgtgatttagatgtatccatcctttttctattaagaatacaaatgctgggctgggcacagtggctcacgcctgtaatcccaacaccttgggaggccaaggcaggcagatcacgacatcaggagatcgagaccatcctggctaacacggtgaaaccccgtctctactaaaaatacaaaaaaaattagtcggatgtggtggcaggtgcctgtagtcccagctactctggaggctgaggcaggagaatggcgtgaacccaggaggcggagcttgcagtgagcagagatcacgccactgcactccagcctggatgacagagcgagactccgcctcaaaaaaagaatacaaatgctccaacattattttttataactctggattaccgatgctgagatgtgtgcaggaatacttccaaataaatttttaacattgtaagccagtagattctttggctgggtggcaaattttgagtcttcttgcatatttggctcatgggttcataaattgaggccagagactcattgtatatccttgatcaattttctaattaaaggaaatagcttattgtttagtaaaatggcccttggttgtgggaagaaagagaattatttttaactgaacgtttttgttgttttttaaataaagtagccatatgtaacgggattttaaaaatatatacattttacaacatggactagaaaaggaccattagatcaggggttggcaaactatggcccacgaatcaaacctggcctgccacctgtttttatacaacctgtgagctaagaatggtttatatgttttcaaatgattgggcagaaaatcaaaagaagaacaatatttcatgacacctgaaaattctatgaaattcagatttcagtgtccataaacaaaatgttattagagcatagccacacccattcatttatggtattgtctgggactgctttcttggcagagttgaatagttgggacagggacagtatagcctgcaaagcctaaaagatttactacttgtctccttaaagaaaaagtttgccagctcctgatctagaccaagagggagatattgaccttacttgcatttatccggcattatttcaacacctcctgtgaagaaagtacttttctggcatagctaccgtgagttctcagcaggaacttcccagcgatgataatgtacatgaaattagccacgtaacaagagtctatttgccttgaaaaaacaattatccttgaacttcctccagctatgcagggattctcattaaagagctgatctgcatctgtttatccattttagtagcttttaaatatgattttatgtgaagtgccatttctttattctactaaagagagacagcagaaataaagatcagaagcaaatgtgagcaaatctgttttactgttaacttcaattatgaacttgaaattgtgccacatgactttttcctctaaaaactggatcctagtgttttaattacctgtgtgcagctattttaaatagcattttacttgaataatatgtatgttgtcattgtttcatgctatactttgtgggataaaacttgggaatgagtgtggtaagaaatttataaagttttgcttttaaaacgtggacataactcatttttctagtttttgacaattgtgtgttttagtgtctagtctgcagagagctgtgtgattaataaacgtggaattaacagaatttcctctccctgtaaaaaaaaaaat

SEQ ID NO: 379561 - DNA, 398 bp, Homo sapiens
  misc_feature (184)..(184): n is a, c, g, or t
agcaaaaaagccttgaccaagagcttgggtctccttcggacctgcacacgactccccaactcccgcctgcaacggcgcctcttggatcccgggcaggcagcgtccacccagcgtggaaccgtggcagccgcagcccccgcaggttggagggcagacactagcaggagaaaggccacaaggctgncgtggtgggaaagcatgggagacgtcgctttcctaccgggcgagaaggtctccctacagtctttggagacaagatggagggaggcaccccttccaggaacaaggcggctgctcctgaggcctggctccgcacggaggcttcctggggtcccgcgcgccctcttccctacccgctgttagccagagttgctttcacatatcttcaaccggcttcc

SEQ ID NO: 379562 - DNA, 1107 bp, Homo sapiens
  misc_feature (1034)..(1034): n is a, c, g, or t
ccctgcctctccccgcctttcctcgcctcgcctcgcctcgccccgccccgcccctccccgccctgcctcgcctcgtctcgcctcgcttcggttagatgcgctcggcgctccataggctccctggtggggcgcgggcgcgcgcacggacgtccagcacgcacgcacgcacgtccagcacacacgcacatccagcacgcacgcacgtacgtccggcacttccggccgcggcggcctcagcgccggcccgaagggaccaggccgccgtccccagcgagaggcatgcagcgctgaggagcggcgacccagcacggcggcgccatgaacctcctgccgtgtaaccctcacggcaacgggctgctctacgccggcttcaaccaggaccacggatgctttgcgtgtgggatggaaaatggattccgagtctataacactgatccactaaaagaaaaagagaaacaagaatttctagaaggaggagttggccatgttgaaatgttatttcgctgcaactatttagctttagttggtggtggaaaaaagccgaaataccctcccaacaaagtaatgatctgggatgacctgaagaagaagactgttattgaaatagaattttctacagaagtcaaggcagtcaagctgcggcgagatagaattgtggtggttttggactccatgattaaggtgttcacattcacacacaatccccatcagttgcacgtcttcgaaacctgctataaccccaaaggcctctgtgtcctttgtcccaatagtaacaactccctcctggcctttccgggcacgcacacgggccatgtgcagcttgtggacctggccagcacggagaagccacccgtggacattcctgcacacgagggtgtcctgagctgcattgcactcaacctgcagggaacaagaattgcaactgcatccgagaaagggacgcttataagaatatttgatacttcatcagggcatttaatccaggaactgcgaagaggatctcaagcagccaatatttactggcttcaacttcnatccggatgcgtccctcatctgggtatccagggaacacggcatcttcatcggcgaaaacggcatcttcatcgg

SEQ ID NO: 379563 - DNA, 2710 bp, Homo sapiens
ccctgcctctccccgcctttcctcgcctcgcctcgcctcgccccgccccgcccctccccgccctgcctcgcctcgtctcgcctcgcttcggttagatgcgctcggcgctccataggctccctggtggggcgcgggcgcgcgcacggacgtccagcacgcacgcacgcacgtccagcacacacgcacatccagcacgcacgcacgtacgtccggcacttccggccgcggcggcctcagcgccggcccgaagggaccaggccgccgtccccagcgagaggcatgcagcgctgaggagcggcgacccagcacggcggcgccatgaacctcctgccgtgtaaccctcacggcaacgggctgctctacgccggcttcaaccaggaccacggatgctttgcgtgtgggatggaaaatggattccgagtctataacactgatccactaaaagaaaaagagaaacaagaatttctagaaggaggagttggccatgttgaaatgttatttcgctgcaactatttagctttagttggtggtggaaaaaagccgaaataccctcccaacaaagtaatgatctgggatgacctgaagaagaagactgttattgaaatagaattttctacagaagtcaaggcagtcaagctgcggcgagatagaattgtggtggttttggactccatgattaaggtgttcacattcacacacaatccccatcagttgcacgtcttcgaaacctgctataaccccaaaggcctctgtgtcctttgtcccaatagtaacaactccctcctggcctttccgggcacgcacacgggccatgtgcagcttgtggacctggccagcacggagaagccacccgtggacattcctgcacacgagggtgtcctgagctgcattgcactcaacctgcagggaacaagaattgcaactgcatccgagaaagggacgcttataagaatatttgatacttcatcagggcatttaatccaggaactgcgaagaggatctcaagcagccaatatttactgcatcaacttcaatcaggatgcgtccctcatctgcgtatccagcgaccacggcacagtgcatatttttgcagctgaagatccaaaaaggaataaacagtccagtttggcctcagccagtttccttccaaaatacttcagttccaagtggagtttctccaagtttcaggttccctcaggctctccgtgcatttgtgcctttggaacagagccaaacgccgtcattgcaatttgtgcagacggcagctactacaaattcctgttcaaccccaagggggagtgcatccgagatgtctacgcgcagtttctagagatgaccgatgacaagctgtgactccagctgggggcgccacagcacccaccacctgccgccttcagactctcggggctggtgccagtgccccaggggcctcctgggccacgggctggaggggctgcccagggaccttggtctcgaagccatacgtggttgtctgctttcctaaggactcccatttccagtattaaagagagaatcatcatcaaggcaccgtaggtaactcagtggctgtgaccagctcgactggcggccactggctgttcccatgagttcagctgtgacgttagcttcagtggctccgccgcatcctcacactgacgggggctccatacggacctggggactgggctgagagggtggacgagttcaggtttgtttttgcagcagattccgtcgttcttactgagtctgcagcgggggagtgaacaagtgtgcagatgtaagttcttacatgataagcagattgaatacaacaccagcagcttgccttagaaaaggagaaaggaattccttttcccgcccgaacatgaagaaaaacgacctgaccctgtagagagaacacagtgtgaatgtttcccctcgtgtgagcccagcctgtggtcttctccgtacccgcaacgtggtcatctgtgcccgtgacgtcacctgtgcccgtgcgtggcgtccccgtctccgttggggccattagaatgaggcagacaccaggccactctagaagccgagccgtcacacctcaggcgtgtgcggggcggggacggggggtctcctggttacattttggattaaacctgtttcccggttatgtgtagggaacagcagagtgatgcacgaactttgaacattcgttatggggaaaacatcctttaacttcggggtcgtctgccagagcagggtctgggagggtccatgcagttcccgctggtgtggagggaaatgccctggtctggcctccgagcccccaggtccaccgtctcccctcccctcatttgtaagaatagctacacactaacattttgggaaggagaggcacataactttttttaacatttggtaactaggttatgggctctacattgtcagctacttgggatatatatttaattttcttaaattcccgttaaactctattttatggttttgatttcagattgcaaacatgtaaaacctgcatagcagcgagtcctcggttttgccggtttctttagttctttactgtcactgtcatgtaatcagctaattctctgtggatgttgctgtaaagtatgcatgttcctttcatgtgtatttaatcatgatgtttaattttgcacacttatttgtaatgtttcttttaaataaaagtgactaattttgttgtagtctggacctgtaa

SEQ ID NO: 379564 - DNA, 2614 bp, Homo sapiens
aagtgactggtaccggcccggaggttagggatagagcgccggcccgaagggaccaggccgccgtccccagcgagaggcatgcagcgctgaggagcggcgacccagcacggcggcgccatgaacctcctgccgtgtaaccctcacggcaacgggctgctctacgccggcttcaaccaggaccacgatgctttgcgtgtgggatggaaaatggattccggcgccatgaacctcctgccgtgtaaccctcacggcaacgggctgctctacgccggcttcaaccaggaccacggatgctttgcgtgtgggatggaaaatggattccgagtctataacactgatccactaaaagaaaaagagaaacaagaatttctagaaggaggagttggccatgttgaaatgttatttcgctgcaactatttagctttagttggtggtggaaaaaagccgaaataccctcccaacaaagtaatgatctgggatgacctgaagaagaagactgttattgaaatagaattttctacagaagtcaaggcagtcaagctgcggcgagatagaattgtggtggttttggactccatgattaaggtgttcacattcacacacaatccccatcagttgcacgtcttcgaaacctgctataaccccaaaggcctctgtgtcctttgtcccaatagtaacaactccctcctggcctttccgggcacgcacacgggccatgtgcagcttgtggacctggccagcacggagaagccacccgtggacattcctgcacacgagggtgtcctgagctgcattgcactcaacctgcagggaacaagaattgcaactgcatccgagaaagggacgcttataagaatatttgatacttcatcagggcatttaatccaggaactgcgaagaggatctcaagcagccaatatttactgcatcaacttcaatcaggatgcgtccctcatctgcgtatccagcgaccacggcacagtgcatatttttgcagctgaagatccaaaaaggaataaacagtccagtttggcctcagccagtttccttccaaaatacttcagttccaagtggagtttctccaagtttcaggttccctcaggctctccgtgcatttgtgcctttggaacagagccaaacgccgtcattgcaatttgtgcagacggcagctactacaaattcctgttcaaccccaagggggagtgcatccgagatgtctacgcgcagtttctagagatgaccgatgacaagctgtgactccagctgggggcgccacagcacccaccacctgccgccttcagactctcggggctggtgccagtgccccaggggcctcctgggccacgggctggaggggctgcccagggaccttggtctcgaagccatacgtggttgtctgctttcctaaggactcccatttccagtattaaagagagaatcatcatcaaggcaccgtaggtaactcagtggctgtgaccagctcgactggcggccactggctgttcccatgagttcagctgtgacgttagcttcagtggctccgccgcatcctcacactgacgggggctccatacggacctggggactgggctgagagggtggacgagttcaggtttgtttttgcagcagattccgtcgttcttactgagtctgcagcgggggagtgaacaagtgtgcagatgtaagttcttacatgataagcagattgaatacaacaccagcagcttgccttagaaaaggagaaaggaattccttttcccgcccgaacatgaagaaaaacgacctgaccctgtagagagaacacagtgtgaatgtttcccctcgtgtgagcccagcctgtggtcttctccgtacccgcaacgtggtcatctgtgcccgtgacgtcacctgtgcccgtgcgtggcgtccccgtctccgttggggccattagaatgaggcagacaccaggccactctagaagccgagccgtcacacctcaggcgtgtgcggggcggggacggggggtctcctggttacattttggattaaacctgtttcccggttatgtgtagggaacagcagagtgatgcacgaactttgaacattcgttatggggaaaacatcctttaacttcggggtcgtctgccagagcagggtctgggagggtccatgcagttcccgctggtgtggagggaaatgccctggtctggcctccgagcccccaggtccaccgtctcccctcccctcatttgtaagaatagctacacactaacattttgggaaggagaggcacataactttttttaacatttggtaactaggttatgggctctacattgtcagctacttgggatatatatttaattttcttaaattcccgttaaactctattttatggttttgatttcagattgcaaacatgtaaaacctgcatagcagcgagtcctcggttttgccggtttctttagttctttactgtcactgtcatgtaatcagctaattctctgtggatgttgctgtaaagtatgcatgttcctttcatgtgtatttaatcatgatgtttaattttgcacacttatttgtaatgtttcttttaaataaaagtgactaattttgttgtagtctggacctgtaa

SEQ ID NO: 379565 - DNA, 2509 bp, Homo sapiens
aagtgactggtaccggcccggaggttagggatagagcgccggcccgaagggaccaggccgccgtccccagcgagaggcatgcagcgctgaggagcggcgacccagcacggcggcgccatgaacctcctgccgtgtaaccctcacggcaacgggctgctctacgccggcttcaaccaggaccacggatgctttgcgtgtgggatggaaaatggattccgagtctataacactgatccactaaaagaaaaagagaaacaagaatttctagaaggaggagttggccatgttgaaatgttatttcgctgcaactatttagctttagttggtggtggaaaaaagccgaaataccctcccaacaaagtaatgatctgggatgacctgaagaagaagactgttattgaaatagaattttctacagaagtcaaggcagtcaagctgcggcgagatagaattgtggtggttttggactccatgattaaggtgttcacattcacacacaatccccatcagttgcacgtcttcgaaacctgctataaccccaaaggcctctgtgtcctttgtcccaatagtaacaactccctcctggcctttccgggcacgcacacgggccatgtgcagcttgtggacctggccagcacggagaagccacccgtggacattcctgcacacgagggtgtcctgagctgcattgcactcaacctgcagggaacaagaattgcaactgcatccgagaaagggacgcttataagaatatttgatacttcatcagggcatttaatccaggaactgcgaagaggatctcaagcagccaatatttactgcatcaacttcaatcaggatgcgtccctcatctgcgtatccagcgaccacggcacagtgcatatttttgcagctgaagatccaaaaaggaataaacagtccagtttggcctcagccagtttccttccaaaatacttcagttccaagtggagtttctccaagtttcaggttccctcaggctctccgtgcatttgtgcctttggaacagagccaaacgccgtcattgcaatttgtgcagacggcagctactacaaattcctgttcaaccccaagggggagtgcatccgagatgtctacgcgcagtttctagagatgaccgatgacaagctgtgactccagctgggggcgccacagcacccaccacctgccgccttcagactctcggggctggtgccagtgccccaggggcctcctgggccacgggctggaggggctgcccagggaccttggtctcgaagccatacgtggttgtctgctttcctaaggactcccatttccagtattaaagagagaatcatcatcaaggcaccgtaggtaactcagtggctgtgaccagctcgactggcggccactggctgttcccatgagttcagctgtgacgttagcttcagtggctccgccgcatcctcacactgacgggggctccatacggacctggggactgggctgagagggtggacgagttcaggtttgtttttgcagcagattccgtcgttcttactgagtctgcagcgggggagtgaacaagtgtgcagatgtaagttcttacatgataagcagattgaatacaacaccagcagcttgccttagaaaaggagaaaggaattccttttcccgcccgaacatgaagaaaaacgacctgaccctgtagagagaacacagtgtgaatgtttcccctcgtgtgagcccagcctgtggtcttctccgtacccgcaacgtggtcatctgtgcccgtgacgtcacctgtgcccgtgcgtggcgtccccgtctccgttggggccattagaatgaggcagacaccaggccactctagaagccgagccgtcacacctcaggcgtgtgcggggcggggacggggggtctcctggttacattttggattaaacctgtttcccggttatgtgtagggaacagcagagtgatgcacgaactttgaacattcgttatggggaaaacatcctttaacttcggggtcgtctgccagagcagggtctgggagggtccatgcagttcccgctggtgtggagggaaatgccctggtctggcctccgagcccccaggtccaccgtctcccctcccctcatttgtaagaatagctacacactaacattttgggaaggagaggcacataactttttttaacatttggtaactaggttatgggctctacattgtcagctacttgggatatatatttaattttcttaaattcccgttaaactctattttatggttttgatttcagattgcaaacatgtaaaacctgcatagcagcgagtcctcggttttgccggtttctttagttctttactgtcactgtcatgtaatcagctaattctctgtggatgttgctgtaaagtatgcatgttcctttcatgtgtatttaatcatgatgtttaattttgcacacttatttgtaatgtttcttttaaataaaagtgactaattttgttgtagtctggacctgtaa

SEQ ID NO: 379566 - DNA, 2808 bp, Homo sapiens
ccctgcctctccccgcctttcctcgcctcgcctcgcctcgccccgccccgcccctccccgccctgcctcgcctcgtctcgcctcgcttcggttagatgcgctcggcgctccataggctccctggtggggcgcgggcgcgcgcacggacgtccagcacgcacgcacgcacgtccagcacacacgcacatccagcacgcacgcacgtacgtccggcacttccggccgcggcggcctcagcgccggcccgaagggaccaggccgccgtccccagcgagaggcatgcagcgctgaggagcggcgacccagcacggcggcgccatgaacctcctgccgtgtaaccctcacggcaacgggctgctctacgccggcttcaaccaggaccacggatgctttgcgtgtgggatggaaaatggattccgagtctataacactgatccactaaaagaaaaagagaaacaagaatttctagaaggaggagttggccatgttgaaatgttatttcgctgcaactatttagctttagttggtggtggaaaaaagccgaaataccctcccaacaaaggaacagagaaatgaaatgggaagagattatcggtaggaaaaacagtggaagacagggcttgagatcttggcctttgagcggttctgtaatctcacaagtaatgatctgggatgacctgaagaagaagactgttattgaaatagaattttctacagaagtcaaggcagtcaagctgcggcgagatagaattgtggtggttttggactccatgattaaggtgttcacattcacacacaatccccatcagttgcacgtcttcgaaacctgctataaccccaaaggcctctgtgtcctttgtcccaatagtaacaactccctcctggcctttccgggcacgcacacgggccatgtgcagcttgtggacctggccagcacggagaagccacccgtggacattcctgcacacgagggtgtcctgagctgcattgcactcaacctgcagggaacaagaattgcaactgcatccgagaaagggacgcttataagaatatttgatacttcatcagggcatttaatccaggaactgcgaagaggatctcaagcagccaatatttactgcatcaacttcaatcaggatgcgtccctcatctgcgtatccagcgaccacggcacagtgcatatttttgcagctgaagatccaaaaaggaataaacagtccagtttggcctcagccagtttccttccaaaatacttcagttccaagtggagtttctccaagtttcaggttccctcaggctctccgtgcatttgtgcctttggaacagagccaaacgccgtcattgcaatttgtgcagacggcagctactacaaattcctgttcaaccccaagggggagtgcatccgagatgtctacgcgcagtttctagagatgaccgatgacaagctgtgactccagctgggggcgccacagcacccaccacctgccgccttcagactctcggggctggtgccagtgccccaggggcctcctgggccacgggctggaggggctgcccagggaccttggtctcgaagccatacgtggttgtctgctttcctaaggactcccatttccagtattaaagagagaatcatcatcaaggcaccgtaggtaactcagtggctgtgaccagctcgactggcggccactggctgttcccatgagttcagctgtgacgttagcttcagtggctccgccgcatcctcacactgacgggggctccatacggacctggggactgggctgagagggtggacgagttcaggtttgtttttgcagcagattccgtcgttcttactgagtctgcagcgggggagtgaacaagtgtgcagatgtaagttcttacatgataagcagattgaatacaacaccagcagcttgccttagaaaaggagaaaggaattccttttcccgcccgaacatgaagaaaaacgacctgaccctgtagagagaacacagtgtgaatgtttcccctcgtgtgagcccagcctgtggtcttctccgtacccgcaacgtggtcatctgtgcccgtgacgtcacctgtgcccgtgcgtggcgtccccgtctccgttggggccattagaatgaggcagacaccaggccactctagaagccgagccgtcacacctcaggcgtgtgcggggcggggacggggggtctcctggttacattttggattaaacctgtttcccggttatgtgtagggaacagcagagtgatgcacgaactttgaacattcgttatggggaaaacatcctttaacttcggggtcgtctgccagagcagggtctgggagggtccatgcagttcccgctggtgtggagggaaatgccctggtctggcctccgagcccccaggtccaccgtctcccctcccctcatttgtaagaatagctacacactaacattttgggaaggagaggcacataactttttttaacatttggtaactaggttatgggctctacattgtcagctacttgggatatatatttaattttcttaaattcccgttaaactctattttatggttttgatttcagattgcaaacatgtaaaacctgcatagcagcgagtcctcggttttgccggtttctttagttctttactgtcactgtcatgtaatcagctaattctctgtggatgttgctgtaaagtatgcatgttcctttcatgtgtatttaatcatgatgtttaattttgcacacttatttgtaatgtttcttttaaataaaagtgactaattttgttgtagtctggacctgtaa

SEQ ID NO: 379567 - DNA, 2543 bp, Homo sapiens
gttgcagtgagctgaggttgtgccactgcactccagcctgagcgacagagtgagactccatctataaaaaaaaagtaataataataataatgcaaacgcttgagccagatcgaggatattctactttcagacttttcttattttttccagacacagtagcataaaaatatcacttctgtctgttttgctcggttctgaacctagatggagtgtttgatgatgtctctctgaacctcagagacgtctcttaggctgaccttcacccaggcgagaagcactccctcagcagagccagcccacgtgcactcgccgagctccaggcctggcgctggctacctgcctccagagctttttcttcaggaacactccttttctgtgtggtattttcagtgtttctcagtttcagtatgataagaacaggagcataaaatgtttgggtttgactcttgaggaaagcaactctgatcatgtttttctttccagaattgtggtggttttggactccatgattaaggtgttcacattcacacacaatccccatcagttgcacgtcttcgaaacctgctataaccccaaaggcctctgtgtcctttgtcccaatagtaacaactccctcctggcctttccgggcacgcacacgggccatgtgcagcttgtggacctggccagcacggagaagccacccgtggacattcctgcacacgagggtgtcctgagctgcattgcactcaacctgcagggaacaagaattgcaactgcatccgagaaagggacgcttataagaatatttgatacttcatcagggcatttaatccaggaactgcgaagaggatctcaagcagccaatatttactgcatcaacttcaatcaggatgcgtccctcatctgcgtatccagcgaccacggcacagtgcatatttttgcagctgaagatccaaaaaggaataaacagtccagtttggcctcagccagtttccttccaaaatacttcagttccaagtggagtttctccaagtttcaggttccctcaggctctccgtgcatttgtgcctttggaacagagccaaacgccgtcattgcaatttgtgcagacggcagctactacaaattcctgttcaaccccaagggggagtgcatccgagatgtctacgcgcagtttctagagatgaccgatgacaagctgtgactccagctgggggcgccacagcacccaccacctgccgccttcagactctcggggctggtgccagtgccccaggggcctcctgggccacgggctggaggggctgcccagggaccttggtctcgaagccatacgtggttgtctgctttcctaaggactcccatttccagtattaaagagagaatcatcatcaaggcaccgtaggtaactcagtggctgtgaccagctcgactggcggccactggctgttcccatgagttcagctgtgacgttagcttcagtggctccgccgcatcctcacactgacgggggctccatacggacctggggactgggctgagagggtggacgagttcaggtttgtttttgcagcagattccgtcgttcttactgagtctgcagcgggggagtgaacaagtgtgcagatgtaagttcttacatgataagcagattgaatacaacaccagcagcttgccttagaaaaggagaaaggaattccttttcccgcccgaacatgaagaaaaacgacctgaccctgtagagagaacacagtgtgaatgtttcccctcgtgtgagcccagcctgtggtcttctccgtacccgcaacgtggtcatctgtgcccgtgacgtcacctgtgcccgtgcgtggcgtccccgtctccgttggggccattagaatgaggcagacaccaggccactctagaagccgagccgtcacacctcaggcgtgtgcggggcggggacggggggtctcctggttacattttggattaaacctgtttcccggttatgtgtagggaacagcagagtgatgcacgaactttgaacattcgttatggggaaaacatcctttaacttcggggtcgtctgccagagcagggtctgggagggtccatgcagttcccgctggtgtggagggaaatgccctggtctggcctccgagcccccaggtccaccgtctcccctcccctcatttgtaagaatagctacacactaacattttgggaaggagaggcacataactttttttaacatttggtaactaggttatgggctctacattgtcagctacttgggatatatatttaattttcttaaattcccgttaaactctattttatggttttgatttcagattgcaaacatgtaaaacctgcatagcagcgagtcctcggttttgccggtttctttagttctttactgtcactgtcatgtaatcagctaattctctgtggatgttgctgtaaagtatgcatgttcctttcatgtgtatttaatcatgatgtttaattttgcacacttatttgtaatgtttcttttaaataaaagtgactaattttgttgtagtctggacctgtaa

SEQ ID NO: 379568 - DNA, 2735 bp, Homo sapiens
ccctgcctctccccgcctttcctcgcctcgcctcgcctcgccccgccccgcccctccccgccctgcctcgcctcgtctcgcctcgcttcggttagatgcgctcggcgctccataggctccctggtggggcgcgggcgcgcgcacggacgtccagcacgcacgcacgcacgtccagcacacacgcacatccagcacgcacgcacgtacgtccggcacttccggccgcggcggcctcagcgccggcccgaagggaccaggccgccgtccccagcgagaggcatgcagcgctgaggagcggcgacccagcacggcggcgccatgaacctcctgccgtgtaaccctcacggcaacgggctgctctacgccggcttcaaccaggaccacggatgctttgcgtgtgggatggaaaatggattccgagtctataacactgatccactaaaagaaaaagagaaacaagaatttctagaaggaggagttggccatgttgaaatgttatttcgctgcaactatttagctttagttggtggtggaaaaaagccgaaataccctcccaacaaagtaatgatctgggatgacctgaagaagaagactgttattgaaatagaattttctacagaagtcaaggcagtcaagctgcggcgagatagaattgtggtggttttggactccatgattaaggtgttcacattcacacacaatccccatcagttgcacgtcttcgaaacctgctataaccccaaaggcctctgtgtcctttgtcccaatagtaacaactccctcctggcctttccgggcacgcacacgggccatgtgcagcttgtggacctggccagcacggagaagccacccgtggacattcctgcacacgagggtgtcctgagctgcattgcactcaacctgcagggaacaagaattgcaactgcatccgagaaagggacgcttataagaatatttgatacttcatcagggcatttaatccaggaactgcgaagaggatctcaagcagccaatatttactgcatcaacttcaatcaggatgcgtccctcatctgcgtatccagcgaccacggcacagtgcatatttttgcagctgaagatccaaaaaggaataaacagtccagtttggcctcagccagtttccttccaaaatacttcagttccaagtggagtttctccaagtttcaggttccctcaggctctccgtgcatttgtgcctttggaacagagccaaacgccgtcattgcaatttgtgcagacggcagctactacaaattcctgttcaaccccaagggggagtgcatccgagatgtctacgcgcagtttctagagatgaccgatgacaagctgtgactccagctgggggcgccacagcacccaccacctgccgccttcagactctcggggctggtgccagtgccccaggggcctcctgggccacgggctggaggggctgcccagggaccttggtctcgaagccatacgtggttgtctgctttcctaaggactcccatttccagtattaaagagagaatcatcatcaaggcaccgtaggtaactcagtggctgtgaccagctcgactggcggccactggctgttcccatgagttcagctgtgacgttagcttcagtggctccgccgcatcctcacactgacgggggctccatacggacctggggactgggctgagagggtggacgagttcaggtttgtttttgcagcagattccgtcgttcttactgagtctgcagcgggggagtgaacaagtgtgcagatgtaagttcttacatgataagcagattgaatacaacaccagcagcttgccttagaaaaggagaaaggaattccttttcccgcccgaacatgaagaaaaacgacctgaccctgtagagagaacacagtgtgaatgtttcccctcgtgtgagcccagcctgtggtcttctccgtacccgcaacgtggtcatctgtgcccgtgacgtcacctgtgcccgtgcgtggcgtccccgtctccgttggggccattagaatgaggcagacaccaggccactctagaagccgagccgtcacacctcaggcgtgtgcggggcggggacggggggtctcctggttacattttggattaaacctgtttcccggttatgtgtagggaacagcagagtgatgcacgaactttgaacattcgttatggggaaaacatcctttaacttcggggtcgtctgccagagcagggtctgggagggtccatgcagttcccgctggtgtggagggaaatgccctggtctggcctccgagcccccaggtccaccgtctcccctcccctcatttgtaagaatagctacacactaacattttgggaaggagaggcacataactttttttaacatttggtaactaggttatgggctctacattgtcagctacttgggatatatatttaattttcttaaattcccgttaaactctattttatggttttgatttcagattgcaaacatgtaaaacctgcatagcagcgagtcctcggttttgccggtttctttagttctttactgtcactgtcatgtaatcagctaattctctgtggatgttgctgtaaagtatgcatgttcctttcatgtgtatttaatcatgatgtttaattttgcacacttatttgtaatgtttcttttaaataaaagtgactaattttgttgtagtctggacctgtaaaaaaaacacaaaccaatacatggcg

SEQ ID NO: 379569 - DNA, 2656 bp, Homo sapiens
ccctgcctctccccgcctttcctcgcctcgcctcgcctcgccccgccccgcccctccccgccctgcctcgcctcgtctcgcctcgcttcggttagatgcgctcggcgctccataggctccctggtggggcgcgggcgcgcgcacggacgtccagcacgcacgcacgcacgtccagcacacacgcacatccagcacgcacgcacgtacgtccggcacttccggccgcggcggcctcagcgccggcccgaagggaccaggccgccgtccccagcgagaggcatgcagcgctgaggagcggcgacccagcacggcggcgccatgaacctcctgccgtgtaaccctcacggcaacgggctgctctacgccggcttcaaccaggaccacggatgctttgcgtgtgggatggaaaatggattccgagtctataacactgatccactaaaagaaaaagagaaacaagaatttctagaaggaggagttggccatgttgaaatgttatttcgctgcaactatttagctttagttggtggtggaaaaaagccgaaataccctcccaacaaagtaatgatctgggatgacctgaagaagaagactgttattgaaatagaattttctacagaagtcaaggcagtcaagctgcggcgagatagaattgtggtggttttggactccatgattaaggtgttcacattcacacacaatccccatcagttgcacgtcttcgaaacctgctataaccccaaaggcctctgtgtcctttgtcccaatagtaacaactccctcctggcctttccgggcacgcacacgggccatgtgcagcttgtggacctggccagcacggagaagccacccgtggacattcctgcacacgagggtgtcctgagctgcattgcactcaacctgcagggaacaagaattgcaactgcatccgagaaagggacgcttataagaatatttgatacttcatcagggcatttaatccaggaactgcgaagaggatctcaagcagccaatatttactgcatcaacttcaatcaggatgcgtccctcatctgcgtatccagcgaccacggcacagtgcatatttttgcagctgaagatccaaaaaggaataaacagtccagtttggcctcagccagtttccttccaaaatacttcagttccaagtggagtttctccaagtttcaggttccctcaggctctccgtgcatttgtgcctttggaacagagccaaacgccgtcattgcaatttgtgcagacggcagctactacaaattcctgttcaaccccaagggggagtgcatccgagatgtctacgcgcagtttctagagatgaccgatgacaagctgtgactccagctgggggcgccacagcacccaccacctgccgccttcagactctcggggctggtgccagtgccccaggggcctcctgggccacgggctggaggggctgcccagggaccttggtctcgaagccatacgtggttgtctgctttcctaaggactcccatttccagtattaaagagagaatcatcatcaaggcaccgtaggtaactcagtggctgtgaccagctcgactggcggccactggctgttcccatgagttcagctgtgacgttagcttcagtggctccgccgcatcctcacactgacgggggctccatacggacctggggactgggctgagagggtggacgagttcaggtttgtttttgcagcagattccgtcgttcttactgagtctgcagcgggggagtgaacaagtgtgcagatgtaagttcttacatgataagcagattgaatacaacaccagcagcttgccttagaaaaggagaaaggaattccttttcccgcccgaacatgaagaacccagcctgtggtcttctccgtacccgcaacgtggtcatctgtgcccgtgacgtcacctgtgcccgtgcgtggcgtccccgtctccgttggggccattagaatgaggcagacaccaggccactctagaagccgagccgtcacacctcaggcgtgtgcggggcggggacggggggtctcctggttacattttggattaaacctgtttcccggttatgtgtagggaacagcagagtgatgcacgaactttgaacattcgttatggggaaaacatcctttaacttcggggtcgtctgccagagcagggtctgggagggtccatgcagttcccgctggtgtggagggaaatgccctggtctggcctccgagcccccaggtccaccgtctcccctcccctcatttgtaagaatagctacacactaacattttgggaaggagaggcacataactttttttaacatttggtaactaggttatgggctctacattgtcagctacttgggatatatatttaattttcttaaattcccgttaaactctattttatggttttgatttcagattgcaaacatgtaaaacctgcatagcagcgagtcctcggttttgccggtttctttagttctttactgtcactgtcatgtaatcagctaattctctgtggatgttgctgtaaagtatgcatgttcctttcatgtgtatttaatcatgatgtttaattttgcacacttatttgtaatgtttcttttaaataaaagtgactaattttgttgtagtctggacctgtaa

SEQ ID NO: 379570 - DNA, 2207 bp, Homo sapiens
gcctcacctttttgatggccggattcccgtgctgcttttcctagctatctgagggacttaggattcggacagtgcttctcagatgagctccctgtgtagcaggagcagggagcctgggcctgggtgttcctcctgggtctcagccagggatgcgggcatccagggtcagtccaccctgcccggtcaggaggttgtctctggaagcctctcttgacttgtgcccagtgccgtgggaccaggagccaccaaccaactcgttctcaggggcacaactgtgtgctggcagttggaggagaaagttaagtagtagatgatgtgggtgagtttgagaaaggcttgtgtggactaatggatttgtgaatgtgagtcatttcaaaaactaacgaaaaagttttgaatctttgataatgaaacacttcactgtttttcaaaggggacgcttataagaatatttgatacttcatcagggcatttaatccaggaactgcgaagaggatctcaagcagccaatatttactgcatcaacttcaatcaggatgcgtccctcatctgcgtatccagcgaccacggcacagtgcatatttttgcagctgaagatccaaaaaggaataaacagtccagtttggcctcagccagtttccttccaaaatacttcagttccaagtggagtttctccaagtttcaggttccctcaggctctccgtgcatttgtgcctttggaacagagccaaacgccgtcattgcaatttgtgcagacggcagctactacaaattcctgttcaaccccaagggggagtgcatccgagatgtctacgcgcagtttctagagatgaccgatgacaagctgtgactccagctgggggcgccacagcacccaccacctgccgccttcagactctcggggctggtgccagtgccccaggggcctcctgggccacgggctggaggggctgcccagggaccttggtctcgaagccatacgtggttgtctgctttcctaaggactcccatttccagtattaaagagagaatcatcatcaaggcaccgtaggtaactcagtggctgtgaccagctcgactggcggccactggctgttcccatgagttcagctgtgacgttagcttcagtggctccgccgcatcctcacactgacgggggctccatacggacctggggactgggctgagagggtggacgagttcaggtttgtttttgcagcagattccgtcgttcttactgagtctgcagcgggggagtgaacaagtgtgcagatgtaagttcttacatgataagcagattgaatacaacaccagcagcttgccttagaaaaggagaaaggaattccttttcccgcccgaacatgaagaaaaacgacctgaccctgtagagagaacacagtgtgaatgtttcccctcgtgtgagcccagcctgtggtcttctccgtacccgcaacgtggtcatctgtgcccgtgacgtcacctgtgcccgtgcgtggcgtccccgtctccgttggggccattagaatgaggcagacaccaggccactctagaagccgagccgtcacacctcaggcgtgtgcggggcggggacggggggtctcctggttacattttggattaaacctgtttcccggttatgtgtagggaacagcagagtgatgcacgaactttgaacattcgttatggggaaaacatcctttaacttcggggtcgtctgccagagcagggtctgggagggtccatgcagttcccgctggtgtggagggaaatgccctggtctggcctccgagcccccaggtccaccgtctcccctcccctcatttgtaagaatagctacacactaacattttgggaaggagaggcacataactttttttaacatttggtaactaggttatgggctctacattgtcagctacttgggatatatatttaattttcttaaattcccgttaaactctattttatggttttgatttcagattgcaaacatgtaaaacctgcatagcagcgagtcctcggttttgccggtttctttagttctttactgtcactgtcatgtaatcagctaattctctgtggatgttgctgtaaagtatgcatgttcctttcatgtgtatttaatcatgatgtttaattttgcacacttatttgtaatgtttcttttaaataaaagtgactaattttgttgtagtctggacctgtaa

SEQ ID NO: 379571 - DNA, 2740 bp, Homo sapiens
  misc_feature (2716)..(2716): n is a, c, g, or t
ccctgcctctccccgcctttcctcgcctcgcctcgcctcgccccgccccgcccctccccgccctgcctcgcctcgtctcgcctcgcttcggttagatgcgctcggcgctccataggctccctggtggggcgcgggcgcgcgcacggacgtccagcacgcacgcacgcacgtccagcacacacgcacatccagcacgcacgcacgtacgtccggcacttccggccgcggcggcctcagcgccggcccgaagggaccaggccgccgtccccagcgagaggcatgcagcgctgaggagcggcgacccagcacggcggcgccatgaacctcctgccgtgtaaccctcacggcaacgggctgctctacgccggcttcaaccaggaccacggatgctttgcgtgtgggatggaaaatggattccgagtctataacactgatccactaaaagaaaaagagaaacaagaatttctagaaggaggagttggccatgttgaaatgttatttcgctgcaactatttagctttagttggtggtggaaaaaagccgaaataccctcccaacaaagtaatgatctgggatgacctgaagaagaagactgttattgaaatagaattttctacagaagtcaaggcagtcaagctgcggcgagatagaattgtggtggttttggactccatgattaaggtgttcacattcacacacaatccccatcagttgcacgtcttcgaaacctgctataaccccaaaggcctctgtgtcctttgtcccaatagtaacaactccctcctggcctttccgggcacgcacacgggccatgtgcagcttgtggacctggccagcacggagaagccacccgtggacattcctgcacacgagggtgtcctgagctgcattgcactcaacctgcagggaacaagaattgcaactgcatccgagaaagggacgcttataagaatatttgatacttcatcagggcatttaatccaggaactgcgaagaggatctcaagcagccaatatttactgcatcaacttcaatcaggatgcgtccctcatctgcgtatccagcgaccacggcacagtgcatatttttgcagctgaagatccaaaaaggaataaacagtccagtttggcctcagccagtttccttccaaaatacttcagttccaagtggagtttctccaagtttcaggttccctcaggctctccgtgcatttgtgcctttggaacagagccaaacgccgtcattgcaatttgtgcagacggcagctactacaaattcctgttcaaccccaagggggagtgcatccgagatgtctacgcgcagtttctagagatgaccgatgacaagctgtgactccagctgggggcgccacagcacccaccacctgccgccttcagactctcggggctggtgccagtgccccaggggcctcctgggccacgggctggaggggctgcccagggaccttggtctcgaagccatacgtggttgtctgctttcctaaggactcccatttccagtattaaagagagaatcatcatcaaggcaccgtaggtaactcagtggctgtgaccagctcgactggcggccactggctgttcccatgagttcagctgtgacgttagcttcagtggctccgccgcatcctcacactgacgggggctccatacggacctggggactgggctgagagggtggacgagttcaggtttgtttttgcagcagattccgtcgttcttactgagtctgcagcgggggagtgaacaagtgtgcagatgtaagttcttacatgataagcagattgaatacaacaccagcagcttgccttagaaaaggagaaaggaattccttttcccgcccgaacatgaagaaaaacgacctgaccctgtagagagaacacagtgtgaatgtttcccctcgtgtgagcccagcctgtggtcttctccgtacccgcaacgtggtcatctgtgcccgtgacgtcacctgtgcccgtgcgtggcgtccccgtctccgttggggccattagaatgaggcagacaccaggccactctagaagccgagccgtcacacctcaggcgtgtgcggggcggggacggggggtctcctggttacattttggattaaacctgtttcccggttatgtgtagggaacagcagagtgatgcacgaactttgaacattcgttatggggaaaacatcctttaacttcggggtcgtctgccagagcagggtctgggagggtccatgcagttcccgctggtgtggagggaaatgccctggtctggcctccgagcccccaggtccaccgtctcccctcccctcatttgtaagaatagctacacactaacattttgggaaggagaggcacataactttttttaacatttggtaactaggttatgggctctacattgtcagctacttgggatatatatttaattttcttaaattcccgttaaactctattttatggttttgatttcagattgcaaacatgtaaaacctgcatagcagcgagtcctcggttttgccggtttctttagttctttactgtcactgtcatgtaatcagctaattctctgtggatgttgctgtaaagtatgcatgttcctttcatgtgtatttaatcatgatgtttaattttgcacacttatttgtaatgtttcttttaaataaaagtgactaattttgttgtagtctggacctgtaaccacancacaaaaaaaaactctccagcgct

SEQ ID NO: 379572 - DNA, 2456 bp, Homo sapiens
ccctgcctctccccgcctttcctcgcctcgcctcgcctcgccccgccccgcccctccccgccctgcctcgcctcgtctcgcctcgcttcggttagatgcgctcggcgctccataggctccctggtggggcgcgggcgcgcgcacggacgtccagcacgcacgcacgcacgtccagcacacacgcacatccagcacgcacgcacgtacgtccggcacttccggccgcggcggcctcagcgccggcccgaagggaccaggccgccgtccccagcgagaggcatgcagcgctgaggagcggcgacccagcacggcggcgccatgaacctcctgccgtgtaaccctcacggcaacgggctgctctacgccggcttcaaccaggaccacggatgctttgcgtgtgggatggaaaatggattccgagtctataacactgatccactaaaagaaaaagagaaacaagaatttctagaaggaggagttggccatgttgaaatgttatttcgctgcaactatttagctttagttggtggtggaaaaaagccgaaataccctcccaacaaagtaatgatctgggatgacctgaagaagaagactgttattgaaatagaattttctacagaagtcaaggcagtcaagctgcggcgagatagaattgtggtggttttggactccatgattaaggtgttcacattcacacacaatccccatcagttgcacgtcttcgaaacctgctataaccccaaaggcctctgtgtcctttgtcccaatagtaacaactccctcctggcctttccgggcacgcacacgggccatgtgcagcttgtggacctggccagcacggagaagccacccgtggacattcctgcacacgagggtgtcctgagctgcattgcactcaacctgcagggaacaagaattgcaactgcatccgagaaagggacgcttataagaatatttgatacttcatcagggcatttaatccaggaactgcgaagaggatctcaagcagccaatatttactgcatcaacttcaatcaggatgcgtccctcatctgcgtatccagcgaccacggcacagtgcatatttttgcagctgaagatccaaaaaggaataaacagtccagtttggcctcagccagtttccttccaaaatacttcagttccaagtggagtttctccaagtttcaggttccctcaggctctccgtgcatttgtgcctttggaacagagccaaacgccgtcattgcaatttgtgcagacggcagctactacaaattcctgttcaaccccaagggggagtgcatccgagatgtctacgcgcagtttctagagatgaccgatgacaagctgtgactccagctgggggcgccacagcacccaccacctgccgccttcagactctcggggctggtgccagtgccccaggggcctcctgggccacgggctggaggggctgcccagggaccttggtctcgaagccatacgtggttgtctgctttcctaaggactcccatttccagtattaaagagagaatcatcatcaaggcaccgtaggtaactcagtggctgtgaccagctcgactggcggccactggctgttcccatgagttcagctgtgacgttagcttcagtggctccgccgcatcctcacactgacgggggctccatacggacctggggactgggctgagagggtggacgagttcaggtttgtttttgcagcagattccgtcgttcttactgagtctgcagcgggggagtgaacaagtgtgcagatgtaagttcttacatgataagcagattgaatacaacaccagcagcttgccttagaaaaggagaaaggaattccttttcccgcccgaacatgaagaaaaacgacctgaccctgtagagagaacagcagagtgatgcacgaactttgaacattcgttatggggaaaacatcctttaacttcggggtcgtctgccagagcagggtctgggagggtccatgcagttcccgctggtgtggagggaaatgccctggtctggcctccgagcccccaggtccaccgtctcccctcccctcatttgtaagaatagctacacactaacattttgggaaggagaggcacataactttttttaacatttggtaactaggttatgggctctacattgtcagctacttgggatatatatttaattttcttaaattcccgttaaactctattttatggttttgatttcagattgcaaacatgtaaaacctgcatagcagcgagtcctcggttttgccggtttctttagttctttactgtcactgtcatgtaatcagctaattctctgtggatgttgctgtaaagtatgcatgttcctttcatgtgtatttaatcatgatgtttaattttgcacacttatttgtaatgtttcttttaaataaaagtgactaattttgttgtagtctggacctgtaa

SEQ ID NO: 379573 - DNA, 2219 bp, Homo sapiens
ccctgcctctccccgcctttcctcgcctcgcctcgcctcgccccgccccgcccctccccgccctgcctcgcctcgtctcgcctcgcttcggttagatgcgctcggcgctccataggctccctggtggggcgcgggcgcgcgcacggacgtccagcacgcacgcacgcacgtccagcacacacgcacatccagcacgcacgcacgtacgtccggcacttccggccgcggcggcctcagcgccggcccgaagggaccaggccgccgtccccagcgagaggcatgcagcgctgaggagcggcgacccagcacggcggcgccatgaacctcctgccgtgtaaccctcacggcaacgggctgctctacgccggcttcaaccaggaccacggatgctttgcgtgtgggatggaaaatggattccgagtctataacactgatccactaaaagaaaaagagaaacaagaatttctagaaggaggagttggccatgttgaaatgttatttcgctgcaactatttagctttagttggtggtggaaaaaagccgaaataccctcccaacaaagtaatgatctgggatgacctgaagaagaagactgttattgaaatagaattttctacagaagtcaaggcagtcaagctgcggcgagatagaattgtggtggttttggactccatgattaaggtgttcacattcacacacaatccccatcagttgcacgtcttcgaaacctgctataaccccaaaggcctctgtgtcctttgtcccaatagtaacaactccctcctggcctttccgggcacgcacacgggccatgtgcagcttgtggacctggccagcacggagaagccacccgtggacattcctgcacacgagggtgtcctgagctgcattgcactcaacctgcagggaacaagaattgcaactgcatccgagaaagggacgcttataagaatatttgatacttcatcagggaccttggtctcgaagccatacgtggttgtctgctttcctaaggactcccatttccagtattaaagagagaatcatcatcaaggcaccgtaggtaactcagtggctgtgaccagctcgactggcggccactggctgttcccatgagttcagctgtgacgttagcttcagtggctccgccgcatcctcacactgacgggggctccatacggacctggggactgggctgagagggtggacgagttcaggtttgtttttgcagcagattccgtcgttcttactgagtctgcagcgggggagtgaacaagtgtgcagatgtaagttcttacatgataagcagattgaatacaacaccagcagcttgccttagaaaaggagaaaggaattccttttcccgcccgaacatgaagaaaaacgacctgaccctgtagagagaacacagtgtgaatgtttcccctcgtgtgagcccagcctgtggtcttctccgtacccgcaacgtggtcatctgtgcccgtgacgtcacctgtgcccgtgcgtggcgtccccgtctccgttggggccattagaatgaggcagacaccaggccactctagaagccgagccgtcacacctcaggcgtgtgcggggcggggacggggggtctcctggttacattttggattaaacctgtttcccggttatgtgtagggaacagcagagtgatgcacgaactttgaacattcgttatggggaaaacatcctttaacttcggggtcgtctgccagagcagggtctgggagggtccatgcagttcccgctggtgtggagggaaatgccctggtctggcctccgagcccccaggtccaccgtctcccctcccctcatttgtaagaatagctacacactaacattttgggaaggagaggcacataactttttttaacatttggtaactaggttatgggctctacattgtcagctacttgggatatatatttaattttcttaaattcccgttaaactctattttatggttttgatttcagattgcaaacatgtaaaacctgcatagcagcgagtcctcggttttgccggtttctttagttctttactgtcactgtcatgtaatcagctaattctctgtggatgttgctgtaaagtatgcatgttcctttcatgtgtatttaatcatgatgtttaattttgcacacttatttgtaatgtttcttttaaataaaagtgactaattttgttgtagtctggacctgtaa

SEQ ID NO: 379574 - DNA, 2381 bp, Homo sapiens
gggcgtggtggcgtgtgcctgtaatcccagctactaggcagggctgaggcaggaggatcgcttgaacctgggaggtggaggttgcagtgagccaaggtcgtgctactgcgctctagcctgggcaagagagcgagactctgtctcaaaaaaaaaaaaaagaaagaaaatgtaattaatttataaatacggcagctttatctgtgaggtcctgggccttgtggtgtgcatagcacatccctgtctgctcctagaacagacagcacacggccaatgcctgccccagcccagctgacctccataggggcagcctgcaccttcctgaggccaggatcattggagagaatgtgtgtttctcacccgagtcttgtgagagcagccctgagcggcatgttgggggtgtggtctgcaagaagtcccttccctctcccagacacacagctcatcagctgcatttgtggggcacccaaggaaaacttgccgtgatacactggattgtggctgtggctttgtggcttcaacctgtggtgctgtggggatggttgtcggcttgttaaagaaagggcagtattcagaattggcacctccagagtgggaatgttgaggtgttccacagtgtcgacaagtgctgtgggttaagtctctggactcctccacatccacacaaggcctgagctgtgctggttttctctgcagcatcaacttcaatcaggatgcgtccctcatctgcgtatccagcgaccacggcacagtgcatatttttgcagctgaagatccaaaaaggaataaacagtccagtttggcctcagccagtttccttccaaaatacttcagttccaagtggagtttctccaagtttcaggttccctcaggctctccgtgcatttgtgcctttggaacagagccaaacgccgtcattgcaatttgtgcagacggcagctactacaaattcctgttcaaccccaagggggagtgcatccgagatgtctacgcgcagtttctagagatgaccgatgacaagctgtgactccagctgggggcgccacagcacccaccacctgccgccttcagactctcggggctggtgccagtgccccaggggcctcctgggccacgggctggaggggctgcccagggaccttggtctcgaagccatacgtggttgtctgctttcctaaggactcccatttccagtattaaagagagaatcatcatcaaggcaccgtaggtaactcagtggctgtgaccagctcgactggcggccactggctgttcccatgagttcagctgtgacgttagcttcagtggctccgccgcatcctcacactgacgggggctccatacggacctggggactgggctgagagggtggacgagttcaggtttgtttttgcagcagattccgtcgttcttactgagtctgcagcgggggagtgaacaagtgtgcagatgtaagttcttacatgataagcagattgaatacaacaccagcagcttgccttagaaaaggagaaaggaattccttttcccgcccgaacatgaagaaaaacgacctgaccctgtagagagaacacagtgtgaatgtttcccctcgtgtgagcccagcctgtggtcttctccgtacccgcaacgtggtcatctgtgcccgtgacgtcacctgtgcccgtgcgtggcgtccccgtctccgttggggccattagaatgaggcagacaccaggccactctagaagccgagccgtcacacctcaggcgtgtgcggggcggggacggggggtctcctggttacattttggattaaacctgtttcccggttatgtgtagggaacagcagagtgatgcacgaactttgaacattcgttatggggaaaacatcctttaacttcggggtcgtctgccagagcagggtctgggagggtccatgcagttcccgctggtgtggagggaaatgccctggtctggcctccgagcccccaggtccaccgtctcccctcccctcatttgtaagaatagctacacactaacattttgggaaggagaggcacataactttttttaacatttggtaactaggttatgggctctacattgtcagctacttgggatatatatttaattttcttaaattcccgttaaactctattttatggttttgatttcagattgcaaacatgtaaaacctgcatagcagcgagtcctcggttttgccggtttctttagttctttactgtcactgtcatgtaatcagctaattctctgtggatgttgctgtaaagtatgcatgttcctttcatgtgtatttaatcatgatgtttaattttgcacacttatttgtaatgtttcttttaaataaaagtgactaattttgttgtagtctggacctgtaa

SEQ ID NO: 379575 - DNA, 1081 bp, Homo sapiens
tagtcgtcagaggatcccggtgtggcaggggggctccatacggacctggggactgggctgagagggtggacgagttcaggtttgtttttgcagcagattccgtcgttcttactgagtctgcagcgggggagtgaacaagtgtgcagatgtaagttcttacatgataagcagattgaatacaacaccagcagcttgccttagaaaaggagaaaggaattccttttcccgcccgaacatgaagaaaaacgacctgaccctgtagagagaacacagtgtgaatgtttcccctcgtgtgagcccagcctgtggtcttctccgtacccgcaacgtggtcatctgtgcccgtgacgtcacctgtgcccgtgcgtggcgtccccgtctccgttggggccattagaatgaggcagacaccaggccactctagaagccgagccgtcacacctcaggcgtgtgcggggcggggacggggggtctcctggttacattttggattaaacctgtttcccggttatgtgtagggaacagcagagtgatgcacgaactttgaacattcgttatggggaaaacatcctttaacttcggggtcgtctgccagagcagggtctgggagggtccatgcagttcccgctggtgtggagggaaatgccctggtctggcctccgagcccccaggtccaccgtctcccctcccctcatttgtaagaatagctacacactaacattttgggaaggagaggcacataactttttttaacatttggtaactaggttatgggctctacattgtcagctacttgggatatatatttaattttcttaaattcccgttaaactctattttatggttttgatttcagattgcaaacatgtaaaacctgcatagcagcgagtcctcggttttgccggtttctttagttctttactgtcactgtcatgtaatcagctaattctctgtggatgttgctgtaaagtatgcatgttcctttcatgtgtatttaatcatgatgtttaattttgcacacttatttgtaatgtttcttttaaataaaagtgactaattttgttgtagtctggacctgtaa

SEQ ID NO: 379576 - DNA, 1174 bp, Homo sapiens
  misc_feature (1062)..(1062): n is a, c, g, or t
  misc_feature (1065)..(1065): n is a, c, g, or t
  misc_feature (1071)..(1072): n is a, c, g, or t
  misc_feature (1074)..(1074): n is a, c, g, or t
ccctgcctctccccgcctttcctcgcctcgcctcgcctcgccccgccccgcccctccccgccctgcctcgcctcgtctcgcctcgcttcggttagatgcgctcggcgctccataggctccctggtggggcgcgggcgcgcgcacggacgtccagcacgcacgcacgcacgtccagcacacacgcacatccagcacgcacgcacgtacgtccggcacttccggccgcggcggcctcagcgccggcccgaagggaccaggccgccgtccccagcgagaggcatgcagcgctgaggagcggcgacccagcacggcggcgccatgaacctcctgccgtgtaaccctcacggcaacgggctgctctacgccggcttcaaccaggaccacggatgctttgcgtgtgggatggaaaatggattccgagtctataacactgatccactaaaagaaaaagagaaacaagaatttctagaaggaggagttggccatgttgaaatgttatttcgctgcaactatttagctttagttggtggtggaaaaaagccgaaataccctcccaacaaagtaatgatctgggatgacctgaagaagaagactgttattgaaatagaattttctacagaagtcaaggcagtcaagctgcggcgagatagaattgtggtggttttggactccatgattaaggtgttcacattcacacacaatccccatcagttgcacgtcttcgaaacctgctataaccccaaaggcctctgtgtcctttgtcccaatagtaacaactccctcctggcctttccgggcacgcacacgggccatgtgcagcttgtggacctggccagcacggagaagccacccgtggacattcctgcacacgagggtgtcctgagctgcattgcactcaacctgcagggaacaagaattgcaactgcatccgagaaagggacgcttataagaatatttgatacttcatcagggcatttaatccaggaactgcgaagaggatctcaagcagccaatatttactggcattcaactttcaatcagggatggcgttcctcaatctgngtnatccanngnaccagggacagggcatattttggcacgccgcagatcccaaaaggcattaacccggccagttggcgcccagccgggttccttccaaattctctcaggtcca

SEQ ID NO: 379577 - DNA, 971 bp, Homo sapiens
  misc_feature (859)..(859): n is a, c, g, or t
  misc_feature (862)..(862): n is a, c, g, or t
  misc_feature (868)..(869): n is a, c, g, or t
  misc_feature (871)..(871): n is a, c, g, or t
taactgctaggtacgaggctgggtgttaggggagcgccggcccgaagggaccaggccgccgtccccagcgagaggcatgcagcgctgaggagcggcgacccagcacggcggcgccatgaacctcctgccgtgtaaccctcacggcaacgggctgctctacgccggcttcaaccaggaccacggatgctttgcgtgtgggatggaaaatggattccgagtctataacactgatccactaaaagaaaaagagaaacaagaatttctagaaggaggagttggccatgttgaaatgttatttcgctgcaactatttagctttagttggtggtggaaaaaagccgaaataccctcccaacaaagtaatgatctgggatgacctgaagaagaagactgttattgaaatagaattttctacagaagtcaaggcagtcaagctgcggcgagatagaattgtggtggttttggactccatgattaaggtgttcacattcacacacaatccccatcagttgcacgtcttcgaaacctgctataaccccaaaggcctctgtgtcctttgtcccaatagtaacaactccctcctggcctttccgggcacgcacacgggccatgtgcagcttgtggacctggccagcacggagaagccacccgtggacattcctgcacacgagggtgtcctgagctgcattgcactcaacctgcagggaacaagaattgcaactgcatccgagaaagggacgcttataagaatatttgatacttcatcagggcatttaatccaggaactgcgaagaggatctcaagcagccaatatttactggcattcaactttcaatcagggatggcgttcctcaatctgngtnatccanngnaccagggacagggcatattttggcacgccgcagatcccaaaaggcattaacccggccagttggcgcccagccgggttccttccaaattctctcaggtcca

SEQ ID NO: 379578 - DNA, 2527 bp, Homo sapiens
  misc_feature (1)..(1): n is a, c, g, or t
nccgccccccgccactcgcgaagaacacgtcctggcgcttacagggcagcagagcgccggcccgaagggaccaggccgccgtccccagcgagaggcatgcagcgctgaggagcggcgacccagcacggcggcgccatgaacctcctgccgtgtaaccctcacggcaacgggctgctctacgccggcttcaaccaggaccacggatgctttgcgtgtgggatggaaaatggattccgagtctataacactgatccactaaaagaaaaagagaaacaagaatttctagaaggaggagttggccatgttgaaatgttatttcgctgcaactatttagctttagttggtggtggaaaaaagccgaaataccctcccaacaaagtaatgatctgggatgacctgaagaagaagactgttattgaaatagaattttctacagaagtcaaggcagtcaagctgcggcgagatagaattgtggtggttttggactccatgattaaggtgttcacattcacacacaatccccatcagttgcacgtcttcgaaacctgctataaccccaaaggcctctgtgtcctttgtcccaatagtaacaactccctcctggcctttccgggcacgcacacgggccatgtgcagcttgtggacctggccagcacggagaagccacccgtggacattcctgcacacgagggtgtcctgagctgcattgcactcaacctgcagggaacaagaattgcaactgcatccgagaaagggacgcttataagaatatttgatacttcatcagggcatttaatccaggaactgcgaagaggatctcaagcagccaatatttactgcatcaacttcaatcaggatgcgtccctcatctgcgtatccagcgaccacggcacagtgcatatttttgcagctgaagatccaaaaaggaataaacagtccagtttggcctcagccagtttccttccaaaatacttcagttccaagtggagtttctccaagtttcaggttccctcaggctctccgtgcatttgtgcctttggaacagagccaaacgccgtcattgcaatttgtgcagacggcagctactacaaattcctgttcaaccccaagggggagtgcatccgagatgtctacgcgcagtttctagagatgaccgatgacaagctgtgactccagctgggggcgccacagcacccaccacctgccgccttcagactctcggggctggtgccagtgccccaggggcctcctgggccacgggctggaggggctgcccagggaccttggtctcgaagccatacgtggttgtctgctttcctaaggactcccatttccagtattaaagagagaatcatcatcaaggcaccgtaggtaactcagtggctgtgaccagctcgactggcggccactggctgttcccatgagttcagctgtgacgttagcttcagtggctccgccgcatcctcacactgacgggggctccatacggacctggggactgggctgagagggtggacgagttcaggtttgtttttgcagcagattccgtcgttcttactgagtctgcagcgggggagtgaacaagtgtgcagatgtaagttcttacatgataagcagattgaatacaacaccagcagcttgccttagaaaaggagaaaggaattccttttcccgcccgaacatgaagaaaaacgacctgaccctgtagagagaacacagtgtgaatgtttcccctcgtgtgagcccagcctgtggtcttctccgtacccgcaacgtggtcatctgtgcccgtgacgtcacctgtgcccgtgcgtggcgtccccgtctccgttggggccattagaatgaggcagacaccaggccactctagaagccgagccgtcacacctcaggcgtgtgcggggcggggacggggggtctcctggttacattttggattaaacctgtttcccggttatgtgtagggaacagcagagtgatgcacgaactttgaacattcgttatggggaaaacatcctttaacttcggggtcgtctgccagagcagggtctgggagggtccatgcagttcccgctggtgtggagggaaatgccctggtctggcctccgagcccccaggtccaccgtctcccctcccctcatttgtaagaatagctacacactaacattttgggaaggagaggcacataactttttttaacatttggtaactaggttatgggctctacattgtcagctacttgggatatatatttaattttcttaaattcccgttaaactctattttatggttttgatttcagattgcaaacatgtaaaacctgcatagcagcgagtcctcggttttgccggtttctttagttctttactgtcactgtcatgtaatcagctaattctctgtggatgttgctgtaaagtatgcatgttcctttcatgtgtatttaatcatgatgtttaattttgcacacttatttgtaatgtttcttttaaataaaagtgactaattttgttgtagtctggacctgtaa

SEQ ID NO: 379579 - DNA, 2676 bp, Homo sapiens
ccctgcctctccccgcctttcctcgcctcgcctcgcctcgccccgccccgcccctccccgccctgcctcgcctcgtctcgcctcgcttcggttagatgcgctcggcgctccataggctccctggtggggcgcgggcgcgcgcacggacgtccagcacgcacgcacgcacgtccagcacacacgcacatccagcacgcacgcacgtacgtccggcacttccggccgcggcggcctcagcgccggcccgaagggaccaggccgccgtccccagcgagaggcatgcagcgctgaggagcggcgacccagcacggcggcgccatgaacctcctgccgtgtaaccctcacggcaacgggctgctctacgccggcttcaaccaggaccacggatgctttgcgtgtgggatggaaaatggattccgagtctataacactgatccactaaaagaaaaagagaaacaagaatttctagaaggaggagttggccatgttgaaatgttatttcgctgcaactatttagctttagttggtggtggaaaaaagccgaaataccctcccaacaaagtaatgatctgggatgacctgaagaagaagactgttattgaaatagaattttctacagaagtcaaggcagtcaagctgcggcgagatagaattgtggtggttttggactccatgattaaggtgttcacattcacacacaatccccatcagttgcacgtcttcgaaacctgctataaccccaaaggcctctgtgtcctttgtcccaatagtaacaactccctcctggcctttccgggcacgcacacgggccatgtgcagcttgtggacctggccagcacggagaagccacccgtggacattcctgcacacgagggtgtcctgagctgcattgcactcaacctgcagggaacaagaattgcaactgcatccgagaaaggcatttaatccaggaactgcgaagaggatctcaagcagccaatatttactgcatcaacttcaatcaggatgcgtccctcatctgcgtatccagcgaccacggcacagtgcatatttttgcagctgaagatccaaaaaggaataaacagtccagtttggcctcagccagtttccttccaaaatacttcagttccaagtggagtttctccaagtttcaggttccctcaggctctccgtgcatttgtgcctttggaacagagccaaacgccgtcattgcaatttgtgcagacggcagctactacaaattcctgttcaaccccaagggggagtgcatccgagatgtctacgcgcagtttctagagatgaccgatgacaagctgtgactccagctgggggcgccacagcacccaccacctgccgccttcagactctcggggctggtgccagtgccccaggggcctcctgggccacgggctggaggggctgcccagggaccttggtctcgaagccatacgtggttgtctgctttcctaaggactcccatttccagtattaaagagagaatcatcatcaaggcaccgtaggtaactcagtggctgtgaccagctcgactggcggccactggctgttcccatgagttcagctgtgacgttagcttcagtggctccgccgcatcctcacactgacgggggctccatacggacctggggactgggctgagagggtggacgagttcaggtttgtttttgcagcagattccgtcgttcttactgagtctgcagcgggggagtgaacaagtgtgcagatgtaagttcttacatgataagcagattgaatacaacaccagcagcttgccttagaaaaggagaaaggaattccttttcccgcccgaacatgaagaaaaacgacctgaccctgtagagagaacacagtgtgaatgtttcccctcgtgtgagcccagcctgtggtcttctccgtacccgcaacgtggtcatctgtgcccgtgacgtcacctgtgcccgtgcgtggcgtccccgtctccgttggggccattagaatgaggcagacaccaggccactctagaagccgagccgtcacacctcaggcgtgtgcggggcggggacggggggtctcctggttacattttggattaaacctgtttcccggttatgtgtagggaacagcagagtgatgcacgaactttgaacattcgttatggggaaaacatcctttaacttcggggtcgtctgccagagcagggtctgggagggtccatgcagttcccgctggtgtggagggaaatgccctggtctggcctccgagcccccaggtccaccgtctcccctcccctcatttgtaagaatagctacacactaacattttgggaaggagaggcacataactttttttaacatttggtaactaggttatgggctctacattgtcagctacttgggatatatatttaattttcttaaattcccgttaaactctattttatggttttgatttcagattgcaaacatgtaaaacctgcatagcagcgagtcctcggttttgccggtttctttagttctttactgtcactgtcatgtaatcagctaattctctgtggatgttgctgtaaagtatgcatgttcctttcatgtgtatttaatcatgatgtttaattttgcacacttatttgtaatgtttcttttaaataaaagtgactaattttgttgtagtctggacctgtaa

SEQ ID NO: 379580 - DNA, 2650 bp, Homo sapiens
ccctgcctctccccgcctttcctcgcctcgcctcgcctcgccccgccccgcccctccccgccctgcctcgcctcgtctcgcctcgcttcggttagatgcgctcggcgctccataggctccctggtggggcgcgggcgcgcgcacggacgtccagcacgcacgcacgcacgtccagcacacacgcacatccagcacgcacgcacgtacgtccggcacttccggccgcggcggcctcagcgccggcccgaagggaccaggccgccgtccccagcgagaggcatgcagcgctgaggagcggcgacccagcacggcggcgccatgaacctcctgccgtgtaaccctcacggcaacgggctgctctacgccggcttcaaccaggaccacggatgctttgcgtgtgggatggaaaatggattccgagtctataacactgatccactaaaagaaaaagagaaacaagaatttctagaaggaggagttggccatgttgaaatgttatttcgctgcaactatttagctttagttggtggtggaaaaaagccgaaataccctcccaacaaagtaatgatctgggatgacctgaagaagaagactgttattgaaatagaattttctacagaagtcaaggcagtcaagctgcggcgagatagaattgtggtggttttggactccatgattaaggtgttcacattcacacacaatccccatcagttgcacgtcttcgaaacctgctataaccccaaaggcctctgtgtcctttgtcccaatagtaacaactccctcctggcctttccgggcacgcacacgggccatgtgcagcttgtggacctggccagcacggagaagccacccgtggacattcctgcacacgagggtgtcctgagctgcattgcactcaacctgcagggaacaagaattgcaactgcatccgagaaagggacgcttataagaatatttgatacttcatcagggcatttaatccaggaactgcgaagaggatctcaagcagccaatatttactgcatcaacttcaatcaggatgcgtccctcatctgcgtatccagcgaccacggcacagtgcatatttttgcagctgaagatccaaaaaggaataaacagtccagtttggcctcagccagtttccttccaaaatacttcagttccaagtggagtttctccaagtttcaggttccctcaggctctccgtgcatttgtgcctttggaacagagccaaacgccgtcattgcaatttgtgcagacggcagctactacaaattcctgttcaaccccaagggggagtgcatccgagatgtctacgcgcagtttctagagatgaccgatgacaagctgtgactccagctgggggcgccacagcacccaccacctgccgccttcagactctcggggctggtgccagtgccccaggggcctcctgggccacgggctggaggggctgcccagggaccttggtctcgaagccatacgtggttgtctgctttcctaaggactcccatttccagtattaaagagagaatcatcatcaaggcaccgtaggtaactcagtggctgtgaccagctcgactggcggccactggctgttcccatgagttcagctgtgacgttagcttcagtggctccgccgcatcctcacactgacgggggctccatacggacctggggactgggctgagagggtggacgagttcaggtttgtttttgcagcagattccgtcgttcttactgagtctgcagcgggggagtgaacaagtgtgcagatgtaagttcttacatgataagcagattgaatacaacaccagcagcttgccttagaaaaggagaaaggaattccttttcccgcccgaacatgaagaaaaacgacctgaccctgtagagagaacacagtgtgaatgtttcccctcgtgtgagcccagcctgtggtcttctccgtctccgttggggccattagaatgaggcagacaccaggccactctagaagccgagccgtcacacctcaggcgtgtgcggggcggggacggggggtctcctggttacattttggattaaacctgtttcccggttatgtgtagggaacagcagagtgatgcacgaactttgaacattcgttatggggaaaacatcctttaacttcggggtcgtctgccagagcagggtctgggagggtccatgcagttcccgctggtgtggagggaaatgccctggtctggcctccgagcccccaggtccaccgtctcccctcccctcatttgtaagaatagctacacactaacattttgggaaggagaggcacataactttttttaacatttggtaactaggttatgggctctacattgtcagctacttgggatatatatttaattttcttaaattcccgttaaactctattttatggttttgatttcagattgcaaacatgtaaaacctgcatagcagcgagtcctcggttttgccggtttctttagttctttactgtcactgtcatgtaatcagctaattctctgtggatgttgctgtaaagtatgcatgttcctttcatgtgtatttaatcatgatgtttaattttgcacacttatttgtaatgtttcttttaaataaaagtgactaattttgttgtagtctggacctgtaa

SEQ ID NO: 379581 - DNA, 2574 bp, Homo sapiens
ccctgcctctccccgcctttcctcgcctcgcctcgcctcgccccgccccgcccctccccgccctgcctcgcctcgtctcgcctcgcttcggttagatgcgctcggcgctccataggctccctggtggggcgcgggcgcgcgcacggacgtccagcacgcacgcacgcacgtccagcacacacgcacatccagcacgcacgcacgtacgtccggcacttccggccgcggcggcctcagcgccggcccgaagggaccaggccgccgtccccagcgagaggcatgcagcgctgaggagcggcgacccagcacggcggcgccatgaacctcctgccgtgtaaccctcacggcaacgggctgctctacgccggcttcaaccaggaccacggatgctttgcgtgtgggatggaaaatggattccgagtctataacactgatccactaaaagaaaaagagaaacaagtaatgatctgggatgacctgaagaagaagactgttattgaaatagaattttctacagaagtcaaggcagtcaagctgcggcgagatagaattgtggtggttttggactccatgattaaggtgttcacattcacacacaatccccatcagttgcacgtcttcgaaacctgctataaccccaaaggcctctgtgtcctttgtcccaatagtaacaactccctcctggcctttccgggcacgcacacgggccatgtgcagcttgtggacctggccagcacggagaagccacccgtggacattcctgcacacgagggtgtcctgagctgcattgcactcaacctgcagggaacaagaattgcaactgcatccgagaaaggcatttaatccaggaactgcgaagaggatctcaagcagccaatatttactgcatcaacttcaatcaggatgcgtccctcatctgcgtatccagcgaccacggcacagtgcatatttttgcagctgaagatccaaaaaggaataaacagtccagtttggcctcagccagtttccttccaaaatacttcagttccaagtggagtttctccaagtttcaggttccctcaggctctccgtgcatttgtgcctttggaacagagccaaacgccgtcattgcaatttgtgcagacggcagctactacaaattcctgttcaaccccaagggggagtgcatccgagatgtctacgcgcagtttctagagatgaccgatgacaagctgtgactccagctgggggcgccacagcacccaccacctgccgccttcagactctcggggctggtgccagtgccccaggggcctcctgggccacgggctggaggggctgcccagggaccttggtctcgaagccatacgtggttgtctgctttcctaaggactcccatttccagtattaaagagagaatcatcatcaaggcaccgtaggtaactcagtggctgtgaccagctcgactggcggccactggctgttcccatgagttcagctgtgacgttagcttcagtggctccgccgcatcctcacactgacgggggctccatacggacctggggactgggctgagagggtggacgagttcaggtttgtttttgcagcagattccgtcgttcttactgagtctgcagcgggggagtgaacaagtgtgcagatgtaagttcttacatgataagcagattgaatacaacaccagcagcttgccttagaaaaggagaaaggaattccttttcccgcccgaacatgaagaaaaacgacctgaccctgtagagagaacacagtgtgaatgtttcccctcgtgtgagcccagcctgtggtcttctccgtacccgcaacgtggtcatctgtgcccgtgacgtcacctgtgcccgtgcgtggcgtccccgtctccgttggggccattagaatgaggcagacaccaggccactctagaagccgagccgtcacacctcaggcgtgtgcggggcggggacggggggtctcctggttacattttggattaaacctgtttcccggttatgtgtagggaacagcagagtgatgcacgaactttgaacattcgttatggggaaaacatcctttaacttcggggtcgtctgccagagcagggtctgggagggtccatgcagttcccgctggtgtggagggaaatgccctggtctggcctccgagcccccaggtccaccgtctcccctcccctcatttgtaagaatagctacacactaacattttgggaaggagaggcacataactttttttaacatttggtaactaggttatgggctctacattgtcagctacttgggatatatatttaattttcttaaattcccgttaaactctattttatggttttgatttcagattgcaaacatgtaaaacctgcatagcagcgagtcctcggttttgccggtttctttagttctttactgtcactgtcatgtaatcagctaattctctgtggatgttgctgtaaagtatgcatgttcctttcatgtgtatttaatcatgatgtttaattttgcacacttatttgtaatgtttcttttaaataaaagtgactaattttgttgtagtctggacctgtaa

SEQ ID NO: 379582 - DNA, 1918 bp, Homo sapiens
aggctctgttcttcctctgggcacgcacacgggccatgtcactgtgaccacagagcaccggacgacattcctgcacacgagggtgtcctgagctgcattgcactcaacctgcagggaacaagaattgcaactgcatccgagaaagggacgcttataagaatatttgatacttcatcagggcatttaatccaggaactgcgaagaggatctcaagcagccaatatttactgcatcaacttcaatcaggatgcgtccctcatctgcgtatccagcgaccacggcacagtgcatatttttgcagctgaagatccaaaaaggaataaacagtccagtttggcctcagccagtttccttccaaaatacttcagttccaagtggagtttctccaagtttcaggttccctcaggctctccgtgcatttgtgcctttggaacagagccaaacgccgtcattgcaatttgtgcagacggcagctactacaaattcctgttcaaccccaagggggagtgcatccgagatgtctacgcgcagtttctagagatgaccgatgacaagctgtgactccagctgggggcgccacagcacccaccacctgccgccttcagactctcggggctggtgccagtgccccaggggcctcctgggccacgggctggaggggctgcccagggaccttggtctcgaagccatacgtggttgtctgctttcctaaggactcccatttccagtattaaagagagaatcatcatcaaggcaccgtaggtaactcagtggctgtgaccagctcgactggcggccactggctgttcccatgagttcagctgtgacgttagcttcagtggctccgccgcatcctcacactgacgggggctccatacggacctggggactgggctgagagggtggacgagttcaggtttgtttttgcagcagattccgtcgttcttactgagtctgcagcgggggagtgaacaagtgtgcagatgtaagttcttacatgataagcagattgaatacaacaccagcagcttgccttagaaaaggagaaaggaattccttttcccgcccgaacatgaagaaaaacgacctgaccctgtagagagaacacagtgtgaatgtttcccctcgtgtgagcccagcctgtggtcttctccgtacccgcaacgtggtcatctgtgcccgtgacgtcacctgtgcccgtgcgtggcgtccccgtctccgttggggccattagaatgaggcagacaccaggccactctagaagccgagccgtcacacctcaggcgtgtgcggggcggggacggggggtctcctggttacattttggattaaacctgtttcccggttatgtgtagggaacagcagagtgatgcacgaactttgaacattcgttatggggaaaacatcctttaacttcggggtcgtctgccagagcagggtctgggagggtccatgcagttcccgctggtgtggagggaaatgccctggtctggcctccgagcccccaggtccaccgtctcccctcccctcatttgtaagaatagctacacactaacattttgggaaggagaggcacataactttttttaacatttggtaactaggttatgggctctacattgtcagctacttgggatatatatttaattttcttaaattcccgttaaactctattttatggttttgatttcagattgcaaacatgtaaaacctgcatagcagcgagtcctcggttttgccggtttctttagttctttactgtcactgtcatgtaatcagctaattctctgtggatgttgctgtaaagtatgcatgttcctttcatgtgtatttaatcatgatgtttaattttgcacacttatttgtaatgtttcttttaaataaaagtgactaattttgttgtagtctggacctgtaa

SEQ ID NO: 379583 - DNA, 3056 bp, Homo sapiens
ccctgcctctccccgcctttcctcgcctcgcctcgcctcgccccgccccgcccctccccgccctgcctcgcctcgtctcgcctcgcttcggttagatgcgctcggcgctccataggctccctggtggggcgcgggcgcgcgcacggacgtccagcacgcacgcacgcacgtccagcacacacgcacatccagcacgcacgcacgtacgtccggcacttccggccgcggcggcctcagcgccggcccgaagggaccaggccgccgtccccagcgagaggcatgcagcgctgaggagcggcgacccagcacggcggcgccatgaacctcctgccgtgtaaccctcacggcaacgggctgctctacgccggcttcaaccaggaccacggatgctttgcgtgtgggatggaaaatggattccgagtctataacactgatccactaaaagaaaaagagaaacaagaatttctagaaggaggagttggccatgttgaaatgttatttcgctgcaactatttagctttagttggtggtggaaaaaagccgaaataccctcccaacaaagtaatgatctgggatgacctgaagaagaagactgttattgaaatagaattttctacagaagtcaaggcagtcaagctgcggcgagatagaattgtggtggttttggactccatgattaaggtgttcacattcacacacaatccccatcagttgcacgtcttcgaaacctgctataaccccaaaggcctctgtgtcctttgtcccaatagtaacaactccctcctggcctttccgggcacgcacacgggccatgtgcagcttgtggacctggccagcacggagaagccacccgtggacattcctgcacacgagggtgtcctgagctgcattgcactcaacctgcagggaacaagaattgcaactgcatccgagaaagggacgcttataagaatatttgatacttcatcagggcatttaatccaggaactgcgaagaggatctcaagcagccaatatttactgcatcaacttcaatcaggatgcgtccctcatctgcgtatccagcgaccacggcacagtgcatatttttgcagctgaagatccaaaaaggaataaacagtccagtttggcctcagccagtttccttccaaaatacttcagttccaagtggagtttctccaagtttcaggttccctcaggctctccgtgcatttgtgcctttggaacagagccaaacgccgtcattgcaatttgtgcagacggcagctactacaaattcctgttcaaccccaagggggagtgcatccgagatgtctacgcgcagtttctagagatgaccgatgacaagctgtgactccagctgggggcgccacagcacccaccacctgccgccttcagactctcggggctggtgccagtgccccaggggcctcctgggccacgggctggaggggctgcccagggaccttggtctcgaagccatacgtggttgtctgctttcctaaggactcccatttccagtattaaagagagaatcatcatcaaggcaccgtaggtaactcagtggctgtgaccagctcgactggcggccactggctgttcccatgagttcagctgtgacgttagcttcagtggctccgccgcatcctcacactgacgggggctccatacggacctggggactgggctgagagggtggacgagttcaggtttgtttttgcagcagattccgtcgttcttactgagtctgcagcgggggagtgaacaagtgtgcagatgtaagttcttacatgataagcagattgaatacaacaccagcagcttgccttagaaaaggagaaaggaattccttttcccgcccgaacatgaagaaaaacgacctgaccctgtagagagaacacagtgtgaatgtttcccctcgtgtgagcccagcctgtggtcttctccgtacccgcaacgtggtcatctgtgcccgtgacgtcacctgtgcccgtgcgtggcgtccccgtctccgttggggccattagaatgaggcagacaccaggccactctagaagccgagccgtcacacctcaggcgtgtgcggggcggggacggggggtctcctggttacattttggattaaacctgtttcccggttatgtgtagggaacagcagagtgatgcacgaactttgaacattcgttatggggaaaacatcctttaacttcggggtcgtctgccagagcagggtctgggagggtccatgcagttcccgctggtgtggagggaaatgccctggtctggcctccgagcccccaggtccaccgtctcccctcccctcatttgtaagaatagctacacactaacattttgggaaggagaggcacataactttttttaacatttggtaactaggttatgggctctacattgtcagctacttgggatatatatttaattttcttaaattcccgttaaactctattttatggttttgatttcagattgcaaacatgtaaaacctgcatagcagcgagtcctcggttttgccggtttctttagttctttactgtcactgtcatgtaatcagctaattctctgtggatgttgctgtaaagtatgcatgttcctttcatgtgtatttaatcatgatgtttaattttgcacacttatttgtaatgtttcttttaaataaaagtgactaattttgttgtagtctggacctgtaaaaaaaaaaaaaaaaaaaaaaaaaaaaaaaaaaaaaaaaaaataaaagaaaaaaaaaaaaaaccccaaacataaaaactattaaaaaacacgtaatacaaaaaaggcaaaacttaaatatccaaaataaaaaacaattttggcaccccttgtccacatccttttttatttacgggtaattttttttctggggcccaatttacctttttttggaaaattccccctattacaggatttgaattaaacaacactgcggggcgatatttacacactttctaactggaaaacatttggggtttgccaacatataaacccttttgaaaaaaaacccttttattgggcaatttt

SEQ ID NO: 379584 - DNA, 2247 bp, Homo sapiens
ccctgcctctccccgcctttcctcgcctcgcctcgcctcgccccgccccgcccctccccgccctgcctcgcctcgtctcgcctcgcttcggttagatgcgctcggcgctccataggctccctggtggggcgcgggcgcgcgcacggacgtccagcacgcacgcacgcacgtccagcacacacgcacatccagcacgcacgcacgtacgtccggcacttccggccgcggcggcctcagcgccggcccgaagggaccaggccgccgtccccagcgagaggcatgcagcgctgaggagcggcgacccagcacggcggcgccatgaacctcctgccgtgtaaccctcacggcaacgggctgctctacgccggcttcaaccaggaccacggatgctttgcgtgtgggatggaaaatggattccgagtctataacactgatccactaaaagaaaaagagaaacaagaatttctagaaggaggagttggccatgttgaaatgttatttcgctgcaactatttagctttagttggtggtggaaaaaagccgaaataccctcccaacaaagtaatgatctgggatgacctgaagaagaagactgttattgaaatagaattttctacagaagtcaaggcagtcaagctgcggcgagatagaattgtggtggttttggactccatgattaaggtgttcacattcacacacaatccccatcagttgcacgtcttcgaaacctgctataaccccaaaggcctctgtgtcctttgtcccaatagtaacaactccctcctggcctttccgggcacgcacacgggccatgtgcagcttgtggacctggccagcacggagaagccacccgtggacattcctgcacacgagggtgtcctgagctgcattgcactcaacctgcagggaacaagaattgcaactgcatccgagaaagggacgcttataagaatatttgatacttcatcagggcatttaatccaggaactgcgaagaggatctcaagcagccaatatttactgcatcaacttcaatcaggatgcgtccctcatctgcgtatccagcgaccacggcacagtgcatatttttgcagctgaagatccaaaaaggaataaacagtccagtttggcctcagccagtttccttccaaaatacttcagttccaagtggagtttctccaagtttcaggttccctcaggctctccgtgcatttgtgcctttggaacagagccaaacgccgtcattgcaatttgtgcagacggcagctactacaaattcctgttcaaccccaagggggagtgcatccgagatgtctacgcgcagtttctagagatgaccgatgacaagctgtgactccagctgggggcgccacagcacccaccacctgccgccttcagactctcggggctggtgccagtgccccaggggcctcctgggccacgggctggaggggctgcccagggaccttggtctcgaagccatacgtggttgtctgctttcctaaggactcccatttccagtattaaagagagaatcatcatcaaggcaccgtaggtaactcagtggctgtgaccagctcgactggcggccactggctgttcccatgagttcagctgtgacgttagcttcagtggctccgccgcatcctcacactgacgggggctccatacggacctggggactgggctgagagggtggacgagttcaggtttgtttttgcagcagattccgtcgttcttactgagtctgcagcgggggagtgaacaagtgtgcagatgtaagttcttacatgataagcagattgaatacaacaccagcagcttgccttagaaaaggagaaaggaattccttttcccgcccgaacatgaagaaaaacgacctgaccctgtagagagaacacagtgtgaatgtttcccctcgtgtgagcccagcctgtggtcttctccgtacccgcaacgtggtcatctgtgcccgtgacgtcacctgtgcccgtgcgtggcgtccccgtctccgttggggccattagaatgaggcagacaccaggccactctagaagccgagccgtcacacctcaggcgtgtgcggggcggggacggggggtctcctggttacattttggattaaacctgtttcccggttatgtgtagggaacagcagagtgatgcacgaactttgaacattcgttatggggatgcaacttccgctggttgtgggtggccctgtctggtcctccagcccccaggtccc

SEQ ID NO: 379585 - DNA, 661 bp, Homo sapiens
ccctgcctctccccgcctttcctcgcctcgcctcgcctcgccccgccccgcccctccccgccctgcctcgcctcgtctcgcctcgcttcggttagatgcgctcggcgctccataggctccctggtggggcgcgggcgcgcgcacggacgtccagcacgcacgcacgcacgtccagcacacacgcacatccagcacgcacgcacgtacgtccggcacttccggccgcggcggcctcagcgccggcccgaagggaccaggccgccgtccccagcgagaggcatgcagcgctgaggagcggcgacccagcacggcggcgccatgaacctcctgccgtgtaaccctcacggcaacgggctgctctacgccggcttcaaccaggaccacggatgctttgcgtgtgggatggaaaatggattccgagtctataacactgatccactaaaagaaaaagagaaacaagaatttctagaaggaggagttggccatgttgaaatgttatttcgctgcaactatttagctttagttggtggtggaaaaaagccgaaataccctcccaacaaagtaatgatctgggatgacctgaagaagaggttgcccagaagaaaaagatatcccagaagtatctgaagaaacaaaaacttatggcgctgtttgtactctg

SEQ ID NO: 379586 - DNA, 491 bp, Homo sapiens
tttcatgctatagaaattatacttgatatattctattagtatatttctaaaatttaattggatagccattagaaatggatcttctaacaaaataacttatgagattcttagctattgaaaaataatgaagccatgctgcttatagatttgaaacacagtcactaaatgtttagatgttatgtccatagcttagtgctattttaaaaaatatttattttagaattatttgagcacctacttggtgtcgagctctattctaggtgctggggatgtggtgttgaacaagataggcaagatgtccactctcctggagcttaagctttagtaaggaaagagaaatgaaaacatcaggataactgctttgatgaaaattgggtaatatgacagaaaatgtctctaaggtatagagctgatttagattgggtggccaacaggcttctccgagagagtgatgtgtaaactgagacttggtgaccagaagcagccagcgc

SEQ ID NO: 379587 - DNA, 1025 bp, Homo sapiens
ctttatcctaagtctgaaaattcatatcaaagaaaattttatggatgtaaattgttcagatcataattgtcaaaaatgctgggaaaggttgggagaaattttatttctaacacattccagaaccacattttctaaccacagtgtagtaattttatcaagagcaaaagttatagttttcttacaagttaaaaaaacagccagattatcatttgcttaacaaagaaatcatgcaattaccataaatggtaatgaaaagaatgaattgagagtttaacatgccaagagatgtgaaatgtggccaaagagatgtgagggtaaggggaaagccaaagctacactggaggaatttttatagcctttgaatgcatgcatatacatgaaaatctgaaagataaactcatatgcactaaacatgctattcaagtctaccaaacatccaggcagtgaaagaagaaagtaacagaaaatgatgaaataaagagaccatcttacaataatctcagtttttgtttctttctgatccagaaataatctaaatttaggagaatatttcttaatttccacattgttacattgttttatgtgactggcacagacaaccattggttgtcatcccagcagccatacccaattccccttgttattggcagcatctgtgtcttgccttggactctgagaatatcagatgctaattttccagtctcctgtgcagcacagtatggccagtatctcccagtgttgctcagtggaatctgccggggcttctgggaaagattttcctcattcagaagagacaggtttatcatgaagacttcctcctctctcacttcctgcttttaaacatttttatataagaacatgatgcctgaagctgctgcagctgtcttggaaccaagaagagaaaaaagtggacctcagagaagctgacccagagcctgagaagactcagctactaggccaattctggaactgcctttttgatgccttgttatctgagaaaaataaaacttgattgctcagttagt

SEQ ID NO: 379588 - DNA, 517 bp, Homo sapiens
ggcccctcctctcatctcctttccaatgcagcttctagaacattccccaaggatccaccaacactctccggtccccaccctggcccagcctggcatgaacctgctgtttgcaacccacggcctccttggagcaggggttggggggtgcctcccaaccctctgccggagggttttctctccctccggcagagcagaaaacggtggcatagattggtcaagacagtgttcgtgtcagagcacagaaaggcatggatggggccgggcatggtagctcacacctgtaatcccagcactttggtcaggagttcgagaccagcctggccaacatggtgagaccccatctctactaaaaatacaaaaattagctgggtaaggtggcaggcgcctataatcccagctactcgggaggctgaggcaggagaatcacttgaaccctggaggtggaggttgtagtgagccaagcttgtgccactgcactccagcctgggcaacagagcgagactctgtctcaaaaaaa

SEQ ID NO: 379589 - DNA, 422 bp, Homo sapiens
aggccacaagcatgcaagaagtgtgttggagccacagattgccagacctggctgtggagttgcatttttcaactaagaagtagaaggttcaggtgcctttgatggttaaccaggcccagcgttggtgagtgtaccagaaagtttggaaaacaggtcgaagtggtagagataaaaatctactgcagttgaatttgttgaaaagcccaggacatgcctcagggacctgcgtttatccatttgctccaatctctttcccagcaatcacttaacatttgggggagttggaggatagctgggagtgggcatgcaacagcttgtaaggagggagaggcctgtggactgtggactggacagggtgtccactctttgaatccggcctcggcagtctgcaaaaataaattcaaaaatgctctttgtcatct

SEQ ID NO: 379590 - DNA, 302 bp, Homo sapiens
ctttatgcatatgcctccagagtttgaatcatgcaaagatgctgccacttaaaaacctctttcctacaaacttacacccctccgatcgtggttttcctgtgaatctcagctgggcacgatggctgacgcctgtcatcccagcactttgggagactgaggcaggtggatcacgaggtcaggagttcaagaccagcctggccaagatggtgaaatcctgtctctactaaaaatacaaaaaatagccgggcacgttggcaggcacctgtaatcccagctacttgggaggctgaggcaggagaatc

SEQ ID NO: 379591 - DNA, 452 bp, Homo sapiens
attggttgaacccgggaggaggaggttgcagtgagcccagatcgcaccattgtgctccagactaggtgacaagagtgagactctgtttcacaaacaaacacacaaacaaacaaacacacaaaatcttggctgctggcaaccaggcacagccaagtaaggtgagggcagaaagcagatacttgcaatccatggtgcatcagcttttttaacatattttttctccccaactacatagaaaatatcctaagtgatctcatgcatctttgaatccaaacatctcattttttgccttatccatattacaaacgtattcacaatttataatgcataatcaatctattggaaaatattcaaaacaaatgcattctcttcatggaaccaagtagtacacctgaattaaaatttgtattgagaattattagtataataattttttaaaaaattattaagta

SEQ ID NO: 379592 - DNA, 386 bp, Homo sapiens
cagagacagtctgcctacctagagttcctctgatagcaggatctaagattcttctgccttctgcctattgttaggggaaaaccctcatttcttttcggggcctcaccagagtgacactcttggactctcccatgccttgctccttcccaaggaaggcagtgtgactagtctgatgaatctagaagaaagtgaataggctcacctcagctcagccctcttgggcactctttcttttgaagccggcctccccgaagagacctctagttgtcaagctgtgaactgatggacaggtcatctacctaatttgcagctgaagcagaaggtcacagacaccacatcctccagcccagctgttatcagtaataaagtttacatttgggtctcca

SEQ ID NO: 379593 - DNA, 342 bp, Homo sapiens
aaatccctaagtggaccagtagggtccctatcaagatgcctacttgaggaatctgccagttccagcccactgagtctcagagcagtggttagagcagacctacctgattgacacatgccccagttagacctgttcacaacatctgagcacctgacctcatgccaaacacctgttaaatcctcaacaaatgtttgtgtagtaaaggaattttttttatgtgaatgggttttaagcctagttacagtggactgatagcccatgaatagcttggttttggtttttattttgtttttgagacagggtctcactccagcctgggcgacagagcgagacttcatctca

SEQ ID NO: 379594 - DNA, 330 bp, Homo sapiens
tataagctacagaaaggcagaagccatctgaattcccctcttattttagctttatctcctagtaacagggccaagatggtgactcaggaagagcacagcctctgaagttagaagtcctaagtctatagaatattagttgattaaatgcatgaattcccaagtgcaatgcatcacccagtgatccactatcttgaaccaactgcaactcccaaggtcaaaagtttccccatggaatctgtagagattttcatgttgctctaagtggggaactcgtttggacagcaagctgaacccctaacttctgtcacctccccgagtccagtccccagt

SEQ ID NO: 379595 - DNA, 419 bp, Homo sapiens
acagctaggaaaacaggtctgagtctgtgcagggctgggaggaaaagtgactttggcggagcgattcacaattatctcctggtcacctcagaagtccagggaaccttagggcatactgtatggatcagtaggaacagctgggtggcagagccagcaatggcagtgacccctggccccttacactctgcagagaatatggccctacccttccatgaaggtggcacaagaaggcttaggggagcccttacgggagcaggggtatgaagggcgctcatttagtcattagttagttactgacctaccgtgtgcccagcaccatccttgcgacaggggaagcagcagtgagcaaaacagaggcccttcctccaggacctccacactctgggagacaggaacctaagacccaggcctagaagagg

SEQ ID NO: 379596 - DNA, 384 bp, Homo sapiens
accactgcctcccgggtttaagtgattgttctgcctcagcctcccgagtagctgggatcacaggtgcacgccaccacacccggctgatttttgtatttttagtagagatggggtttcaccatgttggccaggctggccttgaactcttgacctcaggtgatccacctgcctcggcctcccaaagtgctgggattacatgcttaatttgtttgttttttcactttagcagtacattctggaaatctttctatgtctgtatttttcatcacatggacatagcataatttaactagtacacgattgatttctcaatattactttaagagtgacttaatggagtcaatgctaacttcattcatgattatgcaatatattatggacctt

SEQ ID NO: 379597 - DNA, 403 bp, Homo sapiens
cacttaggccagctaccatttcacatcgctaacaccccctcgaatctgttaacactttttttttttcctaaaaactttcttagtggatgtggaaaaaaaagggagggcggaggggcctgggggataaaggctactgtcaaattgattaagtgaacgctcattagagaaagtaacaagaggcaaaatctgcatatgcattgcagaaatgtgtctgatcttgcttaagttgtaaaagacaaaaagggctgaaaacctccctcgctggaagtacttgagggagaactgggggaggggaaagttctctaacagtaactttctttcattgtaaacacaagctagagcagccacagactccaacactctggtacaaactttgttttctaataatttgtagtacgattat

SEQ ID NO: 379598 - DNA, 405 bp, Homo sapiens
gtgagatgtgcctttcaccctctgccataattgtgaagccttcccagccatgtggaaccataagtctattaaaattctttcttttgtaaattgcccagtcttgggtatgtctttataagcagcatgagaatggactgatgcagagtggtattagaacttaaaaaaaaaaaaaagctatttgaaattaccttgagtttcctctgggtggtccttcaatataccatgacttgtgtgagtttctgtgagcttggatttagcaaactcagtggctctttgtctctactctcagctcccaccaccacagtaacagttggtctcctgagggtcgcagttcagtttcaaatataatcccatccatgtcactgttgaaagggtccctttacagattacttcttcctttcacag

SEQ ID NO: 379599 - DNA, 951 bp, Homo sapiens
agccctcagtcagtagctcgcagtggagggaggaggagctccaactgtgctctttgatggcagtttttgcacctttgggtgcttgtcatgttcgtttatttttcaaagaagacagcaggtccctgacctcatagaccagctagtttgggaggtggcggcagaataagggctgaggacccagatctgcctggggtcaggctgcttctaaaagtgcagggccaccctcagtagtgtggctgctagggcagcacagttacaatttcgctgaaggctgaggcaggagtggagaggcatggagaggccccatggggaatatactgacctgttgtatcaactcccactgtggctggcccagggggaaggacgcaccctgttatgaatctgatactgatatttatgagactgtggctgctgcaacatcagaatccactactgtagagcctggcaagctggatgtgggagccacggagggccaagacctgcagcacatcagcaaccaaaagatgcccacaggtaaaaaagccacgggtgccgtttaccctctggcacacctctggccacccccacccccttcccttaccctcatccccagagacatcctcagcttccagctccctcctgtccatagccagctttcccaggtctgggcatgggggacaaaggctgactctgcctcctgtctttgtcgttgagactttttgatctagaaaagggagagcccttttctcaatgaaaattcaaataccccaattttggagtccccatcccattctctagcctcacctatctggccggtttggtacctaaatgaaggaaccagctaagggtcagattgtttttcttccatctcttaaggtagcttattttttgtaaattttatttattatttatttatttatttatttatttattttagatggagcctgggcaacaagagcgaaactccgtctc

SEQ ID NO: 379600 - DNA, 1210 bp, Homo sapiens
agccctcagtcagtagctcgcagtggagggaggaggagctccaactgtgctctttgatggcagtttttgcacctttgggtgcttgtcatgttcgtttatttttcaaagaagacagcaggtccctgacctcatagaccagctagtttgggaggtggcggcagaataagggctgaggacccagatctgcctggggtcaggctgcttctaaaagtgcagggccaccctcagtagtgtggctgctagggcagcacagttacaatttcgctgaaggctgaggcaggagtggagaggcatggagaggccccatggggaatatactgacctgttgtatcaactcccactgtggctggcccagggggaaggacgcaccctgttatgaatctgatactgatatttatgagactgtggctgctgcaacatcagaatccactactgtagagcctggcaagctggatgtgggagccacggagggccaagacctgcagcacatcagcaaccaaaagatgcccacaggccccagtgtgtatcattccctgtctaacaccgtacgtattctaagaccactcctttgctgatgacaaatctaagtgatggttcgcaggggactctcttccctgcttctgtctggagagcctgcctggcttcaggttcctgataggagtgaggacctggagtgcagtgtgagaaacagatggctcagtgaagaactgtcatcatccactagagtccctggaaacagccgtgtcatttagatgatgtgggtttgtgtgcatgagggttgggagatagccaggggtgaattaatgtgtagtgtttgtaaatgtgtgttttcccccaaaaatgtggacccgcatgcccagcacaagtgcaagtgtcagttttcttgaattcctggcctatggtggtcctctcacctcagcctcccaagtcatgtcattcttctaataaaaaggaagaaaaacttcagcaccaccatacactttacataaatgacctctttttcactcaacacagtgtacctgaaggtcagtttaatatccctacttcttagagagagagagagtgtggaaaggaatgaacccagattttgacctcctgaatggaagaggcaaaagtgaacccagaaatgggtcccgatgttgatggtctgcattactcaaccgtgtcatcactccaccgtgatatatgaccccacaccagggagttccag

SEQ ID NO: 379601 - DNA, 806 bp, Homo sapiens
agccctcagtcagtagctcgcagtggagggaggaggagctccaactgtgctctttgatggcagtttttgcacctttgggtgcttgtcatgttcgtttatttttcaaagaagacagcaggtccctgacctcatagaccagctagtttgggaggtggcggcagaataagggctgaggacccagatctgcctggggtcaggctgcttctaaaagtgcagggccaccctcagtagtgtggctgctagggcagcacagttacaatttcgctgaaggctgaggcaggagtggagaggcatggagaggccccatggggaatatactgacctgttgtatcaactcccactgtggctggcccagggggaaggacgcaccctgttatgaatctgatactgatatttatgagactgtggctgctgcaacatcagaatccactactgtagagcctggcaagctggatgtgggagccacggagggccaagacctgcagcacatcagcaaccaaaagatgcccacaggtccccctgaggaccgcctgagtttaaaatttctgccatcaagtgaggaagacaatgatgatgccaagatctttcctctgtgtccttccaggttcttctgaggacaacctgagtttagtatgcctaccacgaagtgaagatgatgactgtgatgatgatgatgatgatgatgcccagattttaccgtcacgtgtccagggtggctgttaccggtttgatagcagttcttgtcttctgaggacaactgagttagtatgcctaccacgaagtgaagatgatgactgtgatgatga

SEQ ID NO: 379602 - DNA, 2815 bp, Homo sapiens
  misc_feature (16)..(16): n is a, c, g, or t
ctctgggcacagatcncaccagtctgctcaccagtctgctcagtcaaagcagagtgggtgcgctggggtggacgtgtcagccctgagcacccggcctccaggctgcaggaatatgagccagtgtcttcactttgctcgtgcctcagttttacaattgtaaaatagggcactacctagaatactgggtacattttgtgtgtgagtaagttccagcgcagctagaccgcggggtagtcggcgcgaggcggagcttggcagttccgtccacttcagccgcagcgtccctcgccgggtgtctcgccgcagcctccggagaggaacagaccctcactctctctgtcagaaaaatgtctgctccagctcagccacctgctgaagggacagaagggactgccccaggtgggggtccccctggccctcctcctaacatgaccagtaacagacgactacagcaaacccaggcacaagtggaggaggtggtggacatcatacgtgtgaacgtggacaaggtcctggagagggaccagaagctgtcagagctggatgaccgagctgatgccttgcaggcaggagcatcacaatttgagagcagtgctgccaagctaaagaggaagtattggtggaaaaactgcaagatgatgatcatgctgggagccatctgtgccatcatcgtggtagttattgtaatctacttttttacttgagaatgtaccaccccttccctgttgtccattgccatccacattcatgtcctctgccctctgtttgctctctcaacacacttccccacccaccgtcctccattccagcccaggcttctccatcacccattcctcctttttcgttgcgttcatttgcactctgtccctcaacactagaaatgctgctcgtggcacaatctaagtcattacccgaagagcaacagctggcgcctcctccctgcctgctttttctgtactctcaagttcccccaaagccccaaagagttggaggccaagggaaggggcagggaggggagtggctgaggcgaagtacccatgaagctgcccagacttgggaggagaagagtatcggtgcccatggtgacttctagaaaacctggcaacttggtaggaggtagggaggggctggaagatcggcagctcactcagtactgcctggtcatgtggagctttccttcctggaccaggcctgaagagggtcctgggggtggaccaaagtccaacttggtttcagtgcagtacccttttcgaaagtaaaaacttgttttttgtagttatttctaatctgttcgtccaggattttccgtgtctttggggatcttacaactttactttgttctccagaggcctggagaacacttagggattgtgaaaatagcaggacttgtttccatcctagaagcagtcccatgtgcttctagctggaaggagctttctcttctttacattttctacagcattctgtatgagggcaccaaataaatccatctagctggtagttttatctagccaaataatttaacctagctcccagttaattgttggcataaagagagagattgcctgttagttatagagaaacagtgagtcaagtgcttaatttgaaagtaacaagctcagaggaagccactccttgccctcgttaaagagggtcctgttcctctcttcctgttgatgaaggagcgtgagggtgttagcagtgtgagatctttggacacccatggaatcctttcctccacaccacccgtgcacttgccaaagacagggatgaggcaagtggttcttcctggggcccggccgatcctcaggatgcagagaagtcatgtagacccaccagccccaccttggggggaggcgtgccagcctgtgtcaggtgtgcttgtgtattgctgtgctgtcatggggccctctccttgagagccgcctctctgttcttcctgtagtatattcccctttgaaccaccctttcctgtctgaattctactttgcctcctttctcttcctcctctttgcatggtttgtgtgtatagacagtggaacctgaggatgggatctgctcagcctatcttcggggcaattgctgagcttcaggatgggctattaatgtgggataagcccaggtgcaaggggaggagggcaggctgggagcagagcggagaatgcccatggccctttattccttcttccctcggtccacgaacaggaagaggctgaggccatgctgggcagggtctggatgcccactttccatgcagcagcatttcattgctcaaaaccatccttcctttcccttcgcccttgtttcccacattcccttcgtcctgcccaagggcgggactgaagagctggaagaaagcagtcagtaccctcccaacggcccccctcgaaggtctccactctcctctgggctcctccttgcctaatgcagggggtcaccgctggagaagaaccaccactgtcctcgatgtgtcccaagcctggagcgaatccgtcctcttggctctcccagccctatcacaggaatcattcctgggtttctgtccctctgaggctcaccaggtgtagttggccttgttctttgggggtattagcccttctactttctttctcacccaccctgtaccctcttctgtgtgtctctgctatccccctttcctcccaccacccatgtgcatgagcaaatgtgcaacaaaaccctgggactttgcagtcaaatgaagctgagcttcccacatcccgttcttcggtttgccatgagacgatgtggggtttccactgtgtgtctgtcatcacctctttgtctttttttccta

SEQ ID NO: 379603 - DNA, 2983 bp, Homo sapiens
taaatcagctttctcagattgaaatatatatttttaaataactgcaacttttgagaatgagctgaacacttcacagtgaaaattgaactaattggttaaatatccagagtctgtatctctattggaatgccttctaaagccccaagacaccaggaactaagcaaaaaggagctcaatgcaggtcctgtgatgaatctgaaaagctaaagacatactgtggttatgatcccctgggaagcagaagggtagggcctctctaagaggcctgcaggtctcctgggtgatgggtggttttttccattgtcccaaggatggaaggaattctgtttcccactagagatgtggctcttttcctcattcctgaaatccaagggctcattttttgtccatgtttcctcagatgatgatcatgctgggagccatctgtgccatcatcgtggtagttattgtaagtaagtatcgctgaagttgctggtggggtgaagaggtgggaaggtcctggagtcttctccctgcctgcctgcctgcctggggagtggggctgctctgactgaggtatggagaccgctgctatgggatcgtcacctggttcgggacgggggaagggcagagacaagggatttctttgatggacaagccttccccctgcaacgcattgcagggagatggcgcctcctgttctgaggaagtggggctatgctgtgtgtcactggcttgggttggagggagaccatggggatggggcacttaacaatggagagacctgaatgtctggtaacttggtgtaattcaccctcttgttttctcctgtctctttctcttttccgtctgggacttcctgattcctgtgtccagtctacttttttacttgagaatgtaccaccccttccctgttgtccattgccatccacattcatgtcctctgccctctgtttgctctctcaacacacttccccacccaccgtcctccattccagcccaggcttctccatcacccattcctcctttttcgttgcgttcatttgcactctgtccctcaacactagaaatgctgctcgtggcacaatctaagtcattacccgaagagcaacagctggcgcctcctccctgcctgctttttctgtactctcaagttcccccaaagccccaaagagttggaggccaagggaaggggcagggaggggagtggctgaggcgaagtacccatgaagctgcccagacttgggaggagaagagtatcggtgcccatggtgacttctagaaaacctggcaacttggtaggaggtagggaggggctggaagatcggcagctcactcagtactgcctggtcatgtggagctttccttcctggaccaggcctgaagagggtcctgggggtggaccaaagtccaacttggtttcagtgcagtacccttttcgaaagtaaaaacttgttttttgtagttatttctaatctgttcgtccaggattttccgtgtctttggggatcttacaactttactttgttctccagaggcctggagaacacttagggattgtgaaaatagcaggacttgtttccatcctagaagcagtcccatgtgcttctagctggaaggagctttctcttctttacattttctacagcattctgtatgagggcaccaaataaatccatctagctggtagttttatctagccaaataatttaacctagctcccagttaattgttggcataaagagagagattgcctgttagttatagagaaacagtgagtcaagtgcttaatttgaaagtaacaagctcagaggaagccactccttgccctcgttaaagagggtcctgttcctctcttcctgttgatgaaggagcgtgagggtgttagcagtgtgagatctttggacacccatggaatcctttcctccacaccacccgtgcacttgccaaagacagggatgaggcaagtggttcttcctggggcccggccgatcctcaggatgcagagaagtcatgtagacccaccagccccaccttggggggaggcgtgccagcctgtgtcaggtgtgcttgtgtattgctgtgctgtcatggggccctctccttgagagccgcctctctgttcttcctgtagtatattcccctttgaaccaccctttcctgtctgaattctactttgcctcctttctcttcctcctctttgcatggtttgtgtgtatagacagtggaacctgaggatgggatctgctcagcctatcttcggggcaattgctgagcttcaggatgggctattaatgtgggataagcccaggtgcaaggggaggagggcaggctgggagcagagcggagaatgcccatggccctttattccttcttccctcggtccacgaacaggaagaggctgaggccatgctgggcagggtctggatgcccactttccatgcagcagcatttcattgctcaaaaccatccttcctttcccttcgcccttgtttcccacattcccttcgtcctgcccaagggcgggactgaagagctggaagaaagcagtcagtaccctcccaacggcccccctcgaaggtctccactctcctctgggctcctccttgcctaatgcagggggtcaccgctggagaagaaccaccactgtcctcgatgtgtcccaagcctggagcgaatccgtcctcttggctctcccagccctatcacaggaatcattcctgggtttctgtccctctgaggctcaccaggtgtagttggccttgttctttgggggtattagcccttctactttctttctcacccaccctgtaccctcttctgtgtgtctctgctatccccctttcctcccaccacccatgtgcatgagcaaatgtgcaacaaaaccctgggactttgcagtcaaatgaagctgagcttcccacatcccgttcttcggtttgccatgagacgatgtggggtttccactgtgtgtctgtcatcacctctttgtctttttttccta

SEQ ID NO: 379604 - DNA, 1511 bp, Homo sapiens
  misc_feature (16)..(16): n is a, c, g, or t
  misc_feature (1451)..(1451): n is a, c, g, or t
ctctgggcacagatcncaccagtctgctcaccagtctgctcagtcaaagcagagtgggtgcgctggggtggacgtgtcagccctgagcacccggcctccaggctgcaggaatatgagccagtgtcttcactttgctcgtgcctcagttttacaattgtaaaatagggcactacctagaatactgggtacattttgtgtgtgagtaagttccagcgcagctagaccgcggggtagtcggcgcgaggcggagcttggcagttccgtccacttcagccgcagcgtccctcgccgggtgtctcgccgcagcctccggagaggaacagaccctcactctctctgtcagaaaaatgtctgctccagctcagccacctgctgaagggacagaagggactgccccaggtgggggtccccctggccctcctcctaacatgaccagtaacagacgactacagcaaacccaggcacaagtggaggaggtggtggacatcatacgtgtgaacgtggacaaggtcctggagagggaccagaagctgtcagagctggatgaccgagctgatgccttgcaggcaggagcatcacaatttgagagcagtgctgccaagctaaagaggaagtattggtggaaaaactgcaagatgatgatcatgctgggagccatctgtgccatcatcgtggtagttattgtaagtaagtatcgctgaagttgctggtggggtgaagaggtgggaaggtcctggagtcttctccctgcctgcctgcctgcctggggagtggggctgctctgactgaggtatggagaccgctgctatgggatcgtcacctggttcgggacgggggaagggcagagacaagggatttctttgatggacaagccttccccctgcaacgcattgcagggagatggcgcctcctgttctgaggaagtggggctatgctgtgtgtcactggcttgggttggagggagaccatggggatggggcacttaacaatggagagacctgaatgtctggtaacttggtgtaattcaccctcttgttttctcctgtctctttctcttttccgtctgggacttcctgattcctgtgtccagtctacttttttacttgagaatgtaccaccccttccctgttgtccattgccatccacattcatgtcctctgccctctgtttgctctctcaacacacttccccacccaccgtcctctctccatccgggagtggagagagaaggaacaaagaaatctacaaactggttgtgatcaattagttgtaaataccactgcacttggatcagccaggaacaagttctttgaaatacgccagagaattaacattatcagtgggccaaatgtgtggaagatgtattatcctagtctcttttcctgttctctagaagtatgttactggttcttaaaagatttcacaaaaatacgctttgaggagaatcaagntttcttgatagtatctacaggcacttaatgcacatttcagggaggaagtgatgggagaga

SEQ ID NO: 379605 - DNA, 970 bp, Homo sapiens
taaatcagctttctcagattgaaatatatatttttaaataactgcaacttttgagaatgagctgaacacttcacagtgaaaattgaactaattggttaaatatccagagtctgtatctctattggaatgccttctaaagccccaagacaccaggaactaagcaaaaaggagctcaatgcaggtcctgtgatgaatctgaaaagctaaagacatactgtggttatgatcccctgggaagcagaagggtagggcctctctaagaggcctgcaggtctcctgggtgatgggtggttttttccattgtcccaaggatggaaggaattctgtttcccactagagatgtggctcttttcctcattcctgaaatccaagggctcattttttgtccatgtttcctcagatgatgatcatgctgggagccatctgtgccatcatcgtggtagttattgtaagtaagtatcgctgaagttgctggtggggtgaagaggtgggaaggtcctggagtcttctccctgcctgcctgcctgcctggggagtggggctgctctgactgaggtatggagaccgctgctatgggatcgtcacctggttcgggacgggggaagggcagagacaagggagaggtgggtggaagagaggtggcagtggatgatgtctctgtcatagtggtgggataggtgatgtccgtcgtggagtttgtaccaggaccagtcggagaattaggataggtggtctcagatgtagtcatagatgaagcatttggagtggggagtgtggtcaccaagatagatggagggattgtggttatggtgccactggtgactacttctgtgcttgggacaggtgtagaagacagaggcattctggtcagtgatgttaatcaattggtggttgtgggaggagaggtcgtagttgtcatagaagtcactgtatttgtggaagtgactgatgcacgtgatgtggaggagac

SEQ ID NO: 379606 - DNA, 3218 bp, Homo sapiens
  misc_feature (16)..(16): n is a, c, g, or t
ctctgggcacagatcncaccagtctgctcaccagtctgctcagtcaaagcagagtgggtgcgctggggtggacgtgtcagccctgagcacccggcctccaggctgcaggaatatgagccagtgtcttcactttgctcgtgcctcagttttacaattgtaaaatagggcactacctagaatactgggtacattttgtgtgtgagtaagttccagcgcagctagaccgcggggtagtcggcgcgaggcggagcttggcagttccgtccacttcagccgcagcgtccctcgccgggtgtctcgccgcagcctccggagaggaacagaccctcactctctctgtcagaaaaatgtctgctccagctcagccacctgctgaagggacagaagggactgccccaggtgggggtccccctggccctcctcctaacatgaccagtaacagacgactacagcaaacccaggcacaagtggaggaggtggtggacatcatacgtgtgaacgtggacaaggtcctggagagggaccagaagctgtcagagctggatgaccgagctgatgccttgcaggcaggagcatcacaatttgagagcagtgctgccaagctaaagaggaagtattggtggaaaaactgcaagatgatgatcatgctgggagccatctgtgccatcatcgtggtagttattgtaagtaagtatcgctgaagttgctggtggggtgaagaggtgggaaggtcctggagtcttctccctgcctgcctgcctgcctggggagtggggctgctctgactgaggtatggagaccgctgctatgggatcgtcacctggttcgggacgggggaagggcagagacaagggatttctttgatggacaagccttccccctgcaacgcattgcagggagatggcgcctcctgttctgaggaagtggggctatgctgtgtgtcactggcttgggttggagggagaccatggggatggggcacttaacaatggagagacctgaatgtctggtaacttggtgtaattcaccctcttgttttctcctgtctctttctcttttccgtctgggacttcctgattcctgtgtccagtctacttttttacttgagaatgtaccaccccttccctgttgtccattgccatccacattcatgtcctctgccctctgtttgctctctcaacacacttccccacccaccgtcctccattccagcccaggcttctccatcacccattcctcctttttcgttgcgttcatttgcactctgtccctcaacactagaaatgctgctcgtggcacaatctaagtcattacccgaagagcaacagctggcgcctcctccctgcctgctttttctgtactctcaagttcccccaaagccccaaagagttggaggccaagggaaggggcagggaggggagtggctgaggcgaagtacccatgaagctgcccagacttgggaggagaagagtatcggtgcccatggtgacttctagaaaacctggcaacttggtaggaggtagggaggggctggaagatcggcagctcactcagtactgcctggtcatgtggagctttccttcctggaccaggcctgaagagggtcctgggggtggaccaaagtccaacttggtttcagtgcagtacccttttcgaaagtaaaaacttgttttttgtagttatttctaatctgttcgtccaggattttccgtgtctttggggatcttacaactttactttgttctccagaggcctggagaacacttagggattgtgaaaatagcaggacttgtttccatcctagaagcagtcccatgtgcttctagctggaaggagctttctcttctttacattttctacagcattctgtatgagggcaccaaataaatccatctagctggtagttttatctagccaaataatttaacctagctcccagttaattgttggcataaagagagagattgcctgttagttatagagaaacagtgagtcaagtgcttaatttgaaagtaacaagctcagaggaagccactccttgccctcgttaaagagggtcctgttcctctcttcctgttgatgaaggagcgtgagggtgttagcagtgtgagatctttggacacccatggaatcctttcctccacaccacccgtgcacttgccaaagacagggatgaggcaagtggttcttcctggggcccggccgatcctcaggatgcagagaagtcatgtagacccaccagccccaccttggggggaggcgtgccagcctgtgtcaggtgtgcttgtgtattgctgtgctgtcatggggccctctccttgagagccgcctctctgttcttcctgtagtatattcccctttgaaccaccctttcctgtctgaattctactttgcctcctttctcttcctcctctttgcatggtttgtgtgtatagacagtggaacctgaggatgggatctgctcagcctatcttcggggcaattgctgagcttcaggatgggctattaatgtgggataagcccaggtgcaaggggaggagggcaggctgggagcagagcggagaatgcccatggccctttattccttcttccctcggtccacgaacaggaagaggctgaggccatgctgggcagggtctggatgcccactttccatgcagcagcatttcattgctcaaaaccatccttcctttcccttcgcccttgtttcccacattcccttcgtcctgcccaagggcgggactgaagagctggaagaaagcagtcagtaccctcccaacggcccccctcgaaggtctccactctcctctgggctcctccttgcctaatgcagggggtcaccgctggagaagaaccaccactgtcctcgatgtgtcccaagcctggagcgaatccgtcctcttggctctcccagccctatcacaggaatcattcctgggtttctgtccctctgaggctcaccaggtgtagttggccttgttctttgggggtattagcccttctactttctttctcacccaccctgtaccctcttctgtgtgtctctgctatccccctttcctcccaccacccatgtgcatgagcaaatgtgcaacaaaaccctgggactttgcagtcaaatgaagctgagcttcccacatcccgttcttcggtttgccatgagacgatgtggggtttccactgtgtgtctgtcatcacctctttgtctttttttccta

SEQ ID NO: 379607 - DNA, 1170 bp, Homo sapiens
  misc_feature (16)..(16): n is a, c, g, or t
ctctgggcacagatcncaccagtctgctcaccagtctgctcagtcaaagcagagtgggtgcgctggggtggacgtgtcagccctgagcacccggcctccaggctgcaggaatatgagccagtgtcttcactttgctcgtgcctcagttttacaattgtaaaatagggcactacctagaatactgggtacattttgtgtgtgagtaagttccagcgcagctagaccgcggggtagtcggcgcgaggcggagcttggcagttccgtccacttcagccgcagcgtccctcgccgggtgtctcgccgcagcctccggagaggaacagaccctcactctctctgtcagaaaaatgtctgctccagctcagccacctgctgaagggacagaagggactgccccaggtgggggtccccctggccctcctcctaacatgaccagtaacagacgactacagcaaacccaggcacaagtggaggaggtggtggacatcatacgtgtgaacgtggacaaggtcctggagagggaccagaagctgtcagagctggatgaccgagctgatgccttgcaggcaggagcatcacaatttgagagcagtgctgccaagctaaagaggaagtattggtggaaaaactgcaagatgatgatcatgctgggagccatctgtgccatcatcgtggtagttattgtaaggcgggactgaagagctggaagaaagcagtcagtaccctcccaacggcccccctcgaaggtctccactctcctctgggctcctccttgcctaatgcagggggtcaccgctggagaagaaccaccactgtcctcgatgtgtcccaagcctggagcgaatccgtcctcttggctctcccagccctatcacaggaatcattcctgggtttctgtccctctgaggctcaccaggtgtagttggccttgttctttgggggtattagcccttctactttctttctcacccaccctgtaccctcttctgtgtgtctctgctatccccctttcctcccaccacccatgtgcatgagcaaatgtgcaacaaaaccctgggactttgcagtcaaatgaagctgagcttcccacatcccgttcttcggtttgccatgagacgatgtggggtttccactgtgtgtctgtcatcacctctttgtctttttttccta

SEQ ID NO: 379608 - DNA, 1043 bp, Homo sapiens
  misc_feature (16)..(16): n is a, c, g, or t
ctctgggcacagatcncaccagtctgctcaccagtctgctcagtcaaagcagagtgggtgcgctggggtggacgtgtcagccctgagcacccggcctccaggctgcaggaatatgagccagtgtcttcactttgctcgtgcctcagttttacaattgtaaaatagggcactacctagaatactgggtacattttgtgtgtgagtaagttccagcgcagctagaccgcggggtagtcggcgcgaggcggagcttggcagttccgtccacttcagccgcagcgtccctcgccgggtgtctcgccgcagcctccggagaggaacagaccctcactctctctgtcagaaaaatgtggtggacatcatacgtgtgaacgtggacaaggtcctggagagggaccagaagctgtcagagctggatgaccgagctgatgccttgcaggcaggagcatcacaatttgagagcagtgctgccaagctaaagaggaagtattggtggaaaaactgcaagatgatgatcatgctgggagccatctgtgccatcatcgtggtagttattgtaaggcgggactgaagagctggaagaaagcagtcagtaccctcccaacggcccccctcgaaggtctccactctcctctgggctcctccttgcctaatgcagggggtcaccgctggagaagaaccaccactgtcctcgatgtgtcccaagcctggagcgaatccgtcctcttggctctcccagccctatcacaggaatcattcctgggtttctgtccctctgaggctcaccaggtgtagttggccttgttctttgggggtattagcccttctactttctttctcacccaccctgtaccctcttctgtgtgtctctgctatccccctttcctcccaccacccatgtgcatgagcaaatgtgcaacaaaaccctgggactttgcagtcaaatgaagctgagcttcccacatcccgttcttcggtttgccatgagacgatgtggggtttccactgtgtgtctgtcatcacctctttgtctttttttccta

SEQ ID NO: 379609 - DNA, 1089 bp, Homo sapiens
  misc_feature (48)..(48): n is a, c, g, or t
  misc_feature (96)..(96): n is a, c, g, or t
  misc_feature (119)..(119): n is a, c, g, or t
agatgtgtagctactttttcctatttgaagccatttcgtagagaaatnccttcactataatcaaataagtttgtcccatcaatcccaaagatgttnccagtggtgctcttgaagaggantgagtaccagttttaaattgcccattggcatttgaaggtagttgagtatgtgttctttattcctagaagccactgtgcttggtagagtgcatcactcaccacagctgcctcctgagctgcctgagcctggtgcaaaaggattggcccccattatggtgcttctgaataaatcttgccaagatagacaaacaatgatgaaactcagatggagcttcctactcatgttgatttatgtctcacaatcctgggtattgttaattcaacatagggtgaaactatttctgataaagaacttttgaaaaactttttatactctaaagtgatactcagaacaaaagaaagtcataaaactcctgaatttaatttccccacctaagtcgagacagtattatcaaaacacatgtgcacacagattattttttggctccaaaactggattgcaaaagaaagaggagaagaatattttgtgtgttcctggtattcttttataagtaaagtttacccaggcatggaccagcttcagccagggacaaaatcccctcccaaaccactctccacagctttttaaaaatacttctactcttaacaattacctaaggcttcctcaactgccccaaatctcttaatagcttctagtgctgctacaatctaagtcaggtcacccagagggaagagaacatggcattaaaagaatcacatcttcagaagagaagacactaatattattacccatatacatgatttcagaagatgacataagattcctcttaaagaggaaatgtcaggaatcaagccactgaatccttaaagagaaaagttgaatatgagtcattgtgtctgaaaactgcaaagtgaacttaactgagatccagcaaacaggttctgtttaagaaaaataatttatactaaatttagtaaaatggacttcttattcaaagcatcaataattaaaagaattattttaatgaaa

SEQ ID NO: 379610 - DNA, 4836 bp, Homo sapiens
ggcggtgtttgaggccggccagtcgtgactgggcggcaatgaggtcagtgactgccgggagtcctgcaggggcggggcggcgccaagcgcagggagcccggctgagtggcagcccagattgaagatggatacgtgacaatcccagggaccgctgcactgacttcatttccttagacaagacacagtgtagggcccggcccgtgttggccccaggactcctttggaatatagctgtggacaatgaatcctgcgagcgatgggggcacatcagagagcatttttgacctggactatgcatcctgggggatccgctccacgctgatggtcgctggctttgtcttctacttgggcgtctttgtggtctgccaccagctgtcctcttccctgaatgccacttaccgttctttggtggccagagagaaggtcttctgggacctggcggccacgcgtgcagtctttggtgttcagagcacagccgcaggcctgtgggctctgctgggggaccctgtgctgcatgccgacaaggcgcgtggccagcagaactggtgctggtttcacatcacgacagcaacgggattcttttgctttgaaaatgttgcagtccacctgtccaacttgatcttccggacatttgacttgtttctggttatccaccatctctttgcctttcttgggtttcttggctgcttggtcaatctccaagctggccactatctagctatgaccacgttgctcctggagatgagcacgccctttacctgcgtttcctggatgctcttaaaggcgggctggtccgagtctctgttttggaagctcaaccagtggctgatgattcacatgtttcactgccgcatggttctaacctaccacatgtggtgggtgtgtttctggcactgggacggcctggtcagcagcctgtatctgcctcatttgacactgttccttgtcggactggctctgcttacgctaatcattaatccatattggacccataagaagactcagcagcttctcaatccggtggactggaacttcgcacagccagaagccaagagcaggccagaaggcaacgggcagctgctgcggaagaagaggccatagctgctccagccggggctccggggcggcagcagagctggcacaccgattctgggaagccccgcgaatgatggcttttgaattaatgaggcagtgaatgttttgtgtttacttctaagggaaatactaactttctttcgcattagtattaattttgaagtagctacaaagtatttttaagaaattataattttatgactgtctggcaggctctgtcagtttagccgcgccggaccgtgtcaagcatctaggagaggagtccatggtgtccaggcatcggggcgtcacacctgttgaggagtggggtggctttgaatgctggaaatggcttcatagtgaagtgcctcccacagggcgggtgggtcagcgttgactctttccagctgcacactcatatgccgtgtgtcttattcagaagtcacattcttttcagttggagagaattgggctaagatagaaaataacatgatttgttccttattaaagtttcccagcgtatgaaattctaagctgggtggggtggctcacacccgacgtaatcccagcacgttgggaggccgaggcaggtggatcacttgaggccaggagttcgagaccagcctggtcaagatggtgaaaccccatctctactaaaattacaaaaattagccgggtgtcgtggcacacacctgtaatcccagctatttgggaggccaaggcaggagaattgcctgaacccgggaggcggaggttgcagtgagctgagatcgcaccactgcactccagcactccagcctgggtgacagagcaagactctctctcataaaaaaaaaaaaaaaaaaaattctagaccgaagtgtacggcagtgccatctggtggcaagtggtacaaagacaacgctgaggggtagtgactcctgtagcagcagagacgccttggagtttaacccccaccaaccagagcgtgggctggtaaagatgaaatcttgcaagttttttttttttttaaatcatggtacctgttttaaaatgagaagttattattcatactgtgttgctcatttgacaaaataaggtaaggatttcataatcaggttgtctgggtttcagagctgtttttaattgactgagttacctacaggcacccaatctagaccctaattctgtggttggtgttcctctgtagatttcaagacaagtagtgatgtcattttctccctgagctgtagggtggacctggacccctcagagatgctcgactgcagggtcctggggtccctagagtggtcctgcagcagcccctggcaatgagctgcctgatgatgagtcccaaggtacattgttctactgttttatacccaggtagaagttacacagcaatttagcaatgttgttaacagacatacagaattgtgtgtgtgtgtgtgtgtgtgtgtgtgtgtgtgagtgttttgatataaacgtgcaattaaaattcaaagtttattttttatcacaagcacctttgaaatgtacgtggaaaacgtcggctgctcgtgagaatcatgtgtgacttacgttccttatgttttatggaactctcggaacagtgttttgtttttgtttagtttttgttttcgtttttttgagacggagcctggctttggctcccaggctggagtccagtggtgtgatctcggctcactgcaacctccacctcccgggttccagggattctcctgcctcaccctttcaagtagctgggattacaggtacctctaccatgcctggctgattttttgtatttttagtagagacagggtttcaccatgttggccaggctggtctctgactcctgactaaaagtgatctgcccacctcggcctcccaaagttctgggattacgggcgtgagccacttcacccggcccggagcggtgtattttgattgctggtgctttaactatattgaccaaggtgtatagtaacctatttatcacattttacgaagcaattttaatcttaaacacatccagcaaatggtgtccctgctgaaacttttaactggaaacctcacacctggcaggcagcactctctgcagccgtgcccttgtggagtcagcaggagctggtgtttttcagccagacagaggcataataaagtgactgatgtttacagaacccaaatgatgtcttcctctctctcaaaataaactaacctattcatattgctgtgaatgctttatcttggagatagaaaatataatgataaattcatcatgtgttcagaattcgatttggagttggaagtggacagcctaatttttatctcacctccactaggactttgaccttcccaggggtccacactttacctcctgtatcttcatacgcgtgtgtggatgcatagagatggaggtgctgtagagaagcacaggctcacccgctccgtccagtgtcacccacacattggtccggggacccctcagtgcagagcctgaagttgggggtttaggggtggaaaaggcttcgtgaaatgttaatgatgcgtacaccttccagatggcacagcactttcccatggtcctcactggcctcagtctccctgaccggcagtgtgaggggatgtagctatagtggagcatggtacaagcgacattcatgagctctgacttcttggtgccaggttggtgtgagcctgggcccggcccactcagcggcccacattggccagcattcagctgcacgtgtgtgctgcgtgcttcacatcctctattgagagttacagcaagtgttaaacgaggtgagttcacataacaggaattctggaactgcttgaaaactaggacgattgggcaatatcggccttaactccacctgatggcaggtgacccggatagaaaatggccctgcgtttagccaggatgtggctctccagcttggcttcagtgtgatcacttgtcagtgcgctttctctttcgatagtgaaatccttctctatacctatgttttgttttgttgctcgacgttgggaaacagaatgggccagggaggttgagtgactgaagaccaagggttggtgcagcctcctcgccgcgctgcgggggctgggccgcacaggcttctgcccttctcggtgtccaggctccttgggtgatgctggagttgtcatggccgcagttcagtgtgagattttttaccaggtattgcgcttaagggacatgattttccattttcttcgcccggacaacttgaatgaaatgggcactgttgattccacttctgtcgaggagcttcggggctcagagaggtgatgacgtgcccaaggtgacgcaactcgtgaacagccgtgcctgccttgggcgcagctccggcgccagagctgggctcttcaacacggcatttagcgcagaaagtcgtggttcaggcagtatgggccgctgtgacaaaacacctaagactgggtagtttataaagaacagacattcaggccaggcacggtgactcacgcctgtaatcccagcactttgggaggccgaggcgcgtggatcatttgaggtcaggagtttgaaaccagcctggccaacatggtgaaaccccatctctactaaaaaaacaaaactagctgggggtggtggtgtatgcctgtggtcccagctacttgggaggctaaggtagaagaattgcttgaacctgggaggcagagattgcagtgagccgagccactgcactccagcactccagcctgggtgacagagcaagactctctctcaaaaaaaaa

SEQ ID NO: 379611 - DNA, 2770 bp, Homo sapiens
ggcggtgtttgaggccggccagtcgtgactgggcggcaatgaggtcagtgactgccgggagtcctgcaggggcggggcggcgccaagcgcagggagcccggctgagtggcagcccagattgaagatggatacgtgacaatcccagggaccgctgcactgacttcatttccttagacaagacacagtgtagggcccggcccgtgttggccccaggactcctttggaatatagctgtggacaatgaatcctgcgagcgatgggggcacatcagagagcatttttgacctggactatgcatcctgggggatccgctccacgctgatggtcgctggctttgtcttctacttgggcgtctttgtggtctgccaccagctgtcctcttccctgaatgccacttaccgttctttggtggccagagagaaggtcttctgggacctggcggccacgcgtgcagtctttggtgttcagagcacagccgcaggcctgtgggctctgctgggggaccctgtgctgcatgccgacaaggcgcgtggccagcagaactggtgctggtttcacatcacgacagcaacgggattcttttgctttgaaaatgttgcagtccacctgtccaacttgatcttccggacatttgacttgtttctggttatccaccatctctttgcctttcttgggtttcttggctgcttggtcaatctccaagctggccactatctagctatgaccacgttgctcctggagatgagcacgccctttacctgcgtttcctggatgctcttaaaggcgggctggtccgagtctctgttttggaagctcaaccagtggctgatgattcacatgtttcactgccgcatggttctaacctaccacatgtggtgggtgtgtttctggcactgggacggcctggtcagcagcctgtatctgcctcatttgacactgttccttgtcggactggctctgcttacgctaatcattaatccatattggacccataagaagactcagcagcttctcaatccggtggactggaacttcgcacagccagaagccaagagcaggccagaaggcaacgggcagctgctgcggaagaagaggccatagctgctccagccggggctccggggcggcagcagagctggcacaccgattctgggaagccccgcgaatgatggcttttgaattaatgaggcagtgaatgttttgtgtttacttctaagggaaatactaactttctttcgcattagtattaattttgaagtagctacaaagtatttttaagaaattataattttatgactgtctggcaggctctgtcagtttagccgcgccggaccgtgtcaagcatctaggagaggagtccatggtgtccaggcatcggggcgtcacacctgttgaggagtggggtggctttgaatgctggaaatggcttcatagtgaagtgcctcccacagggcgggtgggtcagcgttgactctttccagctgcacactcatatgccgtgtgtcttattcagaagtcacattcttttcagttggagagaattgggctaagatagaaaataacatgatttgttccttattaaagtttcccagcgtatgaaattctaagctgggtggggtggctcacacccgacgtaatcccagcacgttgggaggccgaggcaggtggatcacttgaggccaggagttcgagaccagcctggtcaagatggtgaaaccccatctctactaaaattacaaaaattagccgggtgtcgtggcacacacctgtaatcccagctatttgggaggccaaggcaggagaattgcctgaacccgggaggcggaggttgcagtgagctgagatcgcaccactgcactccagcactccagcctgggtgacagagcaagactctctctcataaaaaaaaaaaaaaaaaaaattctagaccgaagtgtacggcagtgccatctggtggcaagtggtacaaagacaacgctgaggggtagtgactcctgtagcagcagagacgccttggagtttaacccccaccaaccagagcgtgggctggtaaagatgaaatcttgcaagttttttttttttttaaatcatggtacctgttttaaaatgagaagttattattcatactgtgttgctcatttgacaaaataaggtaaggatttcataatcaggttgtctgggtttcagagctgtttttaattgactgagttacctacaggcacccaatctagaccctaattctgtggttggtgttcctctgtagatttcaagacaagtagtgatgtcattttctccctgagctgtagggtggacctggacccctcagagatgctcgactgcagggtcctggggtccctagagtggtcctgcagcagcccctggcaatgagctgcctgatgatgagtcccaaggtacattgttctactgttttatacccaggtagaagttacacagcaatttagcaatgttgttaacagacatacagaattgtgtgtgtgtgtgtgtgtgtgtgtgtgtgtgtgagtgttttgatataaacgtgcaattaaaattcaaagtttattttttatcacaagcacctttgaaatgtacgtggaaaacgtcggctgctcgtgagaatcatgtgtgacttacgttccttatgttttatggaactctcggaacagtgttttgtttttgtttagtttttgttttcgtttttttgagacggaccactgcactccagcactccagcctgggtgacagagcaagactctctctcaaaaaaaaa

SEQ ID NO: 379612 - DNA, 302 bp, Homo sapiens
ctattctgctgagagatcaaaaaaaatgtgtgtgtgtgtgagtgttttgatataaacgtgcaattaaaattcaaagtttattttttatcacaagcacctttgaaatgtacgtggaaaacgtcggctgctcgtgagaatcatgtgtgacttacgttccttatgttttatggaactctcggaacagtgttttgtttttgtttagtttttgttttcgtttttttgagacggagcctggctttggctcccaggctgccactgcactccagcactccagcctgggtgacagagcaagactctctctc

SEQ ID NO: 379613 - DNA, 3618 bp, Homo sapiens
ggcggtgtttgaggccggccagtcgtgactgggcggcaatgaggtcagtgactgccgggagtcctgcaggggcggggcggcgccaagcgcagggagcccggctgagtggcagcccagattgaagatggatacgtgacaatcccagggaccgctgcactgacttcatttccttagacaagacacagtgtagggcccggcccgtgttggccccaggactcctttggaatatagctgtggacaatgaatcctgcgagcgatgggggcacatcagagagcatttttgacctggactatgcatcctgggggatccgctccacgctgatggtcgctggctttgtcttctacttgggcgtctttgtggtctgccaccagctgtcctcttccctgaatgccacttaccgttctttggtggccagagagaaggtcttctgggacctggcggccacgcgtgcagtctttggtgttcagagcacagccgcaggcctgtgggctctgctgggggaccctgtgctgcatgccgacaaggcgcgtggccagcagaactggtgctggtttcacatcacgacagcaacgggattcttttgctttgaaaatgttgcagtccacctgtccaacttgatcttccggacatttgacttgtttctggttatccaccatctctttgcctttcttgggtttcttggctgcttggtcaatctccaagctggccactatctagctatgaccacgttgctcctggagatgagcacgccctttacctgcgtttcctggatgctcttaaaggcgggctggtccgagtctctgttttggaagctcaaccagtggctgatgattcacatgtttcactgccgcatggttctaacctaccacatgtggtgggtgtgtttctggcactgggacggcctggtcagcagcctgtatctgcctcatttgacactgttccttgtcggactggctctgcttacgctaatcattaatccatattggacccataagaagactcagcagcttctcaatccggtggactggaacttcgcacagccagaagccaagagcaggccagaaggcaacgggcagctgctgcggaagaagaggccatagctgctccagccggggctccggggcggcagcagagctggcacaccgattctgggaagccccgcgaatgatggcttttgaattaatgaggcagtgaatgttttgtgtttacttctaagggaaatactaactttctttcgcattagtattaattttgaagtagctacaaagtatttttaagaaattataattttatgactgtctggcaggctctgtcagtttagccgcgccggaccgtgtcaagcatctaggagaggagtccatggtgtccaggcatcggggcgtcacacctgttgaggagtggggtggctttgaatgctggaaatggcttcatagtgaagtgcctcccacagggcgggtgggtcagcgttgactctttccagctgcacactcatatgccgtgtgtcttattcagaagtcacattcttttcagttggagagaattgggctaagatagaaaataacatgatttgttccttattaaagtttcccagcgtatgaaattctaagctgggtggggtggctcacacccgacgtaatcccagcacgttgggaggccgaggcaggtggatcacttgaggctggtctctgactcctgactaaaagtgatctgcccacctcggcctcccaaagttctgggattacgggcgtgagccacttcacccggcccggagcggtgtattttgattgctggtgctttaactatattgaccaaggtgtatagtaacctatttatcacattttacgaagcaattttaatcttaaacacatccagcaaatggtgtccctgctgaaacttttaactggaaacctcacacctggcaggcagcactctctgcagccgtgcccttgtggagtcagcaggagctggtgtttttcagccagacagaggcataataaagtgactgatgtttacagaacccaaatgatgtcttcctctctctcaaaataaactaacctattcatattgctgtgaatgctttatcttggagatagaaaatataatgataaattcatcatgtgttcagaattcgatttggagttggaagtggacagcctaatttttatctcacctccactaggactttgaccttcccaggggtccacactttacctcctgtatcttcatacgcgtgtgtggatgcatagagatggaggtgctgtagagaagcacaggctcacccgctccgtccagtgtcacccacacattggtccggggacccctcagtgcagagcctgaagttgggggtttaggggtggaaaaggcttcgtgaaatgttaatgatgcgtacaccttccagatggcacagcactttcccatggtcctcactggcctcagtctccctgaccggcagtgtgaggggatgtagctatagtggagcatggtacaagcgacattcatgagctctgacttcttggtgccaggttggtgtgagcctgggcccggcccactcagcggcccacattggccagcattcagctgcacgtgtgtgctgcgtgcttcacatcctctattgagagttacagcaagtgttaaacgaggtgagttcacataacaggaattctggaactgcttgaaaactaggacgattgggcaatatcggccttaactccacctgatggcaggtgacccggatagaaaatggccctgcgtttagccaggatgtggctctccagcttggcttcagtgtgatcacttgtcagtgcgctttctctttcgatagtgaaatccttctctatacctatgttttgttttgttgctcgacgttgggaaacagaatgggccagggaggttgagtgactgaagaccaagggttggtgcagcctcctcgccgcgctgcgggggctgggccgcacaggcttctgcccttctcggtgtccaggctccttgggtgatgctggagttgtcatggccgcagttcagtgtgagattttttaccaggtattgcgcttaagggacatgattttccattttcttcgcccggacaacttgaatgaaatgggcactgttgattccacttctgtcgaggagcttcggggctcagagaggtgatgacgtgcccaaggtgacgcaactcgtgaacagccgtgcctgccttgggcgcagctccggcgccagagctgggctcttcaacacggcatttagcgcagaaagtcgtggttcaggcagtatgggccgctgtgacaaaacacctaagactgggtagtttataaagaacagacattcaggccaggcacggtgactcacgcctgtaatcccagcactttgggaggccgaggcgcgtggatcatttgaggtcaggagtttgaaaccagcctggccaacatggtgaaaccccatctctactaaaaaaacaaaactagctgggggtggtggtgtatgcctgtggtcccagctacttgggaggctaaggtagaagaattgcttgaacctgggaggcagagattgcagtgagccgagccactgcactccagcactccagcctgggtgacagagcaagactctctctcaaaaaaaaa

SEQ ID NO: 379614 - DNA, 4371 bp, Homo sapiens
gcatcctgtacgcagcttgcagttttccagttttctctttgtgggcgttatttccataagagtgcagacttctgggatgcaggtcagggctgtgacttccctgggtttctctggagtgagatcagtgtggagtggagaggtgtgtgctggaggaagaggccttggcctgtgctccgcattgcctactcctctcacctggaaacaccggacttcaggagtcactcggctgtggcagaaaataaagttcttgaaaggaaagcagaggcgctcactcacatcgatgccctaaacatcaataccacatcaatgtcccaagtggcgggctggtccgagtctctgttttggaagctcaaccagtggctgatgattcacatgtttcactgccgcatggttctaacctaccacatgtggtgggtgtgtttctggcactgggacggcctggtcagcagcctgtatctgcctcatttgacactgttccttgtcggactggctctgcttacgctaatcattaatccatattggacccataagaagactcagcagcttctcaatccggtggactggaacttcgcacagccagaagccaagagcaggccagaaggcaacgggcagctgctgcggaagaagaggccatagctgctccagccggggctccggggcggcagcagagctggcacaccgattctgggaagccccgcgaatgatggcttttgaattaatgaggcagtgaatgttttgtgtttacttctaagggaaatactaactttctttcgcattagtattaattttgaagtagctacaaagtatttttaagaaattataattttatgactgtctggcaggctctgtcagtttagccgcgccggaccgtgtcaagcatctaggagaggagtccatggtgtccaggcatcggggcgtcacacctgttgaggagtggggtggctttgaatgctggaaatggcttcatagtgaagtgcctcccacagggcgggtgggtcagcgttgactctttccagctgcacactcatatgccgtgtgtcttattcagaagtcacattcttttcagttggagagaattgggctaagatagaaaataacatgatttgttccttattaaagtttcccagcgtatgaaattctaagctgggtggggtggctcacacccgacgtaatcccagcacgttgggaggccgaggcaggtggatcacttgaggccaggagttcgagaccagcctggtcaagatggtgaaaccccatctctactaaaattacaaaaattagccgggtgtcgtggcacacacctgtaatcccagctatttgggaggccaaggcaggagaattgcctgaacccgggaggcggaggttgcagtgagctgagatcgcaccactgcactccagcactccagcctgggtgacagagcaagactctctctcataaaaaaaaaaaaaaaaaaaattctagaccgaagtgtacggcagtgccatctggtggcaagtggtacaaagacaacgctgaggggtagtgactcctgtagcagcagagacgccttggagtttaacccccaccaaccagagcgtgggctggtaaagatgaaatcttgcaagttttttttttttttaaatcatggtacctgttttaaaatgagaagttattattcatactgtgttgctcatttgacaaaataaggtaaggatttcataatcaggttgtctgggtttcagagctgtttttaattgactgagttacctacaggcacccaatctagaccctaattctgtggttggtgttcctctgtagatttcaagacaagtagtgatgtcattttctccctgagctgtagggtggacctggacccctcagagatgctcgactgcagggtcctggggtccctagagtggtcctgcagcagcccctggcaatgagctgcctgatgatgagtcccaaggtacattgttctactgttttatacccaggtagaagttacacagcaatttagcaatgttgttaacagacatacagaattgtgtgtgtgtgtgtgtgtgtgtgtgtgtgtgtgagtgttttgatataaacgtgcaattaaaattcaaagtttattttttatcacaagcacctttgaaatgtacgtggaaaacgtcggctgctcgtgagaatcatgtgtgacttacgttccttatgttttatggaactctcggaacagtgttttgtttttgtttagtttttgttttcgtttttttgagacggagcctggctttggctcccaggctggagtccagtggtgtgatctcggctcactgcaacctccacctcccgggttccagggattctcctgcctcaccctttcaagtagctgggattacaggtacctctaccatgcctggctgattttttgtatttttagtagagacagggtttcaccatgttggccaggctggtctctgactcctgactaaaagtgatctgcccacctcggcctcccaaagttctgggattacgggcgtgagccacttcacccggcccggagcggtgtattttgattgctggtgctttaactatattgaccaaggtgtatagtaacctatttatcacattttacgaagcaattttaatcttaaacacatccagcaaatggtgtccctgctgaaacttttaactggaaacctcacacctggcaggcagcactctctgcagccgtgcccttgtggagtcagcaggagctggtgtttttcagccagacagaggcataataaagtgactgatgtttacagaacccaaatgatgtcttcctctctctcaaaataaactaacctattcatattgctgtgaatgctttatcttggagatagaaaatataatgataaattcatcatgtgttcagaattcgatttggagttggaagtggacagcctaatttttatctcacctccactaggactttgaccttcccaggggtccacactttacctcctgtatcttcatacgcgtgtgtggatgcatagagatggaggtgctgtagagaagcacaggctcacccgctccgtccagtgtcacccacacattggtccggggacccctcagtgcagagcctgaagttgggggtttaggggtggaaaaggcttcgtgaaatgttaatgatgcgtacaccttccagatggcacagcactttcccatggtcctcactggcctcagtctccctgaccggcagtgtgaggggatgtagctatagtggagcatggtacaagcgacattcatgagctctgacttcttggtgccaggttggtgtgagcctgggcccggcccactcagcggcccacattggccagcattcagctgcacgtgtgtgctgcgtgcttcacatcctctattgagagttacagcaagtgttaaacgaggtgagttcacataacaggaattctggaactgcttgaaaactaggacgattgggcaatatcggccttaactccacctgatggcaggtgacccggatagaaaatggccctgcgtttagccaggatgtggctctccagcttggcttcagtgtgatcacttgtcagtgcgctttctctttcgatagtgaaatccttctctatacctatgttttgttttgttgctcgacgttgggaaacagaatgggccagggaggttgagtgactgaagaccaagggttggtgcagcctcctcgccgcgctgcgggggctgggccgcacaggcttctgcccttctcggtgtccaggctccttgggtgatgctggagttgtcatggccgcagttcagtgtgagattttttaccaggtattgcgcttaagggacatgattttccattttcttcgcccggacaacttgaatgaaatgggcactgttgattccacttctgtcgaggagcttcggggctcagagaggtgatgacgtgcccaaggtgacgcaactcgtgaacagccgtgcctgccttgggcgcagctccggcgccagagctgggctcttcaacacggcatttagcgcagaaagtcgtggttcaggcagtatgggccgctgtgacaaaacacctaagactgggtagtttataaagaacagacattcaggccaggcacggtgactcacgcctgtaatcccagcactttgggaggccgaggcgcgtggatcatttgaggtcaggagtttgaaaccagcctggccaacatggtgaaaccccatctctactaaaaaaacaaaactagctgggggtggtggtgtatgcctgtggtcccagctacttgggaggctaaggtagaagaattgcttgaacctgggaggcagagattgcagtgagccgagccactgcactccagcactccagcctgggtgacagagcaagactctctctcaaaaaaaaa

SEQ ID NO: 379615 - DNA, 4123 bp, Homo sapiens
gtctacaggagactggtagcctcgagaggaaaaataagcataacaaatcactcctgccttcggggtcgaggcgggctggtccgagtctctgttttggaagctcaaccagtggctgatgattcacatgtttcactgccgcatggttctaacctaccacatgtggtgggtgtgtttctggcactgggacggcctggtcagcagcctgtatctgcctcatttgacactgttccttgtcggactggctctgcttacgctaatcattaatccatattggacccataagaagactcagcagcttctcaatccggtggactggaacttcgcacagccagaagccaagagcaggccagaaggcaacgggcagctgctgcggaagaagaggccatagctgctccagccggggctccggggcggcagcagagctggcacaccgattctgggaagccccgcgaatgatggcttttgaattaatgaggcagtgaatgttttgtgtttacttctaagggaaatactaactttctttcgcattagtattaattttgaagtagctacaaagtatttttaagaaattataattttatgactgtctggcaggctctgtcagtttagccgcgccggaccgtgtcaagcatctaggagaggagtccatggtgtccaggcatcggggcgtcacacctgttgaggagtggggtggctttgaatgctggaaatggcttcatagtgaagtgcctcccacagggcgggtgggtcagcgttgactctttccagctgcacactcatatgccgtgtgtcttattcagaagtcacattcttttcagttggagagaattgggctaagatagaaaataacatgatttgttccttattaaagtttcccagcgtatgaaattctaagctgggtggggtggctcacacccgacgtaatcccagcacgttgggaggccgaggcaggtggatcacttgaggccaggagttcgagaccagcctggtcaagatggtgaaaccccatctctactaaaattacaaaaattagccgggtgtcgtggcacacacctgtaatcccagctatttgggaggccaaggcaggagaattgcctgaacccgggaggcggaggttgcagtgagctgagatcgcaccactgcactccagcactccagcctgggtgacagagcaagactctctctcataaaaaaaaaaaaaaaaaaaattctagaccgaagtgtacggcagtgccatctggtggcaagtggtacaaagacaacgctgaggggtagtgactcctgtagcagcagagacgccttggagtttaacccccaccaaccagagcgtgggctggtaaagatgaaatcttgcaagttttttttttttttaaatcatggtacctgttttaaaatgagaagttattattcatactgtgttgctcatttgacaaaataaggtaaggatttcataatcaggttgtctgggtttcagagctgtttttaattgactgagttacctacaggcacccaatctagaccctaattctgtggttggtgttcctctgtagatttcaagacaagtagtgatgtcattttctccctgagctgtagggtggacctggacccctcagagatgctcgactgcagggtcctggggtccctagagtggtcctgcagcagcccctggcaatgagctgcctgatgatgagtcccaaggtacattgttctactgttttatacccaggtagaagttacacagcaatttagcaatgttgttaacagacatacagaattgtgtgtgtgtgtgtgtgtgtgtgtgtgtgtgtgagtgttttgatataaacgtgcaattaaaattcaaagtttattttttatcacaagcacctttgaaatgtacgtggaaaacgtcggctgctcgtgagaatcatgtgtgacttacgttccttatgttttatggaactctcggaacagtgttttgtttttgtttagtttttgttttcgtttttttgagacggagcctggctttggctcccaggctggagtccagtggtgtgatctcggctcactgcaacctccacctcccgggttccagggattctcctgcctcaccctttcaagtagctgggattacaggtacctctaccatgcctggctgattttttgtatttttagtagagacagggtttcaccatgttggccaggctggtctctgactcctgactaaaagtgatctgcccacctcggcctcccaaagttctgggattacgggcgtgagccacttcacccggcccggagcggtgtattttgattgctggtgctttaactatattgaccaaggtgtatagtaacctatttatcacattttacgaagcaattttaatcttaaacacatccagcaaatggtgtccctgctgaaacttttaactggaaacctcacacctggcaggcagcactctctgcagccgtgcccttgtggagtcagcaggagctggtgtttttcagccagacagaggcataataaagtgactgatgtttacagaacccaaatgatgtcttcctctctctcaaaataaactaacctattcatattgctgtgaatgctttatcttggagatagaaaatataatgataaattcatcatgtgttcagaattcgatttggagttggaagtggacagcctaatttttatctcacctccactaggactttgaccttcccaggggtccacactttacctcctgtatcttcatacgcgtgtgtggatgcatagagatggaggtgctgtagagaagcacaggctcacccgctccgtccagtgtcacccacacattggtccggggacccctcagtgcagagcctgaagttgggggtttaggggtggaaaaggcttcgtgaaatgttaatgatgcgtacaccttccagatggcacagcactttcccatggtcctcactggcctcagtctccctgaccggcagtgtgaggggatgtagctatagtggagcatggtacaagcgacattcatgagctctgacttcttggtgccaggttggtgtgagcctgggcccggcccactcagcggcccacattggccagcattcagctgcacgtgtgtgctgcgtgcttcacatcctctattgagagttacagcaagtgttaaacgaggtgagttcacataacaggaattctggaactgcttgaaaactaggacgattgggcaatatcggccttaactccacctgatggcaggtgacccggatagaaaatggccctgcgtttagccaggatgtggctctccagcttggcttcagtgtgatcacttgtcagtgcgctttctctttcgatagtgaaatccttctctatacctatgttttgttttgttgctcgacgttgggaaacagaatgggccagggaggttgagtgactgaagaccaagggttggtgcagcctcctcgccgcgctgcgggggctgggccgcacaggcttctgcccttctcggtgtccaggctccttgggtgatgctggagttgtcatggccgcagttcagtgtgagattttttaccaggtattgcgcttaagggacatgattttccattttcttcgcccggacaacttgaatgaaatgggcactgttgattccacttctgtcgaggagcttcggggctcagagaggtgatgacgtgcccaaggtgacgcaactcgtgaacagccgtgcctgccttgggcgcagctccggcgccagagctgggctcttcaacacggcatttagcgcagaaagtcgtggttcaggcagtatgggccgctgtgacaaaacacctaagactgggtagtttataaagaacagacattcaggccaggcacggtgactcacgcctgtaatcccagcactttgggaggccgaggcgcgtggatcatttgaggtcaggagtttgaaaccagcctggccaacatggtgaaaccccatctctactaaaaaaacaaaactagctgggggtggtggtgtatgcctgtggtcccagctacttgggaggctaaggtagaagaattgcttgaacctgggaggcagagattgcagtgagccgagccactgcactccagcactccagcctgggtgacagagcaagactctctctcaaaaaaaaa

SEQ ID NO: 379616 - DNA, 2049 bp, Homo sapiens
ggaccaaagttcccacctgtcaaaaaatggaattaggggtggcttgttacaggccccaagaatgcccatccttttggcagaccaaggtagtgtggttggcctcagagacaggtcccactctaagagtgataaaagtgatctgcccacctcggcctcccaaagttctgggattacgggcgtgagccacttcacccggcccggagcggtgtattttgattgctggtgctttaactatattgaccaaggtgtatagtaacctatttatcacattttacgaagcaattttaatcttaaacacatccagcaaatggtgtccctgctgaaacttttaactggaaacctcacacctggcaggcagcactctctgcagccgtgcccttgtggagtcagcaggagctggtgtttttcagccagacagaggcataataaagtgactgatgtttacagaacccaaatgatgtcttcctctctctcaaaataaactaacctattcatattgctgtgaatgctttatcttggagatagaaaatataatgataaattcatcatgtgttcagaattcgatttggagttggaagtggacagcctaatttttatctcacctccactaggactttgaccttcccaggggtccacactttacctcctgtatcttcatacgcgtgtgtggatgcatagagatggaggtgctgtagagaagcacaggctcacccgctccgtccagtgtcacccacacattggtccggggacccctcagtgcagagcctgaagttgggggtttaggggtggaaaaggcttcgtgaaatgttaatgatgcgtacaccttccagatggcacagcactttcccatggtcctcactggcctcagtctccctgaccggcagtgtgaggggatgtagctatagtggagcatggtacaagcgacattcatgagctctgacttcttggtgccaggttggtgtgagcctgggcccggcccactcagcggcccacattggccagcattcagctgcacgtgtgtgctgcgtgcttcacatcctctattgagagttacagcaagtgttaaacgaggtgagttcacataacaggaattctggaactgcttgaaaactaggacgattgggcaatatcggccttaactccacctgatggcaggtgacccggatagaaaatggccctgcgtttagccaggatgtggctctccagcttggcttcagtgtgatcacttgtcagtgcgctttctctttcgatagtgaaatccttctctatacctatgttttgttttgttgctcgacgttgggaaacagaatgggccagggaggttgagtgactgaagaccaagggttggtgcagcctcctcgccgcgctgcgggggctgggccgcacaggcttctgcccttctcggtgtccaggctccttgggtgatgctggagttgtcatggccgcagttcagtgtgagattttttaccaggtattgcgcttaagggacatgattttccattttcttcgcccggacaacttgaatgaaatgggcactgttgattccacttctgtcgaggagcttcggggctcagagaggtgatgacgtgcccaaggtgacgcaactcgtgaacagccgtgcctgccttgggcgcagctccggcgccagagctgggctcttcaacacggcatttagcgcagaaagtcgtggttcaggcagtatgggccgctgtgacaaaacacctaagactgggtagtttataaagaacagacattcaggccaggcacggtgactcacgcctgtaatcccagcactttgggaggccgaggcgcgtggatcatttgaggtcaggagtttgaaaccagcctggccaacatggtgaaaccccatctctactaaaaaaacaaaactagctgggggtggtggtgtatgcctgtggtcccagctacttgggaggctaaggtagaagaattgcttgaacctgggaggcagagattgcagtgagccgagccactgcactccagcactccagcctgggtgacagagcaagactctctctcaaaaaaaaa

SEQ ID NO: 379617 - DNA, 747 bp, Homo sapiens
ggcggtgtttgaggccggccagtcgtgactgggcggcaatgaggtcagtgactgccgggagtcctgcaggggcggggcggcgccaagcgcagggagcccggctgagtggcagcccaggtgagcgctcaggtagcccgggtgagggccgggaacccagattgaagatggatacgtgacaatcccagggaccgctgcactgacttcatttccttagacaagacacagtgtagggcccggcccgtgttggccccaggactcctttggaatatagctgtggacaatgaatcctgcgagcgatgggggcacatcagagaatgctcgactgcagggtcctggggtccctagagtggtcctgcagcagcccctggcaatgagctgcctgatgatgagtcccaaggtacattgttctactgttttatacccaggtagaagttacacagcaatttagcaatgttgttaacagacatacagaattgtgtgtgtgtgtgtgtgtgtgtgtgtgtgtgtgagtgttttgatataaacgtgcaattaaaattcaaagtttattttttatcacaagcacctttgaaatgtacgtggaaaacgtcggctgctcgtgagaatcatgtgtgacttacgttccttatgttttatggaactctcggaacagtgttttgtttttgtttagtttttgttttcgtttttttgagacggaccactgcactccagcactccagcctgggtgacagagcaagactctctctc

SEQ ID NO: 379618 - DNA, 3877 bp, Homo sapiens
ggcggtgtttgaggccggccagtcgtgactgggcggcaatgaggtcagtgactgccgggagtcctgcaggggcggggcggcgccaagcgcagggagcccggctgagtggcagcccagattgaagatggatacgtgacaatcccagggaccgctgcactgacttcatttccttagacaagacacagtgtagggcccggcccgtgttggccccaggactcctttggaatatagctgtggacaatgaatcctgcgagcgatgggggcacatcagagagcatttttgacctggactatgcatcctgggggatccgctccacgctgatggtcgctggctttgtcttctacttgggcgtctttgtggtctgccaccagctgtcctcttccctgaatgccacttaccgttctttggtggccagagagaaggtcttctgggacctggcggccacgcgtgcagtctttggtgttcagagcacagccgcaggcctgtgggctctgctgggggaccctgtgctgcatgccgacaaggcgcgtggccagcagaactggtgctggtttcacatcacgacagcaacgggattcttttgctttgaaaatgttgcagtccacctgtccaacttgatcttccggacatttgacttgtttctggttatccaccatctctttgcctttcttgggtttcttggctgcttggtcaatctccaagctggccactatctagctatgaccacgttgctcctggagatgagcacgccctttacctgcgtttcctggatgctcttaaaggcgggctggtccgagtctctgttttggaagctcaaccagtggctgatgattcacatgtttcactgccgcatggttctaacctaccacatgtggtgggtgtgtttctggcactgggacggcctggtcagcagcctgtatctgcctcatttgacactgttccttgtcggactggctctgcttacgctaatcattaatccatattggacccataagaagactcagcagcttctcaatccggtggactggaacttcgcacagccagaagccaagagcaggccagaaggcaacgggcagctgctgcggaagaagaggccatagctgctccagccggggctccggggcggcagcagagctggcacaccgattctgggaagccccgcgaatgatggcttttgaattaatgaggcagtgaatgttttgtgtttacttctaagggaaatactaactttctttcgcattagtattaattttgaagtagctacaaagtatttttaagaaattataattttatgactgtctggcaggctctgtcagtttagccgcgccggaccgtgtcaagcatctaggagaggagtccatggtgtccaggcatcggggcgtcacacctgttgaggagtggggtggctttgaatgctggaaatggcttcatagtgaagtgcctcccacagggcgggtgggtcagcgttgactctttccagctgcacactcatatgccgtgtgtcttattcagaagtcacattcttttcagttggagagaattgggctaagatagaaaataacatgatttgttccttattaaagtttcccagcgtatgaaattctaagctgggtggggtggctcacacccgacgtaatcccagcacgttgggaggccgaggcaggtggatcacttgaggccaggagttcgagaccagcctggtcaagatggtgaaaccccatctctactaaaattacaaaaattagccgggtgtcgtggcacacacctgtaatcccagctatttgggaggccaaggcaggagaattgcctccacctcccgggttccagggattctcctgcctcaccctttcaagtagctgggattacaggtacctctaccatgcctggctgattttttgtatttttagtagagacagggtttcaccatgttggccaggctggtctctgactcctgactaaaagtgatctgcccacctcggcctcccaaagttctgggattacgggcgtgagccacttcacccggcccggagcggtgtattttgattgctggtgctttaactatattgaccaaggtgtatagtaacctatttatcacattttacgaagcaattttaatcttaaacacatccagcaaatggtgtccctgctgaaacttttaactggaaacctcacacctggcaggcagcactctctgcagccgtgcccttgtggagtcagcaggagctggtgtttttcagccagacagaggcataataaagtgactgatgtttacagaacccaaatgatgtcttcctctctctcaaaataaactaacctattcatattgctgtgaatgctttatcttggagatagaaaatataatgataaattcatcatgtgttcagaattcgatttggagttggaagtggacagcctaatttttatctcacctccactaggactttgaccttcccaggggtccacactttacctcctgtatcttcatacgcgtgtgtggatgcatagagatggaggtgctgtagagaagcacaggctcacccgctccgtccagtgtcacccacacattggtccggggacccctcagtgcagagcctgaagttgggggtttaggggtggaaaaggcttcgtgaaatgttaatgatgcgtacaccttccagatggcacagcactttcccatggtcctcactggcctcagtctccctgaccggcagtgtgaggggatgtagctatagtggagcatggtacaagcgacattcatgagctctgacttcttggtgccaggttggtgtgagcctgggcccggcccactcagcggcccacattggccagcattcagctgcacgtgtgtgctgcgtgcttcacatcctctattgagagttacagcaagtgttaaacgaggtgagttcacataacaggaattctggaactgcttgaaaactaggacgattgggcaatatcggccttaactccacctgatggcaggtgacccggatagaaaatggccctgcgtttagccaggatgtggctctccagcttggcttcagtgtgatcacttgtcagtgcgctttctctttcgatagtgaaatccttctctatacctatgttttgttttgttgctcgacgttgggaaacagaatgggccagggaggttgagtgactgaagaccaagggttggtgcagcctcctcgccgcgctgcgggggctgggccgcacaggcttctgcccttctcggtgtccaggctccttgggtgatgctggagttgtcatggccgcagttcagtgtgagattttttaccaggtattgcgcttaagggacatgattttccattttcttcgcccggacaacttgaatgaaatgggcactgttgattccacttctgtcgaggagcttcggggctcagagaggtgatgacgtgcccaaggtgacgcaactcgtgaacagccgtgcctgccttgggcgcagctccggcgccagagctgggctcttcaacacggcatttagcgcagaaagtcgtggttcaggcagtatgggccgctgtgacaaaacacctaagactgggtagtttataaagaacagacattcaggccaggcacggtgactcacgcctgtaatcccagcactttgggaggccgaggcgcgtggatcatttgaggtcaggagtttgaaaccagcctggccaacatggtgaaaccccatctctactaaaaaaacaaaactagctgggggtggtggtgtatgcctgtggtcccagctacttgggaggctaaggtagaagaattgcttgaacctgggaggcagagattgcagtgagccgagccactgcactccagcactccagcctgggtgacagagcaagactctctctcaaaaaaaaa

SEQ ID NO: 379619 - DNA, 4876 bp, Homo sapiens
ggcggtgtttgaggccggccagtcgtgactgggcggcaatgaggtcagtgactgccgggagtcctgcaggggcggggcggcgccaagcgcagggagcccggctgagtggcagcccaggtgagcgctcaggtagcccgggtgagggccgggaacccagattgaagatggatacgtgacaatcccagggaccgctgcactgacttcatttccttagacaagacacagtgtagggcccggcccgtgttggccccaggactcctttggaatatagctgtggacaatgaatcctgcgagcgatgggggcacatcagagagcatttttgacctggactatgcatcctgggggatccgctccacgctgatggtcgctggctttgtcttctacttgggcgtctttgtggtctgccaccagctgtcctcttccctgaatgccacttaccgttctttggtggccagagagaaggtcttctgggacctggcggccacgcgtgcagtctttggtgttcagagcacagccgcaggcctgtgggctctgctgggggaccctgtgctgcatgccgacaaggcgcgtggccagcagaactggtgctggtttcacatcacgacagcaacgggattcttttgctttgaaaatgttgcagtccacctgtccaacttgatcttccggacatttgacttgtttctggttatccaccatctctttgcctttcttgggtttcttggctgcttggtcaatctccaagctggccactatctagctatgaccacgttgctcctggagatgagcacgccctttacctgcgtttcctggatgctcttaaaggcgggctggtccgagtctctgttttggaagctcaaccagtggctgatgattcacatgtttcactgccgcatggttctaacctaccacatgtggtgggtgtgtttctggcactgggacggcctggtcagcagcctgtatctgcctcatttgacactgttccttgtcggactggctctgcttacgctaatcattaatccatattggacccataagaagactcagcagcttctcaatccggtggactggaacttcgcacagccagaagccaagagcaggccagaaggcaacgggcagctgctgcggaagaagaggccatagctgctccagccggggctccggggcggcagcagagctggcacaccgattctgggaagccccgcgaatgatggcttttgaattaatgaggcagtgaatgttttgtgtttacttctaagggaaatactaactttctttcgcattagtattaattttgaagtagctacaaagtatttttaagaaattataattttatgactgtctggcaggctctgtcagtttagccgcgccggaccgtgtcaagcatctaggagaggagtccatggtgtccaggcatcggggcgtcacacctgttgaggagtggggtggctttgaatgctggaaatggcttcatagtgaagtgcctcccacagggcgggtgggtcagcgttgactctttccagctgcacactcatatgccgtgtgtcttattcagaagtcacattcttttcagttggagagaattgggctaagatagaaaataacatgatttgttccttattaaagtttcccagcgtatgaaattctaagctgggtggggtggctcacacccgacgtaatcccagcacgttgggaggccgaggcaggtggatcacttgaggccaggagttcgagaccagcctggtcaagatggtgaaaccccatctctactaaaattacaaaaattagccgggtgtcgtggcacacacctgtaatcccagctatttgggaggccaaggcaggagaattgcctgaacccgggaggcggaggttgcagtgagctgagatcgcaccactgcactccagcactccagcctgggtgacagagcaagactctctctcataaaaaaaaaaaaaaaaaaaattctagaccgaagtgtacggcagtgccatctggtggcaagtggtacaaagacaacgctgaggggtagtgactcctgtagcagcagagacgccttggagtttaacccccaccaaccagagcgtgggctggtaaagatgaaatcttgcaagttttttttttttttaaatcatggtacctgttttaaaatgagaagttattattcatactgtgttgctcatttgacaaaataaggtaaggatttcataatcaggttgtctgggtttcagagctgtttttaattgactgagttacctacaggcacccaatctagaccctaattctgtggttggtgttcctctgtagatttcaagacaagtagtgatgtcattttctccctgagctgtagggtggacctggacccctcagagatgctcgactgcagggtcctggggtccctagagtggtcctgcagcagcccctggcaatgagctgcctgatgatgagtcccaaggtacattgttctactgttttatacccaggtagaagttacacagcaatttagcaatgttgttaacagacatacagaattgtgtgtgtgtgtgtgtgtgtgtgtgtgtgtgtgagtgttttgatataaacgtgcaattaaaattcaaagtttattttttatcacaagcacctttgaaatgtacgtggaaaacgtcggctgctcgtgagaatcatgtgtgacttacgttccttatgttttatggaactctcggaacagtgttttgtttttgtttagtttttgttttcgtttttttgagacggagcctggctttggctcccaggctggagtccagtggtgtgatctcggctcactgcaacctccacctcccgggttccagggattctcctgcctcaccctttcaagtagctgggattacaggtacctctaccatgcctggctgattttttgtatttttagtagagacagggtttcaccatgttggccaggctggtctctgactcctgactaaaagtgatctgcccacctcggcctcccaaagttctgggattacgggcgtgagccacttcacccggcccggagcggtgtattttgattgctggtgctttaactatattgaccaaggtgtatagtaacctatttatcacattttacgaagcaattttaatcttaaacacatccagcaaatggtgtccctgctgaaacttttaactggaaacctcacacctggcaggcagcactctctgcagccgtgcccttgtggagtcagcaggagctggtgtttttcagccagacagaggcataataaagtgactgatgtttacagaacccaaatgatgtcttcctctctctcaaaataaactaacctattcatattgctgtgaatgctttatcttggagatagaaaatataatgataaattcatcatgtgttcagaattcgatttggagttggaagtggacagcctaatttttatctcacctccactaggactttgaccttcccaggggtccacactttacctcctgtatcttcatacgcgtgtgtggatgcatagagatggaggtgctgtagagaagcacaggctcacccgctccgtccagtgtcacccacacattggtccggggacccctcagtgcagagcctgaagttgggggtttaggggtggaaaaggcttcgtgaaatgttaatgatgcgtacaccttccagatggcacagcactttcccatggtcctcactggcctcagtctccctgaccggcagtgtgaggggatgtagctatagtggagcatggtacaagcgacattcatgagctctgacttcttggtgccaggttggtgtgagcctgggcccggcccactcagcggcccacattggccagcattcagctgcacgtgtgtgctgcgtgcttcacatcctctattgagagttacagcaagtgttaaacgaggtgagttcacataacaggaattctggaactgcttgaaaactaggacgattgggcaatatcggccttaactccacctgatggcaggtgacccggatagaaaatggccctgcgtttagccaggatgtggctctccagcttggcttcagtgtgatcacttgtcagtgcgctttctctttcgatagtgaaatccttctctatacctatgttttgttttgttgctcgacgttgggaaacagaatgggccagggaggttgagtgactgaagaccaagggttggtgcagcctcctcgccgcgctgcgggggctgggccgcacaggcttctgcccttctcggtgtccaggctccttgggtgatgctggagttgtcatggccgcagttcagtgtgagattttttaccaggtattgcgcttaagggacatgattttccattttcttcgcccggacaacttgaatgaaatgggcactgttgattccacttctgtcgaggagcttcggggctcagagaggtgatgacgtgcccaaggtgacgcaactcgtgaacagccgtgcctgccttgggcgcagctccggcgccagagctgggctcttcaacacggcatttagcgcagaaagtcgtggttcaggcagtatgggccgctgtgacaaaacacctaagactgggtagtttataaagaacagacattcaggccaggcacggtgactcacgcctgtaatcccagcactttgggaggccgaggcgcgtggatcatttgaggtcaggagtttgaaaccagcctggccaacatggtgaaaccccatctctactaaaaaaacaaaactagctgggggtggtggtgtatgcctgtggtcccagctacttgggaggctaaggtagaagaattgcttgaacctgggaggcagagattgcagtgagccgagccactgcactccagcactccagcctgggtgacagagcaagactctctctcaaaaaaaaa

SEQ ID NO: 379620 - DNA, 321 bp, Homo sapiens
aagtagctgggattacaggtgcatgcctggctaatttttgtatttttattagtagagacagggtttcaccacgttggccaggctggtgttgaactcccaacctcaggttatctgcccacctcggcctcccaaagtgctgggattacaggcatgagccactgtgcccagccgtcatgaactttttaaagattacaaagtgggccaggtgcagtggcccaatcctgtaatccccagcactttgggaggccaaggctgatggatcacttgagctcaaaagtttgagaccagcctggacgacatggcaagaccccatctctacag

SEQ ID NO: 379621 - DNA, 358 bp, Homo sapiens
gttgctatgacaattgtcctgcatacctaatattaaatttaatgaattaatgtggcgtatagagtaatagtaacttaactagtactccgataatgccagtattccctgtgttactaagttaatggaatcagaattttggagttacaatatagaggttttttaggccaatttttctatgggattctagggatctttttataacatttctgcttttcgaagcagtctataccattgctggagagccgtaattactaggatgctatttctttttgtttgtttgtttgagacagggtcttgctctgtcatccaggccggagtgcagtgggtccaactcagttcactgcaaccaccacctcct

SEQ ID NO: 379622 - DNA, 2347 bp, Homo sapiens
  misc_feature (1188)..(1188): n is a, c, g, or t
ctgtttcagggccattggactctccgtcctgcccagagcaagatgtgtcaccagcagttggtcatctcttggttttccctggtttttctggcatctcccctcgtggccatatgggaactgaagaaagatgtttatgtcgtagaattggattggtatccggatgcccctggagaaatggtggtcctcacctgtgacacccctgaagaagatggtatcacctggaccttggaccagagcagtgaggtcttaggctctggcaaaaccctgaccatccaagtcaaagagtttggagatgctggccagtacacctgtcacaaaggaggcgaggttctaagccattcgctcctgctgcttcacaaaaaggaagatggaatttggtccactgatattttaaaggaccagaaagaacccaaaaataagacctttctaagatgcgaggccaagaattattctggacgtttcacctgctggtggctgacgacaatcagtactgatttgacattcagtgtcaaaagcagcagaggctcttctgacccccaaggggtgacgtgcggagctgctacactctctgcagagagagtcagaggggacaacaaggagtatgagtactcagtggagtgccaggaggacagtgcctgcccagctgctgaggagagtctgcccattgaggtcatggtggatgccgttcacaagctcaagtatgaaaactacaccagcagcttcttcatcagggacatcatcaaacctgacccacccaagaacttgcagctgaagccattaaagaattctcggcaggtggaggtcagctgggagtaccctgacacctggagtactccacattcctacttctccctgacattctgcgttcaggtccagggcaagagcaagagagaaaagaaagatagagtcttcacggacaagacctcagccacggtcatctgccgcaaaaatgccagcattagcgtgcgggcccaggaccgctactatagctcatcttggagcgaatgggcatctgtgccctgcagttaggttctgatccaggatgaaaatttggaggaaaagtggaagatattaagcaaaatgtttaaagacacaacggaatagacccaaaaagataatttctatctgatttgctttaaaacgtttttttaggatcacaatgatatctttgctgtatttgtatagttngatgctaaatgctcattgaaacaatcagctaatttatgtatagattttccagctctcaagttgccatgggccttcatgctatttaaatatttaagtaatttatgtatttattagtatattactgttatttaacgtttgtctgccaggatgtatggaatgtttcatactcttatgacctgatccatcaggatcagtccctattatgcaaaatgtgaatttaattttatttgtactgacaacttttcaagcaaggctgcaagtacatcagttttatgacaatcaggaagaatgcagtgttctgataccagtgccatcatacacttgtgatggatgggaacgcaagagatacttacatggaaacctgacaatgcaaacctgttgagaagatccaggagaacaagatgctagttcccatgtctgtgaagacttcctggagatggtgttgataaagcaatttagggccacttacacttctaagcaagtttaatctttggatgcctgaattttaaaagggctagaaaaaaatgattgaccagcctgggaaacataacaagaccccgtctctacaaaaaaaatttaaaattagccaggcgtggtggctcatgcttgtggtcccagctgttcaggaggatgaggcaggaggatctcttgagcccaggaggtcaaggctatggtgagccgtgattgtgccactgcataccagcctaggtgacagaatgagaccctgtctcaaaaaaaaaaatgattgaaattaaaattcagctttagcttccatggcagtcctcacccccacctctctaaaagacacaggaggatgacacagaaacaccgtaagtgtctggaaggcaaaaagatcttaagattcaagagagaggacaagtagttatggctaaggacatgaaattgtcagaatggcaggtggcttcttaacagccatgtgagaagcagacagatgcaaagaaaatctggaatccctttctcattagcatgaatgaacctgatacacaattatgaccagaaaatatggctccatgaaggtgctacttttaagtaatgtatgtgcgctctgtaaagtgattacatttgtttcctgtttgtttatttatttatttatttttgcattctgaggctgaactaataaaaactcttctttgtaatc

SEQ ID NO: 379623 - DNA, 351 bp, Homo sapiens
tttatctgttttaatgcacagaaatcacttagctttgtactgttcatataccacatgtcccactattaagagtctggtatacacgggcatcctgacattgttcactaccctttaatgtacttttggcataaacctgtcacagctatttagattgttaaacacctgcagcagcatacatttatcagccagaaataaatctggacaccttagcatctatttaaccgttagcccaacactacaataatcccaaatcccctctatcacacttgcctttttcttaatcctgtgtcatcaagacttaaaaatagatcattttatcctatctactctatataatcttcaaagatttaa

SEQ ID NO: 379624 - DNA, 251 bp, Homo sapiens
gggtgggattgcaagggctgatggatttacagattttcttacctgtataagaaaaattttatgaattttgtggagtttgtgagttctagaatggttttagagatatacattttgattattttaaagcatcaactcaaaactaggaggctgggcacaatagcccatgcctgtaatctcagcattttgggggctgaggtggggggattgcttgagaccagcctgagtaacgtagtgagaccccatctctacaa

SEQ ID NO: 379625 - DNA, 632 bp, Homo sapiens
ttccttcttcttttattcttaattttgattcattttgggagtgtggtgattaatttttttccagaaagggcaaatgagcagtacattgtatatcacagaatgcctgttacctttacaatttggatgagtagagaaatcttgggctacaaaactacagacattgctccattccagatggcatttaaaatgtgtagaagaggatcttcagtcttgtgacttttaaaattttttagatcaaccatgtttcttctattaaaacgagttattgtttattgggaacatctattagtcaaaggataaatctctgtaatcagcctttttgatctgcaccttttctcttactatatttgtcggagggtgctttttatcttttgctctggtgctttttgttcatcctaacttatttaagctgcagagaatcctttaaaagaaagcttttaaagcacaatatataacattgatgaaagcagttctgatctggataatgaacaaaaagtgggggaacttccctccatcttcgctttgtggactcatgagaacccacaggattctgaaaagtagttcagtattcactgttcatcatggattcaattttctttagtgctatgactatttactatttctgactcaaa

SEQ ID NO: 379626 - DNA, 418 bp, Homo sapiens
attcatccccacagctatacaacagcagatcttcactgtgtacctcctctgtgcacagctttgtgtttggagggaaggcaccctagggttatgggcaaagtagctcttacatgatgggccaattgctttcctggattcttatttattcctcacattaacctcacatgttattatttttccattttacaggtgaggacatgggggcacagaggaccttgaggacaaggttgtttgtccaaggtcatgtgaaaagtaagtagtggaaccacggttcaccctaggtcagtggttcttaaatgagggaactttgcaccctgcacccccacagatatttggcaatgtctggagacatttttggttgtcacaactgggtgtcaggtgctcctgccgtcttctgggtagaggccaaagatgttgc

SEQ ID NO: 379627 - DNA, 1805 bp, Homo sapiens
gtagctgggattacaggcgcctaccacatgcccggctaatttttgtatttttggtagagacggggtttcaccatgttgttcaggctggtcttgaactactgacctcatgatttacccgccttggcctcccaaagtgctgggattacaggcgtgagcacatgcacccggccacatttggacttattaacacatatgaagtgcttggtattttagagtgcttccacacacacaatcctcattagagatagacaggatggggagaattaataagccattgcccgtgttacagtgaggaagcagaaagatgagaagtttgaactttggtcagcctggctttctcataacccattttgctgactaaattgcgagtatccctcctttggtatatttattggtgagaagtcacagcccttgtcccacaggttttgcagccaatcaggagaaagaaattaggcacctgtaaagtattactgaatcatagatagttcaccagtggtttgggcagttggcaaattaatttagggacatctgttctgaaacagcattgaaataggactgactgctttgctttctggttgtggcagccagagccaaaggcagatgaatgaggggctatgaggaggctactgtggctggaacagtatgaaagcaacctcagctcccacgcctggctgtaaaggggataataactgggtgctgcttcccagcctctttcatctgagaagttcaaagcacctcacccctattaacaccccacagagtaggtaggaagtaccaatagagcaagccaggaaaactgaggccaggaggcacagcctggggctagctgtgaatcacctgtggggcctagagcccaggaatcctgacgcccaggctactggacaaatcctttatcagggcattagggtgggtgctatgcttttgaaagcagtaccaacggctgtggtcgtgggttttgatgcttgccactcacagaggccccagctctcaccataacaaaccaaatgggggctggaaggcatcctttacaactttatggtctcgtatgcaagcaccctcagcattctctgcacccatggagtggagatgggtgggagtaatccaaggcctttattttcaggccatggtttgacagcaagggtattttcttccccaataaacgtagcttctgtctaccttccactggcagcaaaatgattttctgttctctgcatatactgaggggatctgcacagtgcagaaaggaagatgtccgagatccaagtgaggcctgttcagtgtgaaatgtctagggtagaagaaagaccatcctccattatggctggcatgtggcagtcatccttaagattatttttaaatttcctaataaatataggaaagtaaaaaacttagaaaatgaaagagaaggccgagcacggtggctcacgcctgtaatcccagcactttgggaggccaaggcgggctgatcacctgaggtcaggagtgtaagacaagcctgaccaacatggtgaaaacctgtctctgctaaaaatacaaaaaaatgagcagggcatggtggcatgcgcctgtaattccagctacttaggagactgaggcaggagaatcgcttgaacctgggaggcggaagtttcagtgagcggagatcgcgccattgcactccagcctgggtaacaagatggaaagtacatctcaaaaaaaaaaaaaacgaaaatgagtcacccagaatcccataacggaaactttctatggggtcatctgtttaagagaaaaataaattctatattcaaatgtatattttgtgtatt

SEQ ID NO: 379628 - DNA, 320 bp, Homo sapiens
ctatgagagtgtggcaaaaatcaagagggcttggaagttttttctttgctcttgcaactggctggatgcagttcatatatttttcaaccagtaggtggcaccccaacctaattttttgcagttgtaacctgggaggcggaagtttcagtgagcggagatcgcgccattgcactccagcctgggtaacaagatggaaagtacatctcaaaaaaaaaaaaaacgaaaatgagtcacccagaatcccataacggaaactttctatggggtcatctgtttaagagaaaaataaattctatattcaaatgtatattttgtgtatt

SEQ ID NO: 379629 - DNA, 359 bp, Homo sapiens
gagcttatcccaggaatgttaaattgttttttaaacaggaaaattggtaaatgtaatataccatataaatacaataaaggataaaattacatgggtatctcaatagatgtgaaagcatttgacaaagtccagcatctacacataattaaaactcatcaaactagaaagagaaaggattttcctcaatctgataaaggccatctactaaaaacccactgctaacatgatatttaatcgtaaaaaattaaatgattttcactagaattgtgatatttgctctcatcatctctctcccatcttgcattggaggttctagcatgggcaattgagtaagaaaatgaaataaatcaaaacataca

SEQ ID NO: 379630 - DNA, 392 bp, Homo sapiens
tcctggccaacatggtgaaaccgcttctctactaaaaatacactgggcgtggtggtgcacacctgtagtcccagctactcaggcaggaggatagcttgaacccgggagacagaggttgcagtgagccaagattgcatgccactgcacttcagcctggggacagagggagactgtgccttaaaaaaaaaaaaaaagaaagaaagaaaagaaaaaagaaaaaaaaacctagactgctggtgtgcaggtgtggggatggagggaggtgggcatgagggcaatgataacattcccttagaagtttgagtctgggtgtggtggctcacgcctgtaatcccagcactttgggaggccaaggtgggcggatcacctgaggtcaggagttcaagaccagt

SEQ ID NO: 379631 - DNA, 364 bp, Homo sapiens
ttttataaaatacccaaattgcaatctggacttggagtctcccatgtgggatctgcagcattcctagggctgctgtttgtttgatccctgggttttgtcagatggatgctttatcaggtcttctatgttgccctggctgttgctttccattccggctttaaattctcatactttgctcccctcatcaagcaaacctttactttctccatggcctcatcccaagggctccctgacatttcacgcaccagcttttgtttttgtttttgcatacgctcttggaatctttgggccaaatgggaaaaagaagttcatatgatctaccatataaatatgttcattagatgatgagtcttactatccagaa

SEQ ID NO: 379632 - DNA, 396 bp, Homo sapiens
ttgttgaatttggttttcgtcaatatttatcagagatattggcctgtggttttattttcttacaatatgtttgtctggctttaggtatcacggtgatgctggcctcacaaaatgtgtttggaagtattccctgtagctctaatttttggaagagtctaagaagtgttggtaataattattctttgaatgtttgataaaattcagccatgaagccatttggtcctaggcttttctattttggaaagtttttaatcacttcttcaatttctttatttgttgttggagtgttcaaactttttgtttcttcccaattcaatcttgatgggttagtttttctagaaatttatccaattcttctaggtcctccaatttgttggcataaaattgttcataata

SEQ ID NO: 379633 - DNA, 2767 bp, Homo sapiens
gcaggctggtaccggtccggagtatggattctaggcgcgtttcctgaaggtcgatggccaggtggtcttcataaactatactgccttgtgatgcctccctagaaatgagaggtctcaataccagctcagaccatgtggaccgcggatgagattgctcagctatgctatgaacactatgggatcaggctgcccaagaaggggaagcctgagccaaaccatgagtggacattattggcagcggtggtgaagatacaatctccagctgacaaggcctgcgacacccctgataagccggtgcaagtgacaaaggaagttgtgtcaatgggaacaggaacaaaatgcataggacagtccaaaatgaggaagaacggagacatcctcaatgatagccatgctgaggtcatagccagaaggagtttccaaaggtaccttctccaccaactccagttggcagccaccctgaaagaggatagcatctttgtcccaggaactcaaaaaggagtgtggaaacttagacgagacctcatttttgtgtttttctccagccatacaccctgtggggatgcctccatcattccgatgcttgagtttgaagatcagccttgctgtcctgtcttcagaaattgggccaacaactcatcagtagaagccagtagtaacctggaagctcctggaaatgaaagaaaatgtgaagaccctgacagtcctgtaaccaaaaagatgaggcttgagcctgggactgcagccagggaggtcaccaacggagcagctcaccatcagagttttggcaagcagaaaagtggcccaatctcaccaggcatccacagctgtgatctcactgtagagggactggctactgtcaccagaatagcccctggtagtgccaaagtgatagacgtttatagaactggagccaagtgtgtacctggagaagctggagactccggaaagccgggtgctgcgtttcaccaggtggggctgctccgagtgaagccaggccgtggagacagaacacgctccatgtcctgtagtgacaagatggcccgatggaacgtcctcggatgccaaggggcactgttgatgcacttgctggaagagcccatctacctgtcagctgtggtcattgggaagtgcccatacagccaggaagccatgcagagagcactgattggaaggtgtcagaatgtgtctgctttaccaaaaggcttcggagttcaagaattaaaaatactgcagtcagatttactatttgaacagagccgcagtgcggtgcaggcaaaaagggctgatagcccaggtcgacttgttccttgtggggcagccatcagctggagtgcagttcctgagcagcctttggatgttactgccaatggctttccacagggaacaacaaagaaaacaattggaagccttcaggcaagatcccaaatcagcaaagtggaactcttcagatcattccagaagctgctaagcagaattgcaagggacaagtggccacactccctcagggtgcagaagctggatacctaccaggagtacaaggaggctgcgtcctcttaccaggaagcctggagcacactccggaagcaggtgtttggatcctggatcagaaacccaccggattatcaccagttcaagtgagaaggaaatgtttgctctggtagcaggacccttcatcctgaactgccttcctccacgcaggacaagtcttagcttttttggtagttaaatcagggaacattctttctgagctttgcatctctgttgtgtaatacagatggaatctggaacttagagcaagctatacttgattgaagtagctctctgctaaaatggcatctcactaatgacctcactatctgacttccattgtgttttattgcttctctaaaatatgaaatcagagtttggaacatgatgctttgaaagtactctgcagcagctctgttttatgggttcctacattgattcagcaaatatttattgagctgaaatgatgtttgacgctctgcaagttttacagctttgcctagcatagcgaatatatattttgtattcccagcctttctttcttcagggagccattcttttcccattcttcagtgatcctgctctgtgcctcagacttggctgaagctaaccttactccctggctctaggaatagcctgtgagccagccctggactgccctggacttgttctcagaggtatcaggaaaggctttctgttttgatctggagctgtaagggtcacataatcatgggactgccggtggccatcttttcctactacctagagaaagccagcaaagaatgaaggcaacaaaggaaacagccaagagaatcaaagatctagtaacactgtttagatgtctcaattatgtgagacagattcctgttgttattttgattaagcctgtttgtgttggttttctgacttacaattgaaagagttctgtccaaaaagccaaaaggtggccaggcttggtggctcaggcctgtaatcccagcactttgggaagcccaggcaggcagatcacttgaggtcaggagttcaagaccagcctggccaacctggtgaaaccctgtctctactaaaaatgcaaaaactagccgggcatggtggcgcacacctgtaatcctagctactcgggaggctgaggcaggagaattgcttgaacccaggaggcggaggtagtggtgagcaaagatcgtaccgctgcactccagcctgggtgatagagcaagaccctatctcaaaaaaaaaa

SEQ ID NO: 379634 - DNA, 617 bp, Homo sapiens
ggcgcccttcagcggacacctgggacttgcagtgttatgtgcccagggattttcctggacgggattgtgaagtagcgggacagtggggtcattgtgtatgtacagaagtgatgtggattcctccccagactcattagtgaccagggctgctgggcctgtttgggtttcctagactagagaagaagacaggaaccaggatgggaagacggacatgttacattttaagctggagcttcccctgcagtccacggagcacgttctcggtgtgcagctcatcctgactttctcctatcgattacacaggatggcgaccctcgtgatgcagagcatggcgtttctccagtcctcctttcctgtcccgggatcccagttatacgtgaacggagacctgaggctgcagcagaagcagccgctgagctgtggtggcctagatgcccgatacaatgtaagggcgcttctcattgtccagctcctttgtttctgtgtgttactgttcgtcgagttctttgaagagggggataaaaagtagaaatatttctctgtgggtggctttcaagggaccttctgaggaattcttgccatgaagtcttttcagactatgaagatacacctgtatt

SEQ ID NO: 379635 - DNA, 2773 bp, Homo sapiens
acgtccgccttaccggcggattaagctcgctttcttctaggcgcgtttcctgaaggtcgatggccaggtggtcttcataaactatactgccttgtgatgcctccctagaaatgagaggtctcaataccagctcagaccatgtggaccgcggatgagattgctcagctatgctatgaacactatgggatcaggctgcccaagaaggggaagcctgagccaaaccatgagtggacattattggcagcggtggtgaagatacaatctccagctgacaaggcctgcgacacccctgataagccggtgcaagtgacaaaggaagttgtgtcaatgggaacaggaacaaaatgcataggacagtccaaaatgaggaagaacggagacatcctcaatgatagccatgctgaggtcatagccagaaggagtttccaaaggtaccttctccaccaactccagttggcagccaccctgaaagaggatagcatctttgtcccaggaactcaaaaaggagtgtggaaacttagacgagacctcatttttgtgtttttctccagccatacaccctgtggggatgcctccatcattccgatgcttgagtttgaagatcagccttgctgtcctgtcttcagaaattgggccaacaactcatcagtagaagccagtagtaacctggaagctcctggaaatgaaagaaaatgtgaagaccctgacagtcctgtaaccaaaaagatgaggcttgagcctgggactgcagccagggaggtcaccaacggagcagctcaccatcagagttttggcaagcagaaaagtggcccaatctcaccaggcatccacagctgtgatctcactgtagagggactggctactgtcaccagaatagcccctggtagtgccaaagtgatagacgtttatagaactggagccaagtgtgtacctggagaagctggagactccggaaagccgggtgctgcgtttcaccaggtggggctgctccgagtgaagccaggccgtggagacagaacacgctccatgtcctgtagtgacaagatggcccgatggaacgtcctcggatgccaaggggcactgttgatgcacttgctggaagagcccatctacctgtcagctgtggtcattgggaagtgcccatacagccaggaagccatgcagagagcactgattggaaggtgtcagaatgtgtctgctttaccaaaaggcttcggagttcaagaattaaaaatactgcagtcagatttactatttgaacagagccgcagtgcggtgcaggcaaaaagggctgatagcccaggtcgacttgttccttgtggggcagccatcagctggagtgcagttcctgagcagcctttggatgttactgccaatggctttccacagggaacaacaaagaaaacaattggaagccttcaggcaagatcccaaatcagcaaagtggaactcttcagatcattccagaagctgctaagcagaattgcaagggacaagtggccacactccctcagggtgcagaagctggatacctaccaggagtacaaggaggctgcgtcctcttaccaggaagcctggagcacactccggaagcaggtgtttggatcctggatcagaaacccaccggattatcaccagttcaagtgagaaggaaatgtttgctctggtagcaggacccttcatcctgaactgccttcctccacgcaggacaagtcttagcttttttggtagttaaatcagggaacattctttctgagctttgcatctctgttgtgtaatacagatggaatctggaacttagagcaagctatacttgattgaagtagctctctgctaaaatggcatctcactaatgacctcactatctgacttccattgtgttttattgcttctctaaaatatgaaatcagagtttggaacatgatgctttgaaagtactctgcagcagctctgttttatgggttcctacattgattcagcaaatatttattgagctgaaatgatgtttgacgctctgcaagttttacagctttgcctagcatagcgaatatatattttgtattcccagcctttctttcttcagggagccattcttttcccattcttcagtgatcctgctctgtgcctcagacttggctgaagctaaccttactccctggctctaggaatagcctgtgagccagccctggactgccctggacttgttctcagaggtatcaggaaaggctttctgttttgatctggagctgtaagggtcacataatcatgggactgccggtggccatcttttcctactacctagagaaagccagcaaagaatgaaggcaacaaaggaaacagccaagagaatcaaagatctagtaacactgtttagatgtctcaattatgtgagacagattcctgttgttattttgattaagcctgtttgtgttggttttctgacttacaattgaaagagttctgtccaaaaagccaaaaggtggccaggcttggtggctcaggcctgtaatcccagcactttgggaagcccaggcaggcagatcacttgaggtcaggagttcaagaccagcctggccaacctggtgaaaccctgtctctactaaaaatgcaaaaactagccgggcatggtggcgcacacctgtaatcctagctactcgggaggctgaggcaggagaattgcttgaacccaggaggcggaggtagtggtgagcaaagatcgtaccgctgcactccagcctgggtgatagagcaagaccctatctcaaaaaaaaaa

SEQ ID NO: 379636 - DNA, 2670 bp, Homo sapiens
acgtccgccttaccggcggattaagctcgctttcttctaggcgcgtttcctgaaggtcgatggccaggtggtcttcataaactatactgccttgtgatgcctccctagaaatgagaggtctcaataccagctcagaccatgtggaccgcggatgagattgctcagctatgctatgaacactatgggatcaggctgcccaagaaggggaagcctgagccaaaccatgagtggacattattggcagcggtggtgaagatacaatctccagctgacaaggcctgcgacacccctgataagccggtgcaagtgacaaaggaagttgtgtcaatgggaacaggaacaaaatgcataggacagtccaaaatgaggaagaacggagacatcctcaatgatagccatgctgaggtcatagccagaaggagtttccaaaggtaccttctccaccaactccagttggcagccaccctgaaagaggatagcatctttgtcccaggaactcaaaaaggagtgtggaaacttagacgagacctcatttttgtgtttttctccagccatacaccctgtggggatgcctccatcattccgatgcttgagtttgaagatcagccttgctgtcctgtcttcagaaattgggccaacaactcatcagtagaagccagtagtaacctggaagctcctggaaatgaaagaaaatgtgaagaccctgacagtcctgtaaccaaaaagatgaggcttgagcctgggactgcagccagggaggtcaccaacggagcagctcaccatcagagttttggcaagcagaaaagtggcccaatctcaccaggcatccacagctgtgatctcactgtagagggactggctactgtcaccagaatagcccctggtagtgccaaagtgatagacgtttatagaactggagccaagtgtgtacctggagaagctggagactccggaaagccgggtgctgcgtttcaccaggtggggctgctccgagtgaagccaggccgtggagacagaacacgctccatgtcctgtagtgacaagatggcccgatggaacgtcctcggatgccaaggggcactgttgatgcacttgctggaagagcccatctacctgtcagctgtggtcattgggaagtgcccatacagccaggaagccatgcagagagcactgattggaaggtgtcagaatgtgtctgctttaccaaaaggcttcggagttcaagaattaaaaatactgcagtcagatttactatttgaacagagccgcagtgcggtgcaggcaaaaagggctgatagcccaggtcgacttgttccttgtggggcagccatcagctggagtgcagttcctgagcagcctttggatgttactgccaatggctttccacagggaacaacaaagaaaacaattggaagccttcaggcaagatcccaaatcagcaaagtggaactcttcagatcattccagaagctgctaagcagaattgcaagggacaagtggccacactccctcagggtgcagaagctggatacctaccaggagtacaaggaggctgcgtcctcttaccaggaagcctggagcacactccggaagcaggtgtttggatcctggatcagaaacccaccggattatcaccagttcaagtgagaaggaaatgtttgctctggtagcaggacccttcatcctgaactgccttcctccacgcaggacaagtcttagcttttttggtagttaaatcagggaacattctttctgagctttgcatctctgttgtgtaatacagatggaatctggaacttagagcaagctatacttgattgaagtagctctctgctaaaatggcatctcactaatgacctcactatctgacttccattgtgttttattgcttctctaaaatatgaaatcagagtttggaacatgatgctttgaaagtactctgcagcagctctgttttatgggttcctacattgattcagcaaatatttattgagctgaaatgatgtttgacgctctgcaagttttacagctttgcctagcatagcgaatatatattttgtattcccagcctttctttcttcagggagccattcttttcccattcttcagtgatcctgctctgtgcctcagacttggctgaagctaaccttactccctggctctaggaatagcctgtgagccagccctggactgccctggacttgttctcagaggtatcaggaaaggctttctgttttgatctggagctgtaagggtcacataatcatgggactgccggtggccatcttttcctactacctagagaaagccagcaaagaatgaaggcaacaaaggaaacagccaagagaatcaaagatctagtaacactgtttagatgtctcaattatgtgagacagattcctgttgttattttgattaagcctgtttgtgttggttttctgacttacaattgaaagagttctgtccaaaaagccaactggtgaaaccctgtctctactaaaaatgcaaaaactagccgggcatggtggcgcacacctgtaatcctagctactcgggaggctgaggcaggagaattgcttgaacccaggaggcggaggtagtggtgagcaaagatcgtaccgctgcactccagcctgggtgatagagcaagaccctatctcaaaaaaaaaa

SEQ ID NO: 379637 - DNA, 4016 bp, Homo sapiens
acgtccgccttaccggcggattaagctcgctttcttctaggcgcgtttcctgaaggtcgatggccaggtggtcttcataaactatactgccttgtgatgcctccctagaaatgagaggtctcaataccagctcagaccatgtggaccgcggatgagattgctcagctatgctatgaacactatgggatcaggctgcccaagaaggggaagcctgagccaaaccatgagtggacattattggcagcggtggtgaagatacaatctccagctgacaaggcctgcgacacccctgataagccggtgcaagtgacaaaggaagttgtgtcaatgggaacaggaacaaaatgcataggacagtccaaaatgaggaagaacggagacatcctcaatgatagccatgctgaggtcatagccagaaggagtttccaaaggtaccttctccaccaactccagttggcagccaccctgaaagaggatagcatctttgtcccaggaactcaaaaaggagtgtggaaacttagacgagacctcatttttgtgtttttctccagccatacaccctgtggggatgcctccatcattccgatgcttgagtttgaagatcagccttgctgtcctgtcttcagaaattgggccaacaactcatcagtagaagccagtagtaacctggaagctcctggaaatgaaagaaaatgtgaagaccctgacagtcctgtaaccaaaaagatgaggcttgagcctgggactgcagccagggaggtcaccaacggagcagctcaccatcagagttttggcaagcagaaaagtggcccaatctcaccaggcatccacagctgtgatctcactgtagagggactggctactgtcaccagaatagcccctggtagtgccaaagtgatagacgtttatagaactggagccaagtgtgtacctggagaagctggagactccggaaagccgggtgctgcgtttcaccaggtggggctgctccgagtgaagccaggccgtggagacagaacacgctccatgtcctgtagtgacaagatggcccgatggaacgtcctcggatgccaaggggcactgttgatgcacttgctggaagagcccatctacctgtcagctgtggtcattgggaagtgcccatacagccaggaagccatgcagagagcactgattggaaggtgtcagaatgtgtctgctttaccaaaaggcttcggagttcaagaattaaaaatactgcagtcagatttactatttgaacagagccgcagtgcggtgcaggcaaaaagggctgatagcccaggtcgacttgttccttgtggggcagccatcagctggagtgcagttcctgagcagcctttggatgttactgccaatggctttccacagggaacaacaaagaaaacaattggaagccttcaggcaagatcccaaatcagcaaagtggaactcttcagatcattccagaagctgctaagcagaattgcaagggacaagtggccacactccctcagggttttggctgaagcggagcagctacgaggagcagccgaccgtgcgcttccaacaccaggtgctgctcgtggccctgctcggacccgaaagcgacgggttcctcgcctggagcacgttccccgccttcaaccggctgcaaggggatcgcctgcgcgtcccgctcgtttcgactagagaagaagacaggaaccaggatgggaagacggacatgttacattttaagctggagcttcccctgcagtccacggagcacgttctcggtgtgcagctcatcctgactttctcctatcgattacacaggatggcgaccctcgtgatgcagagcatggcgtttctccagtcctcctttcctgtcccgggatcccagttatacgtgaacggagacctgaggctgcagcagaagcagccgctgagctgtggtggcctagatgcccgatacaacatatccgtgatcaacgggaccagcccctttgcctatgactacgacctcacccatattgttgctgcctaccaggagaggaacgttaccaccgtcctgaatgatcccaaccccatctggctggtgggcagggccgcagatgctccatttgtgattaatgctatcatccgataccctgtggaagtcatttcttatcagccaggattctgggagatggtaaagttcgcctgggtgcagtatgtcagcatcctgcttatcttcctctgggtgtttgaaagaatcaagatcttcgtgtttcagaatcaggtggtgaccaccattcctgtgacagtgacgccccggggagacttgtgtaaggagcacttatcctagaaaggccatttctgaagactcagcaggaccgtggctgcctcattgtcatcttctgggaacatcttaggaccttttgaaagagcccagcggacacctgcgggcttgtgtgcttttccctcagagacaacggttctttccggttttgctctacacagttccgtatcttcagagctcctgcagaattgtcaggggactagtttgtggaaaggtctgagagttcctggaggctataattagctttttggggttttccttctttgccttagcgttgaatttcaggagaaaattgcagtcagttcagacatcttggaaagagtcccatctctggtcaagcagagacttttcctctgttgaactgaggaacacactgtgcatttctaccttctgttgtgagccactcttactcttttcagggctctcttgtgacaaacatgccaatcactagcactttgcacccctgggcttctccatttcccattcacagctttgatttccagagctgaggcctttaactggagacctggaggggcagggcccaaggggcaagggccgcattagcacaggcaatcagggagggccgctgaaggacacttggaccgtccacctgccccagcccaacagtcagtcatctgtcatcagctcagctgagcagccctggatctttgccgtactgtgactggctctttgccctatttttccctctgtctgtgcccctggatggcaggctgaagtcagaggggctgtttcattctcagccccctcagcagcactgggggaagaaagcattgtcacaacaggttctttctggccctcacccaacagcctgggcacttggccctcctcctccttgacagccctcccccttcctgcaaaggacaggggcgacaggggttggtgttgggattggctcccgctgcctgacaaccacaagtttatttggaaggctagcgggaagcccagcggctggcgtttcccttgactaaggaacagggtgcccatcagagtggggcgggcagctttgggaaggacacaagaagcagtaagagtgtaaagaggatgctggcctgggcaggccagtccagcctggccactagcagaataccaagcagtccagtggattaccctcgtggctaagcaagtgtctgcaggagcagagatggctggaaggggcctctgcacacggaagatggcttgttcagcccattcacctcctgaggatgtgggcagtctcctccaagaacacatggagctgcttcctgatcccaagcaggtcattgccactggaaggacatggccccggtgatccatgcttcatgcccacccagaaacacacccctcagtgtgtgcctcagtttactttggagatcagttgtcgtttttagtgctcctttaggcttactaaaacagttttggaaacaaagctattttgaagtattcaagcagaggaattccctaacactgacccccttgtctttttttaatattcaggctgttttatatgcctaaatttttttcttaagatctaaacgaaaaatagtttcttgtttaaattcacataaggcaatgagatatggaaagatgacaagatacgtataaacattggtttgcattttattaaattattctaatgcaaatcttgtataaagaacccatgatgttttgtaactttctaattaaaatgttcaaaatg

SEQ ID NO: 379638 - DNA, 2702 bp, Homo sapiens
tggcaaccaggagaagccaaacttggtcccccggctcgcggagtgcctgcgagcggtgctcatggcgctctatgagctcttctctcacccggtcgagcgcagttaccgcgcggggctctgctccaaagccgcgctgttcctgctgctggccgctgcgctcacgtacatcccgccgctgctggtggccttccggagccacgggttttggctgaagcggagcagctacgaggagcagccgaccgtgcgcttccaacaccaggtgctgctcgtggccctgctcggacccgaaagcgacgggttcctcgcctggagcacgttccccgccttcaaccggctgcaaggggatcgcctgcgcgtcccgctcgtttcgactagagaagaagacaggaaccaggatgggaagacggacatgttacattttaagctggagcttcccctgcagtccacggagcacgttctcggtgtgcagctcatcctgactttctcctatcgattacacaggatggcgaccctcgtgatgcagagcatggcgtttctccagtcctcctttcctgtcccgggatcccagttatacgtgaacggagacctgaggctgcagcagaagcagccgctgagctgtggtggcctagatgcccgatacaacatatccgtgatcaacgggaccagcccctttgcctatgactacgacctcacccatattgttgctgcctaccaggagaggaacgttaccaccgtcctgaatgatcccaaccccatctggctggtgggcagggccgcagatgctccatttgtgattaatgctatcatccgataccctgtggaagtcatttcttatcagccaggattctgggagatggtaaagttcgcctgggtgcagtatgtcagcatcctgcttatcttcctctgggtgtttgaaagaatcaagatcttcgtgtttcagaatcaggtggtgaccaccattcctgtgacagtgacgccccggggagacttgtgtaaggagcacttatcctagaaaggccatttctgaagactcagcaggaccgtggctgcctcattgtcatcttctgggaacatcttaggaccttttgaaagagcccagcggacacctgcgggcttgtgtgcttttccctcagagacaacggttctttccggttttgctctacacagttccgtatcttcagagctcctgcagaattgtcaggggactagtttgtggaaaggtctgagagttcctggaggctataattagctttttggggttttccttctttgccttagcgttgaatttcaggagaaaattgcagtcagttcagacatcttggaaagagtcccatctctggtcaagcagagacttttcctctgttgaactgaggaacacactgtgcatttctaccttctgttgtgagccactcttactcttttcagggctctcttgtgacaaacatgccaatcactagcactttgcacccctgggcttctccatttcccattcacagctttgatttccagagctgaggcctttaactggagacctggaggggcagggcccaaggggcaagggccgcattagcacaggcaatcagggagggccgctgaaggacacttggaccgtccacctgccccagcccaacagtcagtcatctgtcatcagctcagctgagcagccctggatctttgccgtactgtgactggctctttgccctatttttccctctgtctgtgcccctggatggcaggctgaagtcagaggggctgtttcattctcagccccctcagcagcactgggggaagaaagcattgtcacaacaggttctttctggccctcacccaacagcctgggcacttggccctcctcctccttgacagccctcccccttcctgcaaaggacaggggcgacaggggttggtgttgggattggctcccgctgcctgacaaccacaagtttatttggaaggctagcgggaagcccagcggctggcgtttcccttgactaaggaacagggtgcccatcagagtggggcgggcagctttgggaaggacacaagaagcagtaagagtgtaaagaggatgctggcctgggcaggccagtccagcctggccactagcagaataccaagcagtccagtggattaccctcgtggctaagcaagtgtctgcaggagcagagatggctggaaggggcctctgcacacggaagatggcttgttcagcccattcacctcctgaggatgtgggcagtctcctccaagaacacatggagctgcttcctgatcccaagcaggtcattgccactggaaggacatggccccggtgatccatgcttcatgcccacccagaaacacacccctcagtgtgtgcctcagtttactttggagatcagttgtcgtttttagtgctcctttaggcttactaaaacagttttggaaacaaagctattttgaagtattcaagcagaggaattccctaacactgacccccttgtctttttttaatattcaggctgttttatatgcctaaatttttttcttaagatctaaacgaaaaatagtttcttgtttaaattcacataaggcaatgagatatggaaagatgacaagatacgtataaacattggtttgcattttattaaattattctaatgcaaatcttgtataaagaacccatgatgttttgtaactttctaattaaaatgttcaaaatg

SEQ ID NO: 379639 - DNA, 2825 bp, Homo sapiens
tggcaaccaggagaagccaaacttggtcccccggctcgcggagtgcctgcgagcggtgctcatggcgctctatgagctcttctctcacccggtcgagcgcagttaccgcgcggggctctgctccaaagccgcgctgttcctgctgctggccgctgcgctcacgtacatcccgccgctgctggtggccttccggagccacgggttttggctgaagcggagcagctacgaggagcagccgaccgtgcgcttccaacaccaggtgctgctcgtggccctgctcggacccgaaagcgacgggttcctcgcctggagcacgttccccgccttcaaccggctgcaaggggatcgcctgcgcgtcccgctcgtttcgtggaggagataatgcctgttgtgtacagcaagacagtgggtcattgtgtatttacagaagtgatgtggattcctcccagactcattagtgaccagggctgctgggcctgtttgggtttcctagactagagaagaagacaggaaccaggatgggaagacggacatgttacattttaagctggagcttcccctgcagtccacggagcacgttctcggtgtgcagctcatcctgactttctcctatcgattacacaggatggcgaccctcgtgatgcagagcatggcgtttctccagtcctcctttcctgtcccgggatcccagttatacgtgaacggagacctgaggctgcagcagaagcagccgctgagctgtggtggcctagatgcccgatacaacatatccgtgatcaacgggaccagcccctttgcctatgactacgacctcacccatattgttgctgcctaccaggagaggaacgttaccaccgtcctgaatgatcccaaccccatctggctggtgggcagggccgcagatgctccatttgtgattaatgctatcatccgataccctgtggaagtcatttcttatcagccaggattctgggagatggtaaagttcgcctgggtgcagtatgtcagcatcctgcttatcttcctctgggtgtttgaaagaatcaagatcttcgtgtttcagaatcaggtggtgaccaccattcctgtgacagtgacgccccggggagacttgtgtaaggagcacttatcctagaaaggccatttctgaagactcagcaggaccgtggctgcctcattgtcatcttctgggaacatcttaggaccttttgaaagagcccagcggacacctgcgggcttgtgtgcttttccctcagagacaacggttctttccggttttgctctacacagttccgtatcttcagagctcctgcagaattgtcaggggactagtttgtggaaaggtctgagagttcctggaggctataattagctttttggggttttccttctttgccttagcgttgaatttcaggagaaaattgcagtcagttcagacatcttggaaagagtcccatctctggtcaagcagagacttttcctctgttgaactgaggaacacactgtgcatttctaccttctgttgtgagccactcttactcttttcagggctctcttgtgacaaacatgccaatcactagcactttgcacccctgggcttctccatttcccattcacagctttgatttccagagctgaggcctttaactggagacctggaggggcagggcccaaggggcaagggccgcattagcacaggcaatcagggagggccgctgaaggacacttggaccgtccacctgccccagcccaacagtcagtcatctgtcatcagctcagctgagcagccctggatctttgccgtactgtgactggctctttgccctatttttccctctgtctgtgcccctggatggcaggctgaagtcagaggggctgtttcattctcagccccctcagcagcactgggggaagaaagcattgtcacaacaggttctttctggccctcacccaacagcctgggcacttggccctcctcctccttgacagccctcccccttcctgcaaaggacaggggcgacaggggttggtgttgggattggctcccgctgcctgacaaccacaagtttatttggaaggctagcgggaagcccagcggctggcgtttcccttgactaaggaacagggtgcccatcagagtggggcgggcagctttgggaaggacacaagaagcagtaagagtgtaaagaggatgctggcctgggcaggccagtccagcctggccactagcagaataccaagcagtccagtggattaccctcgtggctaagcaagtgtctgcaggagcagagatggctggaaggggcctctgcacacggaagatggcttgttcagcccattcacctcctgaggatgtgggcagtctcctccaagaacacatggagctgcttcctgatcccaagcaggtcattgccactggaaggacatggccccggtgatccatgcttcatgcccacccagaaacacacccctcagtgtgtgcctcagtttactttggagatcagttgtcgtttttagtgctcctttaggcttactaaaacagttttggaaacaaagctattttgaagtattcaagcagaggaattccctaacactgacccccttgtctttttttaatattcaggctgttttatatgcctaaatttttttcttaagatctaaacgaaaaatagtttcttgtttaaattcacataaggcaatgagatatggaaagatgacaagatacgtataaacattggtttgcattttattaaattattctaatgcaaatcttgtataaagaacccatgatgttttgtaactttctaattaaaatgttcaaaatg

SEQ ID NO: 379640 - DNA, 2631 bp, Homo sapiens
tgagagatgaagtctttctctgtttcctaaactggagtgtagtgagtggcatgatcatcattgactacggccttgaactcatggcctcaagtggtcctcctgcctcagcctcccaagtcactgggattgtaggcatgagccaccacacctggcgaaaatacggtctgttaaaataatttaaggaattctttctcccgctgagataaagaggggtattttaaaaatagctttaaaacctgtaaaacatggacactgaccccttatttccatccacagaaagaaagactgagagtaaatgggcttaaattgttgcaagagagtttattcatctttgaagagaagattattgatactgcagtaggccaccaagaacaagagggtgctctgtgggaccagcctgggtgggcagcagcctgttttattcatctttgaagaaaagattattgatactgcagtaggccaccaagaacaagagggtgctctgtgggaccagcctgggtgggcagaagggtagaaggaaaaggggaggagtctcccaggtgctcacaccacatcctcctcccgtgtcccagatatccgtgatcaacgggaccagcccctttgcctatgactacgacctcacccatattgttgctgcctaccaggagaggaacgttaccaccgtcctgaatgatcccaaccccatctggctggtgggcagggccgcagatgctccatttgtgattaatgctatcatccgataccctgtggaagtcatttcttatcagccaggattctgggagatggtaaagttcgcctgggtgcagtatgtcagcatcctgcttatcttcctctgggtgtttgaaagaatcaagatcttcgtgtttcagaatcaggtggtgaccaccattcctgtgacagtgacgccccggggagacttgtgtaaggagcacttatcctagaaaggccatttctgaagactcagcaggaccgtggctgcctcattgtcatcttctgggaacatcttaggaccttttgaaagagcccagcggacacctgcgggcttgtgtgcttttccctcagagacaacggttctttccggttttgctctacacagttccgtatcttcagagctcctgcagaattgtcaggggactagtttgtggaaaggtctgagagttcctggaggctataattagctttttggggttttccttctttgccttagcgttgaatttcaggagaaaattgcagtcagttcagacatcttggaaagagtcccatctctggtcaagcagagacttttcctctgttgaactgaggaacacactgtgcatttctaccttctgttgtgagccactcttactcttttcagggctctcttgtgacaaacatgccaatcactagcactttgcacccctgggcttctccatttcccattcacagctttgatttccagagctgaggcctttaactggagacctggaggggcagggcccaaggggcaagggccgcattagcacaggcaatcagggagggccgctgaaggacacttggaccgtccacctgccccagcccaacagtcagtcatctgtcatcagctcagctgagcagccctggatctttgccgtactgtgactggctctttgccctatttttccctctgtctgtgcccctggatggcaggctgaagtcagaggggctgtttcattctcagccccctcagcagcactgggggaagaaagcattgtcacaacaggttctttctggccctcacccaacagcctgggcacttggccctcctcctccttgacagccctcccccttcctgcaaaggacaggggcgacaggggttggtgttgggattggctcccgctgcctgacaaccacaagtttatttggaaggctagcgggaagcccagcggctggcgtttcccttgactaaggaacagggtgcccatcagagtggggcgggcagctttgggaaggacacaagaagcagtaagagtgtaaagaggatgctggcctgggcaggccagtccagcctggccactagcagaataccaagcagtccagtggattaccctcgtggctaagcaagtgtctgcaggagcagagatggctggaaggggcctctgcacacggaagatggcttgttcagcccattcacctcctgaggatgtgggcagtctcctccaagaacacatggagctgcttcctgatcccaagcaggtcattgccactggaaggacatggccccggtgatccatgcttcatgcccacccagaaacacacccctcagtgtgtgcctcagtttactttggagatcagttgtcgtttttagtgctcctttaggcttactaaaacagttttggaaacaaagctattttgaagtattcaagcagaggaattccctaacactgacccccttgtctttttttaatattcaggctgttttatatgcctaaatttttttcttaagatctaaacgaaaaatagtttcttgtttaaattcacataaggcaatgagatatggaaagatgacaagatacgtataaacattggtttgcattttattaaattattctaatgcaaatcttgtataaagaacccatgatgttttgtaactttctaattaaaatgttcaaaatg

SEQ ID NO: 379641 - DNA, 3218 bp, Homo sapiens
tggcaaccaggagaagccaaacttggtcccccggctcgcggagtgcctgcgagcggtgctcatggcgctctatgagctcttctctcacccggtcgagcgcagttaccgcgcggggctctgctccaaagccgcgctgttcctgctgctggccgctgcgctcacgtacatcccgccgctgctggtggccttccggagccacggtgagcctgccccggccgctgtgccacgaggctccccgggcgcgctcggccagggccggcctccctaaccgcctccctaccgccctctttaactcagggttttggctgaagcggagcagctacgaggagcagccgaccgtgcgcttccaacaccaggtgctgctcgtggccctgctcggacccgaaagcgacgggttcctcgcctggagcacgttccccgccttcaaccggctgcaaggggatcgcctgcgcgtcccgctcgtttcgtggaggagataatgcctgttgtgtacagcaagacagtgggtcattgtgtatttacagaagtgatgtggattcctcccagactcattagtgaccagggctgctgggcctgtttgggtttcctagactagagaagaagacaggaaccaggatgggaagacggacatgttacattttaagctggagcttcccctgcagtccacggagcacgttctcggtgtgcagctcatcctgactttctcctatcgattacacaggatggcgaccctcgtgatgcagagcatggcgtttctccagtcctcctttcctgtcccgggatcccagttatacgtgaacggagacctgaggctgcagcagaagcagccgctgagctgtggtggcctagatgcccgatacaacaaagaaagactgagagtaaatgggcttaaattgttgcaagagagtttattcatctttgaagagaagattattgatactgcagtaggccaccaagaacaagagggtgctctgtgggaccagcctgggtgggcagcagcctgttttattcatctttgaagaaaagattattgatactgcagtaggccaccaagaacaagagggtgctctgtgggaccagcctgggtgggcagaagggtagaaggaaaaggggaggagtctcccaggtgctcacaccacatcctcctcccgtgtcccagatatccgtgatcaacgggaccagcccctttgcctatgactacgacctcacccatattgttgctgcctaccaggagaggaacgttaccaccgtcctgaatgatcccaaccccatctggctggtgggcagggccgcagatgctccatttgtgattaatgctatcatccgataccctgtggaagtcatttcttatcagccaggattctgggagatggtaaagttcgcctgggtgcagtatgtcagcatcctgcttatcttcctctgggtgtttgaaagaatcaagatcttcgtgtttcagaatcaggtggtgaccaccattcctgtgacagtgacgccccggggagacttgtgtaaggagcacttatcctagaaaggccatttctgaagactcagcaggaccgtggctgcctcattgtcatcttctgggaacatcttaggaccttttgaaagagcccagcggacacctgcgggcttgtgtgcttttccctcagagacaacggttctttccggttttgctctacacagttccgtatcttcagagctcctgcagaattgtcaggggactagtttgtggaaaggtctgagagttcctggaggctataattagctttttggggttttccttctttgccttagcgttgaatttcaggagaaaattgcagtcagttcagacatcttggaaagagtcccatctctggtcaagcagagacttttcctctgttgaactgaggaacacactgtgcatttctaccttctgttgtgagccactcttactcttttcagggctctcttgtgacaaacatgccaatcactagcactttgcacccctgggcttctccatttcccattcacagctttgatttccagagctgaggcctttaactggagacctggaggggcagggcccaaggggcaagggccgcattagcacaggcaatcagggagggccgctgaaggacacttggaccgtccacctgccccagcccaacagtcagtcatctgtcatcagctcagctgagcagccctggatctttgccgtactgtgactggctctttgccctatttttccctctgtctgtgcccctggatggcaggctgaagtcagaggggctgtttcattctcagccccctcagcagcactgggggaagaaagcattgtcacaacaggttctttctggccctcacccaacagcctgggcacttggccctcctcctccttgacagccctcccccttcctgcaaaggacaggggcgacaggggttggtgttgggattggctcccgctgcctgacaaccacaagtttatttggaaggctagcgggaagcccagcggctggcgtttcccttgactaaggaacagggtgcccatcagagtggggcgggcagctttgggaaggacacaagaagcagtaagagtgtaaagaggatgctggcctgggcaggccagtccagcctggccactagcagaataccaagcagtccagtggattaccctcgtggctaagcaagtgtctgcaggagcagagatggctggaaggggcctctgcacacggaagatggcttgttcagcccattcacctcctgaggatgtgggcagtctcctccaagaacacatggagctgcttcctgatcccaagcaggtcattgccactggaaggacatggccccggtgatccatgcttcatgcccacccagaaacacacccctcagtgtgtgcctcagtttactttggagatcagttgtcgtttttagtgctcctttaggcttactaaaacagttttggaaacaaagctattttgaagtattcaagcagaggaattccctaacactgacccccttgtctttttttaatattcaggctgttttatatgcctaaatttttttcttaagatctaaacgaaaaatagtttcttgtttaaattcacataaggcaatgagatatggaaagatgacaagatacgtataaacattggtttgcattttattaaattattctaatgcaaatcttgtataaagaacccatgatgttttgtaactttctaattaaaatgttcaaaatg

SEQ ID NO: 379642 - DNA, 2590 bp, Homo sapiens
acgtccgccttaccggcggattaagctcgctttcttctaggcgcgtttcctgaaggtcgatggccaggtggtcttcataaactatactgccttgtgatgcctccctagaaatgagaggtctcaataccagctcagaccatgtggaccgcggatgagattgctcagctatgctatgaacactatgggatcaggctgcccaagaaggggaagcctgagccaaaccatgagtggacattattggcagcggtggtgaagatacaatctccagctgacaaggcctgcgacacccctgataagccggtgcaagtgacaaaggaagttgtgtcaatgggaacaggaacaaaatgcataggacagtccaaaatgaggaagaacggagacatcctcaatgatagccatgctgaggtcatagccagaaggagtttccaaaggtaccttctccaccaactccagttggcagccaccctgaaagaggatagcatctttgtcccaggaactcaaaaaggagtgtggaaacttagacgagacctcatttttgtgtttttctccagccatacaccctgtggggatgcctccatcattccgatgcttgagtttgaagatcagccttgctgtcctgtcttcagaaattgggccaacaactcatcagtagaagccagtagtaacctggaagctcctggaaatgaaagaaaatgtgaagaccctgacagtcctgtaaccaaaaagatgaggcttgagcctgggactgcagccagggaggtcaccaacggagcagctcaccatcagagttttggcaagcagaaaagtggcccaatctcaccaggcatccacagctgtgatctcactgtagagggactggctactgtcaccagaatagcccctggtagtgccaaagtgatagacgtttatagaactggagccaagtgtgtacctggagaagctggagactccggaaagccgggtgctgcgtttcaccaggtggggctgctccgagtgaagccaggccgtggagacagaacacgctccatgtcctgtagtgacaagatggcccgatggaacgtcctcggatgccaaggggcactgttgatgcacttgctggaagagcccatctacctgtcagctgtggtcattgggaagtgcccatacagccaggaagccatgcagagagcactgattggaaggtgtcagaatgtgtctgctttaccaaaaggcttcggagttcaagaattaaaaatactgcagtcagatttactatttgaacagagccgcagtgcggtgcaggcaaaaagggctgatagcccaggtcgacttgttccttgtggggcagccatcagctggagtgcagttcctgagcagcctttggatgttactgccaatggctttccacagggaacaacaaagaaaacaattggaagccttcaggcaagatcccaaatcagcaaagtggaactcttcagatcattccagaagctgctaagcagaattgcaagggacaagtggccacactccctcagggttttggctgaagcggagcagctacgaggagcagccgaccgtgcgcttccaacaccaggtgctgctcgtggccctgctcggacccgaaagcgacgggttcctcgcctggagcacgttccccgccttcaaccggctgcaaggggatcgcctgcgcgtcccgctcgtttcgtgggggagataatgcctctttcttttgtgtacagcaggacagtggggtcattgtgtatgtacagaagtgatgtggattcctccccagactcattagtgaccagggctgctgggcctgtttgggtttcctagactagagaagaagacaggaaccaggatgggaagacggacatgttacattttaagctggagcttcccctgcagtccacggagcacgttctcggtgtgcagctcatcctgactttctcctatcgattacacgtgagtcagtccgctgggaggctgtcctctcccttgtgtctttttagtagaccagagtccttcttctgatttctagaagacccgcactctagcgggccctcttccccatgtagtttgggatttaacttaggccaatggaatggttttcactagtcatattaactgacatgggctattaatagctcagaaggttctaggcagtgtttcctgcatggctacgctaggtatgtgagggcctcttaggtttcagccaagacaggtgactcttagcacccagagcccttcagatctgatggcggttggtattgttggtccttctaatgatttcagaggatggcgaccctcgtgatgcagagcatggcgtttctccagtcctcctttcctgtcccgggatcccagttatacgtgaacggagacctgaggctgcagcagaagcagccgctgagctgtggtggcctagatgcccgatacaatgtaagggcgcttctcattgtccagctcctttgtttctgtgtgttactgttcgtcgagttctttgaagagggggataaaaagtagaaatatttctctgtgggtggctttcaagggaccttctgaggaattcttgccatgaagtcttttcagactatgaagatacacctgtatt

SEQ ID NO: 379643 - DNA, 2959 bp, Homo sapiens
acgtccgccttaccggcggattaagctcgctttcttctaggcgcgtttcctgaaggtcgatggccaggtggtcttcataaactatactgccttgtgatgcctccctagaaatgagaggtctcaataccagctcagaccatgtggaccgcggatgagattgctcagctatgctatgaacactatgggatcaggctgcccaagaaggggaagcctgagccaaaccatgagtggacattattggcagcggtggtgaagatacaatctccagctgacaaggcctgcgacacccctgataagccggtgcaagtgacaaaggaagttgtgtcaatgggaacaggaacaaaatgcataggacagtccaaaatgaggaagaacggagacatcctcaatgatagccatgctgaggtcatagccagaaggagtttccaaaggtaccttctccaccaactccagttggcagccaccctgaaagaggatagcatctttgtcccaggaactcaaaaaggagtgtggaaacttagacgagacctcatttttgtgtttttctccagccatacaccctgtggggatgcctccatcattccgatgcttgagtttgaagatcagccttgctgtcctgtcttcagaaattgggccaacaactcatcagtagaagccagtagtaacctggaagctcctggaaatgaaagaaaatgtgaagaccctgacagtcctgtaaccaaaaagatgaggcttgagcctgggactgcagccagggaggtcaccaacggagcagctcaccatcagagttttggcaagcagaaaagtggcccaatctcaccaggcatccacagctgtgatctcactgtagagggactggctactgtcaccagaatagcccctggtagtgccaaagtgatagacgtttatagaactggagccaagtgtgtacctggagaagctggagactccggaaagccgggtgctgcgtttcaccaggtggggctgctccgagtgaagccaggccgtggagacagaacacgctccatgtcctgtagtgacaagatggcccgatggaacgtcctcggatgccaaggggcactgttgatgcacttgctggaagagcccatctacctgtcagctgtggtcattgggaagtgcccatacagccaggaagccatgcagagagcactgattggaaggtgtcagaatgtgtctgctttaccaaaaggcttcggagttcaagaattaaaaatactgcagtcagatttactatttgaacagagccgcagtgcggtgcaggcaaaaagggctgatagcccaggtcgacttgttccttgtggggcagccatcagctggagtgcagttcctgagcagcctttggatgttactgccaatggctttccacagggaacaacaaagaaaacaattggaagccttcaggcaagatcccaaatcagcaaagtggaactcttcagatcattccagaagctgctaagcagaattgcaagggacaagtggccacactccctcagggttttggctgaagcggagcagctacgaggagcagccgaccgtgcgcttccaacaccaggtgctgctcgtggccctgctcggacccgaaagcgacgggttcctcgcctggagcacgttccccgccttcaaccggctgcaaggggatcgcctgcgcgtcccgctcgtttcgactagagaagaagacaggaaccaggatgggaagacggacatgttacattttaagctggagcttcccctgcagtccacggagcacgttctcggtgtgcagctcatcctgactttctcctatcgattacacaggatggcgaccctcgtgatgcagagcatggcgtttctccagtcctcctttcctgtcccgggatcccagttatacgtgaacggagacctgaggctgcagcagaagcagccgctgagctgtggtggcctagatgcccgatacaacatatccgtgatcaacgggaccagcccctttgcctatgactacgacctcacccatattgttgctgcctaccaggagaggaacgttaccaccgtcctgaatgatcccaaccccatctggctggtgggcagggccgcagatgctccatttgtgattaatgctatcatccgataccctgtggaagtcatttcttatcagccaggattctgggagatggtaaagttcgcctgggtgcagtatgtcagcatcctgcttatcttcctctgggtgtttgaaagaatcaagatcttcgtgtttcagaatcaggtggtgaccaccattcctgtgacagtgacgccccggggagacttgtgtaaggagcacttatcctagaaaggccatttctgaagactcagcaggaccgtggctgcctcattgtcatcttctgggaacatcttaggaccttttgaaagagcccagcggacacctgcgggcttgtgtgcttttccctcagagacaacggttctttccggttttgctctacacagttccgtatcttcagagctcctgcagaattgtcaggggactagtttgtggaaaggtctgagagttcctggaggctataattagctttttggggttttccttctttgccttagcgttgaatttcaggagaaaattgcagtcatttactttggagatcagttgtcgtttttagtgctcctttaggcttactaaaacagttttggaaacaaagctattttgaagtattcaagcagaggaattccctaacactgacccccttgtctttttttaatattcaggctgttttatatgcctaaatttttttcttaagatctaaacgaaaaatagtttcttgtttaaattcacataaggcaatgagatatggaaagatgacaagatacgtataaacattggtttgcattttattaaattattctaatgcaaatcttgtataaagaacccatgatgttttgtaactttctaattaaaatgttcaaaatg

SEQ ID NO: 379644 - DNA, 1277 bp, Homo sapiens
tggcaaccaggagaagccaaacttggtcccccggctcgcggagtgcctgcgagcggtgctcatggcgctctatgagctcttctctcacccggtcgagcgcagttaccgcgcggggctctgctccaaagccgcgctgttcctgctgctggccgctgcgctcacgtacatcccgccgctgctggtggccttccggagccacgggttttggctgaagcggagcagctacgaggagcagccgaccgtgcgcttccaacaccaggtgctgctcgtggccctgctcggacccgaaagcgacgggttcctcgcctggagcacgttccccgccttcaaccggctgcaaggggatcgcctgcgcgtcccgctcgtttcgtggaggagataatgcctgttgtgtacagcaagacagtgggtcattgtgtatttacagaagtgatgtggattcctcccagactcattagtgacctgaggctgcagcagaagcagccgctgagctgtggtggcctagatgcccgatacaacatatccgtgatcaacgggaccagcccctttgcctatgactacgacctcacccatattgttgctgcctaccaggagaggaacggtgagtcacaggtagagcccattcagccgctgctcaggactttcaaggtcgactaatggaaaatgaaaccaacaccatagcagaataccaagcagtccagtggattaccctcgtggctaagcaagtgtctgcaggagcagagatggctggaaggggcctctgcacacggaagatggcttgttcagcccattcacctcctgaggatgtgggcagtctcctccaagaacacatggagctgcttcctgatcccaagcaggtcattgccactggaaggacatggccccggtgatccatgcttcatgcccacccagaaacacacccctcagtgtgtgcctcagtttactttggagatcagttgtcgtttttagtgctcctttaggcttactaaaacagttttggaaacaaagctattttgaagtattcaagcagaggaattccctaacactgacccccttgtctttttttaatattcaggctgttttatatgcctaaatttttttcttaagatctaaacgaaaaatagtttcttgtttaaattcacataaggcaatgagatatggaaagatgacaagatacgtataaacattggtttgcattttattaaattattctaatgcaaatcttgtataaagaacccatgatgttttgtaactttctaattaaaatgttcaaaatg

SEQ ID NO: 379645 - DNA, 1223 bp, Homo sapiens
ctcacccctgtaatcttagcactttgggaggccaaggcaggaggatcccttaaccacaggagttcaagaccagcctaggcaacatagggagaacctctttaaaaaaaaattttttttttaatttaaaaaaaaaaagatcaaatgagacaaatgctattcacatgtttcttgtcttgttatcgccacttcaagttcccatttattttgtccagtgaacatttgaaagactcagatatgaagttcaggggccatgcactttgtgcctctttccccagtattaatgcacttacacctgtctatttttctctttcttttagtgggggagataatgcctctttcttttgtgtacagcaggacagtggggtcattgtgtatgtacagaagtgatgtggattcctccccagactcattagtgaccagggctgctgggcctgtttgggtttcctagactagagaagaagacaggaaccaggatgggaagacggacatgttacattttaagctggagcttcccctgcagtccacggagcacgttctcggtgtgcagctcatcctgactttctcctatcgattacacgtgagtcagtccgctgggaggctgtcctctcccttgtgtctttttagtagaccagagtccttcttctgatttctagaagacccgcactctagcgggccctcttccccatgtagtttgggatttaacttaggccaatggaatggttttcactagtcatattaactgacatgggctattaatagctcagaaggttctaggcagtgtttcctgcatggctacgctaggtatgtgagggcctcttaggtttcagccaagacaggtgactcttagcacccagagcccttcagatctgatggcggttggtattgttggtccttctaatgatttcagaggatggcgaccctcgtgatgcagagcatggcgtttctccagtcctcctttcctgtcccgggatcccagttatacgtgaacggagacctgaggctgcagcagaagcagccgctgagctgtggtggcctagatgcccgatacaatgtaagggcgcttctcattgtccagctcctttgtttctgtgtgttactgttcgtcgagttctttgaagagggggataaaaagtagaaatatttctctgtgggtggctttcaagggaccttctgaggaattcttgccatgaagtcttttcagactatgaagatacacctgtatt

SEQ ID NO: 379646 - DNA, 530 bp, Homo sapiens
gcaggctggtaccggtccggagtatggattctaggcgcgtttcctgaaggtcgatggccaggtggtcttcataaactatactgccttgtgatgcctccctagaaatgagaggtctcaataccagctcagaccatgtggaccgcggatgagattgctcagctatgctatgaacactatgggatcaggctgcccaagaaggggaagcctgagccaaaccatgagtggacattattggcagcggtggtgaagatacaatctccagctgacaaggcctgcgacacccctgataagccggtgcaagtgacaaaggaagttgtgtcaatgggaacaggaacaaaatgcataggacagtccaaaatgaggaagaacggtaccttctccaccaactccagttggcagccaccctgaaagaggatagcatctttgtcccaggaactcaaaaaggagtgtggaaacttagacgagacctcatttttgtgtttttctccagccatacaccctcctgggcaataagagtgaaactccgtctc

SEQ ID NO: 379647 - DNA, 335 bp, Homo sapiens
ttttatatgcctaaatttttttcttaagatttatttatttttatagatggggttttcactatgttgcccaggctggtcttgaactcccaacctcaggaaatcctcctgtctcagccccacaaagtgccaggaatataggcatgggccagtgtgccccgtctcttgagctaaacgaaaaatagtttcttgtttaaattcacataaggcaatgagatatggaaagatgacaagatacgtataaacattggtttgcattttattaaattattctaatgcaaatcttgtataaagaacccatgatgttttgtaactttctaattaaaatgttcaaaatg

SEQ ID NO: 379648 - DNA, 893 bp, Homo sapiens
ctcacccctgtaatcttagcactttgggaggccaaggcaggaggatcccttaaccacaggagttcaagaccagcctaggcaacatagggagaacctctttaaaaaaaaattttttttttaatttaaaaaaaaaaagatcaaatgagacaaatgctattcacatgtttcttgtcttgttatcgccacttcaagttcccatttattttgtccagtgaacatttgaaagactcagatatgaagttcaggggccatgcactttgtgcctctttccccagtattaatgcacttacacctgtctatttttctctttcttttagtgggggagataatgcctctttcttttgtgtacagcaggacagtggggtcattgtgtatgtacagaagtgatgtggattcctccccagactcattagtgaccagggctgctgggcctgtttgggtttcctagactagagaagaagacaggaaccaggatgggaagacggacatgttacattttaagctggagcttcccctgcagtccacggagcacgttctcggtgtgcagctcatcctgactttctcctatcgattacacaggatggcgaccctcgtgatgcagagcatggcgtttctccagtcctcctttcctgtcccgggatcccagttatacgtgaacggagacctgaggctgcagcagaagcagccgctgagctgtggtggcctagatgcccgatacaatgtaagggcgcttctcattgtccagctcctttgtttctgtgtgttactgttcgtcgagttctttgaagagggggataaaaagtagaaatatttctctgtgggtggctttcaagggaccttctgaggaattcttgccatgaagtcttttcagactatgaagatacacctgtatt

SEQ ID NO: 379649 - DNA, 844 bp, Homo sapiens
tggcaaccaggagaagccaaacttggtcccccggctcgcggagtgcctgcgagcggtgctcatggcgctctatgagctcttctctcacccggtcgagcgcagttaccgcgcggggctctgctccaaagccgcgctgttcctgctgctggccgctgcgctcacgtacatcccgccgctgctggtggccttccggagccacgggttttggctgaagcggagcagctacgaggagcagccgaccgtgcgcttccaacaccaggtgctgctcgtggccctgctcggacccgaaagcgacgggttcctcgcctggagcacgttccccgccttcaaccggctgcaaggggatcgcctgcgcgtcccgctcgtttcgactagagaagaagacaggaaccaggatgggaagacggacatgttacattttaagctggagcttcccctgcagtccacggagcacgttctcggtgtgcagctcatcctgactttctcctatcgattacacaggatggcgaccctcgtgatgcagagcatggcgtttctccagtcctcctttcctgtcccgggatcccagttatacgtgaacggagacctgaggctgcagcagaagcagccgctgagctgtggtggcctagatgcccgatacaacatatccgtgatcaacgggaccagcccctttgcctatgactacgacctcacccatattgttgctgcctaccaggagaggaacggtgagtcacaggtagagcccattcagccgctgctcaggactttcaaggtcgactaatggaaaatgaaaccaacaccaacactgcagagaagcaaacaaaagagaaggcattttaactgg

SEQ ID NO: 379650 - DNA, 2638 bp, Homo sapiens
acgtccgccttaccggcggattaagctcgctttcttctaggcgcgtttcctgaaggtcgatggccaggtggtcttcataaactatactgccttgtgatgcctccctagaaatgagaggtctcaataccagctcagaccatgtggaccgcggatgagattgctcagctatgctatgaacactatgggatcaggctgcccaagaaggggaagcctgagccaaaccatgagtggacattattggcagcggtggtgaagatacaatctccagctgacaaggcctgcgacacccctgataagccggtgcaagtgacaaaggaagttgtgtcaatgggaacaggaacaaaatgcataggacagtccaaaatgaggaagaacggagacatcctcaatgatagccatgctgaggtcatagccagaaggagtttccaaaggtaccttctccaccaactccagttggcagccaccctgaaagaggatagcatctttgtcccaggaactcaaaaaggagtgtggaaacttagacgagacctcatttttgtgtttttctccagccatacaccctgtggggatgcctccatcattccgatgcttgagtttgaagatcagccttgctgtcctgtcttcagaaattgggccaacaactcatcagtagaagccagtagtaacctggaagctcctggaaatgaaagaaaatgtgaagaccctgacagtcctgtaaccaaaaagatgaggcttgagcctgggactgcagccagggaggtcaccaacggagcagctcaccatcagagttttggcaagcagaaaagtggcccaatctcaccaggcatccacagctgtgatctcactgtagagggactggctactgtcaccagaatagcccctggtagtgccaaagtgatagacgtttatagaactggagccaagtgtgtacctggagaagctggagactccggaaagccgggtgctgcgtttcaccaggtggggctgctccgagtgaagccaggccgtggagacagaacacgctccatgtcctgtagtgacaagatggcccgatggaacgtcctcggatgccaaggggcactgttgatgcacttgctggaagagcccatctacctgtcagctgtggtcattgggaagtgcccatacagccaggaagccatgcagagagcactgattggaaggtgtcagaatgtgtctgctttaccaaaaggcttcggagttcaagaattaaaaatactgcagtcagatttactatttgaacagagccgcagtgcggtgcaggcaaaaagggctgatagcccaggtcgacttgttccttgtggggcagccatcagctggagtgcagttcctgagcagcctttggatgttactgccaatggctttccacagggaacaacaaagaaaacaattggaagccttcaggcaagatcccaaatcagcaaagtggaactcttcagatcattccagaagctgctaagcagaattgcaagggacaagtggccacactccctcagggtgcagaagctggatacctaccaggagtacaaggaggctgcgtcctcttaccaggaagcctggagcacactccggaagcaggtgtttggatcctggatcagaaacccaccggattatcaccagttcaagtgagaaggaaatgtttgctctggtagcaggacccttcatcctgaactgccttcctccacgcaggacaagtcttagcttttttggtagttaaatcagggaacattctttctgagctttgcatctctgttgtgtaatacagatggaatctggaacttagagcaagctatacttgattgaagtagctctctgctaaaatggcatctcactaatgacctcactatctgacttccattgtgttttattgcttctctaaaatatgaaatcagagtttggaacatgatgctttgaaagtactctgcagcagctctgttttatgggttcctacattgattcagcaaatatttattgagctgaaatgatgtttgacgctctgcaagttttacagctttgcctagcatagcgaatatatattttgtattcccagcctttctttcttcagggagccattcttttcccattcttcagtgatcctgctctgtgcctcagacttggctgaagctaaccttactccctggctctaggaatagcctgtgagccagccctggactgccctggacttgttctcagaggtatcaggaaaggctttctgttttgatctggagctgtaagggtcacataatcatgggactgccggtggccatcttttcctactacctagagaaagccagcaaagaatgaaggcaacaaaggaaacagccaagagaatcaaagatctagtaacactgtttagatgtctcaattatgtgagacagattcctgttgttattttgattaagcctgtttgtgttggttttctgacttacaattgaaagagttctgtccaaaaagccaaaaggtggccaggcttggtggctcaggcctgtaatcctagctactcgggaggctgaggcaggagaattgcttgaacccaggaggcggaggtagtggtgagcaaagatcgtaccgctgcactccagcctgggtgatagagcaagaccctatctcaaaaaaaaaa

SEQ ID NO: 379651 - DNA, 2825 bp, Homo sapiens
gcaggctggtaccggtccggagtatggattctaggcgcgtttcctgaaggtcgatggccaggtggtcttcataaactatactgccttgtgatgcctccctagaaatgagaggtctcaataccagctcagaccatgtggaccgcggatgagattgctcagctatgctatgaacactatgggatcaggctgcccaagaaggggaagcctgagccaaaccatgagtggacattattggcagcggtggtgaagatacaatctccagctgacaaggcctgcgacacccctgataagccggtgcaagtgacaaaggaagttgtgtcaatgggaacaggaacaaaatgcataggacagtccaaaatgaggaagaacggaaccagaccctctccagcttccatatgtcttcacctggtgtcctatctttgccgcaggagacatcctcaatgatagccatgctgaggtcatagccagaaggagtttccaaaggtaccttctccaccaactccagttggcagccaccctgaaagaggatagcatctttgtcccaggaactcaaaaaggagtgtggaaacttagacgagacctcatttttgtgtttttctccagccatacaccctgtggggatgcctccatcattccgatgcttgagtttgaagatcagccttgctgtcctgtcttcagaaattgggccaacaactcatcagtagaagccagtagtaacctggaagctcctggaaatgaaagaaaatgtgaagaccctgacagtcctgtaaccaaaaagatgaggcttgagcctgggactgcagccagggaggtcaccaacggagcagctcaccatcagagttttggcaagcagaaaagtggcccaatctcaccaggcatccacagctgtgatctcactgtagagggactggctactgtcaccagaatagcccctggtagtgccaaagtgatagacgtttatagaactggagccaagtgtgtacctggagaagctggagactccggaaagccgggtgctgcgtttcaccaggtggggctgctccgagtgaagccaggccgtggagacagaacacgctccatgtcctgtagtgacaagatggcccgatggaacgtcctcggatgccaaggggcactgttgatgcacttgctggaagagcccatctacctgtcagctgtggtcattgggaagtgcccatacagccaggaagccatgcagagagcactgattggaaggtgtcagaatgtgtctgctttaccaaaaggcttcggagttcaagaattaaaaatactgcagtcagatttactatttgaacagagccgcagtgcggtgcaggcaaaaagggctgatagcccaggtcgacttgttccttgtggggcagccatcagctggagtgcagttcctgagcagcctttggatgttactgccaatggctttccacagggaacaacaaagaaaacaattggaagccttcaggcaagatcccaaatcagcaaagtggaactcttcagatcattccagaagctgctaagcagaattgcaagggacaagtggccacactccctcagggtgcagaagctggatacctaccaggagtacaaggaggctgcgtcctcttaccaggaagcctggagcacactccggaagcaggtgtttggatcctggatcagaaacccaccggattatcaccagttcaagtgagaaggaaatgtttgctctggtagcaggacccttcatcctgaactgccttcctccacgcaggacaagtcttagcttttttggtagttaaatcagggaacattctttctgagctttgcatctctgttgtgtaatacagatggaatctggaacttagagcaagctatacttgattgaagtagctctctgctaaaatggcatctcactaatgacctcactatctgacttccattgtgttttattgcttctctaaaatatgaaatcagagtttggaacatgatgctttgaaagtactctgcagcagctctgttttatgggttcctacattgattcagcaaatatttattgagctgaaatgatgtttgacgctctgcaagttttacagctttgcctagcatagcgaatatatattttgtattcccagcctttctttcttcagggagccattcttttcccattcttcagtgatcctgctctgtgcctcagacttggctgaagctaaccttactccctggctctaggaatagcctgtgagccagccctggactgccctggacttgttctcagaggtatcaggaaaggctttctgttttgatctggagctgtaagggtcacataatcatgggactgccggtggccatcttttcctactacctagagaaagccagcaaagaatgaaggcaacaaaggaaacagccaagagaatcaaagatctagtaacactgtttagatgtctcaattatgtgagacagattcctgttgttattttgattaagcctgtttgtgttggttttctgacttacaattgaaagagttctgtccaaaaagccaaaaggtggccaggcttggtggctcaggcctgtaatcccagcactttgggaagcccaggcaggcagatcacttgaggtcaggagttcaagaccagcctggccaacctggtgaaaccctgtctctactaaaaatgcaaaaactagccgggcatggtggcgcacacctgtaatcctagctactcgggaggctgaggcaggagaattgcttgaacccaggaggcggaggtagtggtgagcaaagatcgtaccgctgcactccagcctgggtgatagagcaagaccctatctcaaaaaaaaaa

SEQ ID NO: 379652 - DNA, 4361 bp, Homo sapiens
acgtccgccttaccggcggattaagctcgctttcttctaggcgcgtttcctgaaggtcgatggccaggtggtcttcataaactatactgccttgtgatgcctccctagaaatgagaggtctcaataccagctcagaccatgtggaccgcggatgagattgctcagctatgctatgaacactatgggatcaggctgcccaagaaggggaagcctgagccaaaccatgagtggacattattggcagcggtggtgaagatacaatctccagctgacaaggcctgcgacacccctgataagccggtgcaagtgacaaaggaagttgtgtcaatgggaacaggaacaaaatgcataggacagtccaaaatgaggaagaacggagacatcctcaatgatagccatgctgaggtcatagccagaaggagtttccaaaggtaccttctccaccaactccagttggcagccaccctgaaagaggatagcatctttgtcccaggaactcaaaaaggagtgtggaaacttagacgagacctcatttttgtgtttttctccagccatacaccctgtggggatgcctccatcattccgatgcttgagtttgaagatcagccttgctgtcctgtcttcagaaattgggccaacaactcatcagtagaagccagtagtaacctggaagctcctggaaatgaaagaaaatgtgaagaccctgacagtcctgtaaccaaaaagatgaggcttgagcctgggactgcagccagggaggtcaccaacggagcagctcaccatcagagttttggcaagcagaaaagtggcccaatctcaccaggcatccacagctgtgatctcactgtagagggactggctactgtcaccagaatagcccctggtagtgccaaagtgatagacgtttatagaactggagccaagtgtgtacctggagaagctggagactccggaaagccgggtgctgcgtttcaccaggtggggctgctccgagtgaagccaggccgtggagacagaacacgctccatgtcctgtagtgacaagatggcccgatggaacgtcctcggatgccaaggggcactgttgatgcacttgctggaagagcccatctacctgtcagctgtggtcattgggaagtgcccatacagccaggaagccatgcagagagcactgattggaaggtgtcagaatgtgtctgctttaccaaaaggcttcggagttcaagaattaaaaatactgcagtcagatttactatttgaacagagccgcagtgcggtgcaggcaaaaagggctgatagcccaggtcgacttgttccttgtggggcagccatcagctggagtgcagttcctgagcagcctttggatgttactgccaatggctttccacagggaacaacaaagaaaacaattggaagccttcaggcaagatcccaaatcagcaaagtggaactcttcagatcattccagaagctgctaagcagaattgcaagggacaagtggccacactccctcagggttttggctgaagcggagcagctacgaggagcagccgaccgtgcgcttccaacaccaggtgctgctcgtggccctgctcggacccgaaagcgacgggttcctcgcctggagcacgttccccgccttcaaccggctgcaaggggatcgcctgcgcgtcccgctcgtttcgactagagaagaagacaggaaccaggatgggaagacggacatgttacattttaagctggagcttcccctgcagtccacggagcacgttctcggtgtgcagctcatcctgactttctcctatcgattacacaggatggcgaccctcgtgatgcagagcatggcgtttctccagtcctcctttcctgtcccgggatcccagttatacgtgaacggagacctgaggctgcagcagaagcagccgctgagctgtggtggcctagatgcccgatacaacatatccgtgatcaacgggaccagcccctttgcctatgactacgacctcacccatattgttgctgcctaccaggagaggaacgttaccaccgtcctgaatgatcccaaccccatctggctggtgggcagggccgcagatgctccatttgtgattaatgctatcatccgataccctgtggaagtcatttcttatcagccaggattctgggagatggtaaagttcgcctgggtgcagtatgtcagcatcctgcttatcttcctctgggtgtttgaaagaatcaagatcttcgtgtttcagaatcaggtggtgaccaccattcctgtgacagtgacgccccggggagacttgtgtaaggagcacttatcctagaaaggccatttctgaagactcagcaggaccgtggctgcctcattgtcatcttctgggaacatcttaggaccttttgaaagagcccagcggacacctgcgggcttgtgtgcttttccctcagagacaacggttctttccggttttgctctacacagttccgtatcttcagagctcctgcagaattgtcaggggactagtttgtggaaaggtctgagagttcctggaggctataattagctttttggggttttccttctttgccttagcgttgaatttcaggagaaaattgcagtcagttcagacatcttggaaagagtcccatctctggtcaagcagagacttttcctctgttgaactgaggaacacactgtgcatttctaccttctgttgtgagccactcttactcttttcagggctctcttgtgacaaacatgccaatcactagcactttgcacccctgggcttctccatttcccattcacagctttgatttccagagctgaggcctttaactggagacctggaggggcagggcccaaggggcaagggccgcattagcacaggcaatcagggagggccgctgaaggacacttggaccgtccacctgccccagcccaacagtcagtcatctgtcatcagctcagctgagcagccctggatctttgccgtactgtgactggctctttgccctatttttccctctgtctgtgcccctggatggcaggctgaagtcagaggggctgtttcattctcagccccctcagcagcactgggggaagaaagcattgtcacaacaggttctttctggccctcacccaacagcctgggcacttggccctcctcctccttgacagccctcccccttcctgcaaaggacaggggcgacaggggttggtgttgggattggctcccgctgcctgacaaccacaagtttatttggaaggctagcgggaagcccagcggctggcgtttcccttgactaaggaacagggtgcccatcagagtggggcgggcagctttgggaaggacacaagaagcagtaagagtgtaaagaggatgctggcctgggcaggccagtccagcctggccactagcagaataccaagcagtccagtggattaccctcgtggctaagcaagtgtctgcaggagcagagatggctggaaggggcctctgcacacggaagatggcttgttcagcccattcacctcctgaggatgtgggcagtctcctccaagaacacatggagctgcttcctgatcccaagcaggtcattgccactggaaggacatggccccggtgatccatgcttcatgcccacccagaaacacacccctcagtgtgtgcctcagtttactttggagatcagttgtcgtttttagtgctcctttaggcttactaaaacagttttggaaacaaagctattttgaagtattcaagcagaggaattccctaacactgacccccttgtctttttttaatattcaggctgttttatatgcctaaatttttttcttaagatctaaacgaaaaatagtttcttgtttaaattcacataaggcaatgagatatggaaagatgacaagatacgtataaacattggtttgcattttattaaattattctaatgcaaatcttgtataaagaacccatgatgttttgtaactttctaattaaaatgttcaaaatgccgaaaaaaaaaacaaaaagacaaagacagaaggagcagacgacacagaccaagacgacacggaaagggcgagagcgagagcaccacaacgacaagtacagggcgggaagaacaaacagcccagagaaggcagcaagagcaaaccagcaagcgaggagcgaagaagacgagacgaaacagggacacggagaagggagggaaacacaaccgtaagcaggagaagcgagacaaaaagagaggaaagcggcagaaagaagaaaggaacggcagacaagaaacagaacgaaccgcacagccgaagacaagatacaggagcaatctgacgaggagagaggaagaggcggt

SEQ ID NO: 379653 - DNA, 2723 bp, Homo sapiens
agcggggctgtgacatcatatccagctctcatggccatcagctggagtgcagttcctgagcagcctttggatgttactgccaatggctttccacagggaacaacaaagaaaacaattggaagccttcaggcaagatcccaaatcagcaaagtggaactcttcagatcattccagaagctgctaagcagaattgcaagggacaagtggccacactccctcagggttttggctgaagcggagcagctacgaggagcagccgaccgtgcgcttccaacaccaggtgctgctcgtggccctgctcggacccgaaagcgacgggttcctcgcctggagcacgttccccgccttcaaccggctgcaaggggatcgcctgcgcgtcccgctcgtttcgactagagaagaagacaggaaccaggatgggaagacggacatgttacattttaagctggagcttcccctgcagtccacggagcacgttctcggtgtgcagctcatcctgactttctcctatcgattacacaggatggcgaccctcgtgatgcagagcatggcgtttctccagtcctcctttcctgtcccgggatcccagttatacgtgaacggagacctgaggctgcagcagaagcagccgctgagctgtggtggcctagatgcccgatacaacatatccgtgatcaacgggaccagcccctttgcctatgactacgacctcacccatattgttgctgcctaccaggagaggaacgttaccaccgtcctgaatgatcccaaccccatctggctggtgggcagggccgcagatgctccatttgtgattaatgctatcatccgataccctgtggaagtcatttcttatcagccaggattctgggagatggtaaagttcgcctgggtgcagtatgtcagcatcctgcttatcttcctctgggtgtttgaaagaatcaagatcttcgtgtttcagaatcaggtggtgaccaccattcctgtgacagtgacgccccggggagacttgtgtaaggagcacttatcctagaaaggccatttctgaagactcagcaggaccgtggctgcctcattgtcatcttctgggaacatcttaggaccttttgaaagagcccagcggacacctgcgggcttgtgtgcttttccctcagagacaacggttctttccggttttgctctacacagttccgtatcttcagagctcctgcagaattgtcaggggactagtttgtggaaaggtctgagagttcctggaggctataattagctttttggggttttccttctttgccttagcgttgaatttcaggagaaaattgcagtcagttcagacatcttggaaagagtcccatctctggtcaagcagagacttttcctctgttgaactgaggaacacactgtgcatttctaccttctgttgtgagccactcttactcttttcagggctctcttgtgacaaacatgccaatcactagcactttgcacccctgggcttctccatttcccattcacagctttgatttccagagctgaggcctttaactggagacctggaggggcagggcccaaggggcaagggccgcattagcacaggcaatcagggagggccgctgaaggacacttggaccgtccacctgccccagcccaacagtcagtcatctgtcatcagctcagctgagcagccctggatctttgccgtactgtgactggctctttgccctatttttccctctgtctgtgcccctggatggcaggctgaagtcagaggggctgtttcattctcagccccctcagcagcactgggggaagaaagcattgtcacaacaggttctttctggccctcacccaacagcctgggcacttggccctcctcctccttgacagccctcccccttcctgcaaaggacaggggcgacaggggttggtgttgggattggctcccgctgcctgacaaccacaagtttatttggaaggctagcgggaagcccagcggctggcgtttcccttgactaaggaacagggtgcccatcagagtggggcgggcagctttgggaaggacacaagaagcagtaagagtgtaaagaggatgctggcctgggcaggccagtccagcctggccactagcagaataccaagcagtccagtggattaccctcgtggctaagcaagtgtctgcaggagcagagatggctggaaggggcctctgcacacggaagatggcttgttcagcccattcacctcctgaggatgtgggcagtctcctccaagaacacatggagctgcttcctgatcccaagcaggtcattgccactggaaggacatggccccggtgatccatgcttcatgcccacccagaaacacacccctcagtgtgtgcctcagtttactttggagatcagttgtcgtttttagtgctcctttaggcttactaaaacagttttggaaacaaagctattttgaagtattcaagcagaggaattccctaacactgacccccttgtctttttttaatattcaggctgttttatatgcctaaatttttttcttaagatctaaacgaaaaatagtttcttgtttaaattcacataaggcaatgagatatggaaagatgacaagatacgtataaacattggtttgcattttattaaattattctaatgcaaatcttgtataaagaacccatgatgttttgtaactttctaattaaaatgttcaaaatg

SEQ ID NO: 379654 - DNA, 3142 bp, Homo sapiens
cacgcgtccgtcgaggcacgcgtccggacgtttatagaactggagccaagtgtgtacctggagaagctggagactccggaaagccgggtgctgcgtttcaccaggtggggctgctccgagtgaagccaggccgtggagacagaacacgctccatgtcctgtagtgacaagatggcccgatggaacgtcctcggatgccaaggggcactgttgatgcacttgctggaagagcccatctacctgtcagctgtggtcattgggaagtgcccatacagccaggaagccatgcagagagcactgattggaaggtgtcagaatgtgtctgctttaccaaaaggcttcggagttcaagaattaaaaatactgcagtcagatttactatttgaacagagccgcagtgcggtgcaggcaaaaagggctgatagcccaggtcgacttgttccttgtggggcagccatcagctggagtgcagttcctgagcagcctttggatgttactgccaatggctttccacagggaacaacaaagaaaacaattggaagccttcaggcaagatcccaaatcagcaaagtggaactcttcagatcattccagaagctgctaagcagaattgcaagggacaagtggccacactccctcagggttttggctgaagcggagcagctacgaggagcagccgaccgtgcgcttccaacaccaggtgctgctcgtggccctgctcggacccgaaagcgacgggttcctcgcctggagcacgttccccgccttcaaccggctgcaaggggatcgcctgcgcgtcccgctcgtttcgactagagaagaagacaggaaccaggatgggaagacggacatgttacattttaagctggagcttcccctgcagtccacggagcacgttctcggtgtgcagctcatcctgactttctcctatcgattacacaggatggcgaccctcgtgatgcagagcatggcgtttctccagtcctcctttcctgtcccgggatcccagttatacgtgaacggagacctgaggctgcagcagaagcagccgctgagctgtggtggcctagatgcccgatacaacatatccgtgatcaacgggaccagcccctttgcctatgactacgacctcacccatattgttgctgcctaccaggagaggaacgttaccaccgtcctgaatgatcccaaccccatctggctggtgggcagggccgcagatgctccatttgtgattaatgctatcatccgataccctgtggaagtcatttcttatcagccaggattctgggagatggtaaagttcgcctgggtgcagtatgtcagcatcctgcttatcttcctctgggtgtttgaaagaatcaagatcttcgtgtttcagaatcaggtggtgaccaccattcctgtgacagtgacgccccggggagacttgtgtaaggagcacttatcctagaaaggccatttctgaagactcagcaggaccgtggctgcctcattgtcatcttctgggaacatcttaggaccttttgaaagagcccagcggacacctgcgggcttgtgtgcttttccctcagagacaacggttctttccggttttgctctacacagttccgtatcttcagagctcctgcagaattgtcaggggactagtttgtggaaaggtctgagagttcctggaggctataattagctttttggggttttccttctttgccttagcgttgaatttcaggagaaaattgcagtcagttcagacatcttggaaagagtcccatctctggtcaagcagagacttttcctctgttgaactgaggaacacactgtgcatttctaccttctgttgtgagccactcttactcttttcagggctctcttgtgacaaacatgccaatcactagcactttgcacccctgggcttctccatttcccattcacagctttgatttccagagctgaggcctttaactggagacctggaggggcagggcccaaggggcaagggccgcattagcacaggcaatcagggagggccgctgaaggacacttggaccgtccacctgccccagcccaacagtcagtcatctgtcatcagctcagctgagcagccctggatctttgccgtactgtgactggctctttgccctatttttccctctgtctgtgcccctggatggcaggctgaagtcagaggggctgtttcattctcagccccctcagcagcactgggggaagaaagcattgtcacaacaggttctttctggccctcacccaacagcctgggcacttggccctcctcctccttgacagccctcccccttcctgcaaaggacaggggcgacaggggttggtgttgggattggctcccgctgcctgacaaccacaagtttatttggaaggctagcgggaagcccagcggctggcgtttcccttgactaaggaacagggtgcccatcagagtggggcgggcagctttgggaaggacacaagaagcagtaagagtgtaaagaggatgctggcctgggcaggccagtccagcctggccactagcagaataccaagcagtccagtggattaccctcgtggctaagcaagtgtctgcaggagcagagatggctggaaggggcctctgcacacggaagatggcttgttcagcccattcacctcctgaggatgtgggcagtctcctccaagaacacatggagctgcttcctgatcccaagcaggtcattgccactggaaggacatggccccggtgatccatgcttcatgcccacccagaaacacacccctcagtgtgtgcctcagtttactttggagatcagttgtcgtttttagtgctcctttaggcttactaaaacagttttggaaacaaagctattttgaagtattcaagcagaggaattccctaacactgacccccttgtctttttttaatattcaggctgttttatatgcctaaatttttttcttaagatctaaacgaaaaatagtttcttgtttaaattcacataaggcaatgagatatggaaagatgacaagatacgtataaacattggtttgcattttattaaattattctaatgcaaatcttgtataaagaacccatgatgttttgtaactttctaattaaaatgttcaaaatg

SEQ ID NO: 379655 - DNA, 2260 bp, Homo sapiens
acgtccgccttaccggcggattaagctcgctttcttctaggcgcgtttcctgaaggtcgatggccaggtggtcttcataaactatactgccttgtgatgcctccctagaaatgagaggtctcaataccagctcagaccatgtggaccgcggatgagattgctcagctatgctatgaacactatgggatcaggctgcccaagaaggggaagcctgagccaaaccatgagtggacattattggcagcggtggtgaagatacaatctccagctgacaaggcctgcgacacccctgataagccggtgcaagtgacaaaggaagttgtgtcaatgggaacaggaacaaaatgcataggacagtccaaaatgaggaagaacggagacatcctcaatgatagccatgctgaggtcatagccagaaggagtttccaaaggtaccttctccaccaactccagttggcagccaccctgaaagaggatagcatctttgtcccaggaactcaaaaaggagtgtggaaacttagacgagacctcatttttgtgtttttctccagccatacaccctgtggggatgcctccatcattccgatgcttgagtttgaagatcagccttgctgtcctgtcttcagaaattgggccaacaactcatcagtagaagccagtagtaacctggaagctcctggaaatgaaagaaaatgtgaagaccctgacagtcctgtaaccaaaaagatgaggcttgagcctgggactgcagccagggaggtcaccaacggagcagctcaccatcagagttttggcaagcagaaaagtggcccaatctcaccaggcatccacagctgtgatctcactgtagagggactggctactgtcaccagaatagcccctggtagtgccaaagtgatagacgtttatagaactggagccaagtgtgtacctggagaagctggagactccggaaagccgggtgctgcgtttcaccaggtggggctgctccgagtgaagccaggccgtggagacagaacacgctccatgtcctgtagtgacaagatggcccgatggaacgtcctcggatgccaaggggcactgttgatgcacttgctggaagagcccatctacctgtcagctgtggtcattgggaagtgcccatacagccaggaagccatgcagagagcactgattggaaggtgtcagaatgtgtctgctttaccaaaaggcttcggagttcaagaattaaaaatactgcagtcagatttactatttgaacagagccgcagtgcggtgcaggcaaaaagggctgatagcccaggtcgacttgttccttgtggggcagccatcagctggagtgcagttcctgagcagcctttggatgttactgccaatggctttccacagggaacaacaaagaaaacaattggaagccttcaggcaagatcccaaatcagcaaagtggaactcttcagatcattccagaagctgctaagcagaattgcaagggacaagtggccacactccctcagggttttggctgaagcggagcagctacgaggagcagccgaccgtgcgcttccaacaccaggtgctgctcgtggccctgctcggacccgaaagcgacgggttcctcgcctggagcacgttccccgccttcaaccggctgcaaggggatcgcctgcgcgtcccgctcgtttcgtgggggagataatgcctctttcttttgtgtacagcaggacagtggggtcattgtgtatgtacagaagtgatgtggattcctccccagactcattagtgaccagggctgctgggcctgtttgggtttcctagactagagaagaagacaggaaccaggatgggaagacggacatgttacattttaagctggagcttcccctgcagtccacggagcacgttctcggtgtgcagctcatcctgactttctcctatcgattacacaggatggcgaccctcgtgatgcagagcatggcgtttctccagtcctcctttcctgtcccgggatcccagttatacgtgaacggagacctgaggctgcagcagaagcagccgctgagctgtggtggcctagatgcccgatacaatgtaagggcgcttctcattgtccagctcctttgtttctgtgtgttactgttcgtcgagttctttgaagagggggataaaaagtagaaatatttctctgtgggtggctttcaagggaccttctgaggaattcttgccatgaagtcttttcagactatgaagatacacctgtatt

SEQ ID NO: 379656 - DNA, 1373 bp, Homo sapiens
tggcaaccaggagaagccaaacttggtcccccggctcgcggagtgcctgcgagcggtgctcatggcgctctatgagctcttctctcacccggtcgagcgcagttaccgcgcggggctctgctccaaagccgcgctgttcctgctgctggccgctgcgctcacgtacatcccgccgctgctggtggccttccggagccacggtgagcctgccccggccgctgtgccacgaggctccccgggcgcgctcggccagggccggcctccctaaccgcctccctaccgccctctttaactcagggttttggctgaagcggagcagctacgaggagcagccgaccgtgcgcttccaacaccaggtgctgctcgtggccctgctcggacccgaaagcgacgggttcctcgcctggagcacgttccccgccttcaaccggctgcaaggggatcgcctgcgcgtcccgctcgtttcgtgggggagataatgcctctttcttttgtgtacagcaggacagtggggtcattgtgtatgtacagaagtgatgtggattcctccccagactcattagtgaccagggctgctgggcctgtttgggtttcctagactagagaagaagacaggaaccaggatgggaagacggacatgttacattttaagctggagcttcccctgcagtccacggagcacgttctcggtgtgcagctcatcctgactttctcctatcgattacacgtgagtcagtccgctgggaggctgtcctctcccttgtgtctttttagtagaccagagtccttcttctgatttctagaagacccgcactctagcgggccctcttccccatgtagtttgggatttaacttaggccaatggaatggttttcactagtcatattaactgacatgggctattaatagctcagaaggttctaggcagtgtttcctgcatggctacgctaggtatgtgagggcctcttaggtttcagccaagacaggtgactcttagcacccagagcccttcagatctgatggcggttggtattgttggtccttctaatgatttcagaggatggcgaccctcgtgatgcagagcatggcgtttctccagtcctcctttcctgtcccgggatcccagttatacgtgaacggagacctgaggctgcagcagaagcagccgctgagctgtggtggcctagatgcccgatacaatgtaagggcgcttctcattgtccagctcctttgtttctgtgtgttactgttcgtcgagttctttgaagagggggataaaaagtagaaatatttctctgtgggtggctttcaagggaccttctgaggaattcttgccatgaagtcttttcagactatgaagatacacctgtatt

SEQ ID NO: 379657 - DNA, 252 bp, Homo sapiens
tagacatgtgaatccaattcatcaagggcttctttccaaaaaatcatgaaaccaggaaatgatattttctttctgtgtactttcctccttcctttcactgctgtaagaatgaggaagcgagttgtagctcagaacaaaaccacaaaaacctttccatagatccagctcaaatcagggaaatcagcatctcacttttgctgcctgtccctcctgtagaaaaccctgagaattttgtttgttttgtttctttct

SEQ ID NO: 379658 - DNA, 553 bp, Homo sapiens
gctttcctggtttccctcctttctctcttaattttcatttccttgtttggcttcttctcaacctgtatgttaaatgttggcgtcctcaaggtagacccagccccacttcgtcctctgcactctctcccttggtggtctccaacagcccatgcctttaactaccacctatacaccaacctaacgtccatctctctgacctccagatctgcttagcagtatctcacagtgacctcagcatcaagatgtcccaaatccacccctgaccacctctgcagatctgacaacagcatccttctttcggctgcagacaaagccagcatcctagaaatagcctgtgactagcctccctctcacatctcctcaatgaacaagtcctcaaaatgccagcttttattgattgattgattgatttattcattcattgagacagagtctcactgtgtcacccaggctgaagtgcagtggcacgatctcagctcaccgtaacctctacctcctgggttcaagcaattctcgtgcctcagcctcctgaatagctgggattacaggcgac

SEQ ID NO: 379659 - DNA, 403 bp, Homo sapiens
cctattctcaggaacgttctggccttcctaacagtcatatccccaaagctgttcttaagacaatgtaggcttttcattgcatccttctttctttttgaagaccatgtagacattcagcctgcattttttctttttaaaagcacactgctcacatcttttggagttcttcccctaagatgggctgcagagtaggttagcttaatttttctactgcataggataaacacatatattcttttgatttaagagttttattgttagccaagcatggtggcacgggcctgtaatccccattactctataggctaaggcacaggcatcccttgatcctggaaggcggaggttgcagtgagcttagatggcaccactgcactctagtcagagaaacagagtgagactgtct

SEQ ID NO: 379660 - DNA, 2114 bp, Homo sapiens
tgggagggtacctgaaggtggggtcaagggaggccccaaaacagtctacacagcaggagggatggctggggctcttgagctataagtggcacctcagggccctgacgggcgtctcgccatgctgctcctgggcctgctgctgctgctgcccctgctggctggcgcccgcctgctgtggaactggtggaagctccggagcctccacctcccgcctcttgccccgggcttcttgcacttgctgcagcccgacctcccaatctatctgcttggcctgactcagaaattcgggcccatctacaggctccaccttgggctgcaagatgtggtggtgctgaactccaagaggaccattgaggaagccatggtcaaaaagtgggcagactttgctggcagacctgagccacttacctacaagctggtgtctaggaactacccggacctgtccttgggagactactccctgctctggaaagcccacaagaagctcacccgctcagccctgctgctgggcatccgtgactccatggagccagtggtggagcagctgacccaggagttctgtgagcgcatgagagcccagcccggcacccctgtggccattgaggaggaattctctctcctcacctgcagcatcatctgttacctcaccttcggagacaagatcaaggacgacaacttaatgcctgcctattacaaatgtatccaggaggtgttaaaaacctggagccactggtccatccaaattgtggacgtgattccctttctcaggttcttccccaatccaggtctccggaggctgaagcaggccatagagaagagggatcacatcgtggagatgcagctgaggcagcacaaggagagcctcgtggcaggccagtggagggacatgatggactacatgctccaaggggtggcgcagccgagcatggaagagggctctggacagctcctggaagggcacgtgcacatggctgcagtggacctcctgatcggtggcactgagaccacagcaaacaccctctcctgggccgtggtttttttgcttcaccaccctgagattcagcagcgactgcaggaggagctagaccacgaactgggccctggtgcctccagctcccgggtcccctacaaggaccgtgcacggctgcccttgctcaatgccaccatcgccgaggtgctgcgcctgcggcccgttgtgcccttagccttgccccaccgcaccacacggcccagcagcatctccggctacgacatccctgagggcacagtcatcattccgaacctccaaggcgcccacctggatgagacggtctgggagaggccacatgagttctggcctgatcgcttcctggagccaggcaagaactccagagctctggccttcggctgcggtgcccgcgtgtgcctgggcgagccgctggcgcgcctggagctcttcgtggtgctgacccgactgctgcaggccttcacgctgctgccctccggggacgccctgccctccctgcagcccctgccccactgcagtgtcatcctcaagatgcagcctttccaagtgcggctgcagccccgggggatgggggcccacagcccgggccagagccagtgatggggcaggaccgatgccagccgggtacctcagtttctcctttattgctcctgtacgaacccctcccctcccccctgtaaacacagtgctgcgagatcgctggcagagaaggcttcctccagcggctgggtggtgaaggaccctggctcttctctcggggcgacccctcagtgctcggcagtcatactggggtgcgagagaggtgggcagcagctcagcctccccccgctggggagcgaaagtttcttggtctcagcttcatttccgtgaagggcaccgagaactcgaagcccttccagtggtaccagctcactccctgggaaaggggttgtcaagagagagtcaaagccggatgtcccatctgctcttcccgttccccttaaggaggtagctcccagcactcaaccaacctccccgcagagctcccttcctgaccctccgctgcagaggattgaggcttaattctgagctggccctttccagccaataaatcaactccagctccctc

SEQ ID NO: 379661 - DNA, 2104 bp, Homo sapiens
  misc_feature (2095)..(2095): n is a, c, g, or t
tgggagggtacctgaaggtggggtcaagggaggccccaaaacagtctacacagcaggagggatggctggggctcttgagctataagtggcacctcagggccctgacgggcgtctcgccatgctgctcctgggcctgctgctgctgctgcccctgctggctggcgcccgcctgctgtggaactggtggaagctccggagcctccacctcccgcctcttgccccgggcttcttgcacttgctgcagcccgacctcccaatctatctgcttggcctgactcagaaattcgggcccatctacaggctccaccttgggctgcaagatgtggtggtgctgaactccaagaggaccattgaggaagccatggtcaaaaaacaagctggtgtctaggaactacccggacctgtccttgggagactactccctgctctggaaagcccacaagaagctcacccgctcagccctgctgctgggcatccgtgactccatggagccagtggtggagcagctgacccaggagttctgtgagcgcatgagagcccagcccggcacccctgtggccattgaggaggaattctctctcctcacctgcagcatcatctgttacctcaccttcggagacaagatcaaggacgacaacttaatgcctgcctattacaaatgtatccaggaggtgttaaaaacctggagccactggtccatccaaattgtggacgtgattccctttctcaggttcttccccaatccaggtctccggaggctgaagcaggccatagagaagagggatcacatcgtggagatgcagctgaggcagcacaaggagagcctcgtggcaggccagtggagggacatgatggactacatgctccaaggggtggcgcagccgagcatggaagagggctctggacagctcctggaagggcacgtgcacatggctgcagtggacctcctgatcggtggcactgagaccacagcaaacaccctctcctgggccgtggtttttttgcttcaccaccctgagattcagcagcgactgcaggaggagctagaccacgaactgggccctggtgcctccagctcccgggtcccctacaaggaccgtgcacggctgcccttgctcaatgccaccatcgccgaggtgctgcgcctgcggcccgttgtgcccttagccttgccccaccgcaccacacggcccagcagcatctccggctacgacatccctgagggcacagtcatcattccgaacctccaaggcgcccacctggatgagacggtctgggagaggccacatgagttctggcctgatcgcttcctggagccaggcaagaactccagagctctggccttcggctgcggtgcccgcgtgtgcctgggcgagccgctggcgcgcctggagctcttcgtggtgctgacccgactgctgcaggccttcacgctgctgccctccggggacgccctgccctccctgcagcccctgccccactgcagtgtcatcctcaagatgcagcctttccaagtgcggctgcagccccgggggatgggggcccacagcccgggccagagccagtgatggggcaggaccgatgccagccgggtacctcagtttctcctttattgctcctgtacgaacccctcccctcccccctgtaaacacagtgctgcgagatcgctggcagagaaggcttcctccagcggctgggtggtgaaggaccctggctcttctctcggggcgacccctcagtgctcggcagtcatactggggtgcgagagaggtgggcagcagctcagcctccccccgctggggagcgaaagtttcttggtctcagcttcatttccgtgaagggcaccgagaactcgaagcccttccagtggtaccagctcactccctgggaaaggggttgtcaagagagagtcaaagccggatgtcccatctgctcttcccgttccccttaaggaggtagctcccagcactcaaccaacctccccgcagagctcccttcctgaccctccgctgcagaggattgaggcttaattctgagctggccctttccagccaataaatcaactccagctccctctgcgaggctggcatgattnttccatttc

SEQ ID NO: 379662 - DNA, 2434 bp, Homo sapiens
tgggagggtacctgaaggtggggtcaagggaggccccaaaacagtctacacagcaggagggatggctggggctcttgagctataagtggcacctcagggccctgacgggcgtctcgccatgctgctcctgggcctgctgctgctgctgcccctgctggctggcgcccgcctgctgtggaactggtggaagctccggagcctccacctcccgcctcttgccccgggcttcttgcacttgctgcagcccgacctcccaatctatctgcttggcctgactcagaaattcgggcccatctacaggctccaccttgggctgcaagatgtggtggtgctgaactccaagaggaccattgaggaagccatggtcaaaaagtgggcagactttgctggcagacctgagccacttacctacaagctggtgtctaggaactacccggacctgtccttgggagactactccctgctctggaaagcccacaagaagctcacccgctcagccctgctgctgggcatccgtgactccatggagccagtggtggagcagctgacccaggagttctgtgagcgcatgagagcccagcccggcacccctgtggccattgaggaggaattctctctcctcacctgcagcatcatctgttacctcaccttcggagacaagatcaaggacgacaacttaatgcctgcctattacaaatgtatccaggaggtgttaaaaacctggagccactggtccatccaaattgtggacgtgattccctttctcaggttcttccccaatccaggtctccggaggctgaagcaggccatagagaagagggatcacatcgtggagatgcagctgaggcagcacaaggagagcctcgtggcaggccagtggagggacatgatggactacatgctccaaggggtggcgcagccgagcatggaagagggctctggacagctcctggaagggcacgtgcacatggctgcagtggacctcctgatcggtggcactgagaccacagcaaacaccctctcctgggccgtggtttttttgcttcaccaccctgagattcagcagcgactgcaggaggagctagaccacgaactgggccctggtgcctccagctcccgggtcccctacaaggaccgtgcacggctgcccttgctcaatgccaccatcgccgaggtgctgcgcctgcggcccgttgtgcccttagccttgccccaccgcaccacacggcccagcagcatctccggctacgacatccctgagggcacagtcatcattccgaacctccaaggcgcccacctggatgagacggtctgggagaggccacatgagttctggcctgatcgcttcctggagccaggcaagaactccagagctctggccttcggctgcggtgcccgcgtgtgcctgggcgagccgctggcgcgcctggagctcttcgtggtgctgacccgactgctgcaggccttcacgctgctgccctccggggacgccctgccctccctgcagcccctgccccactgcagtgtcatcctcaagatgcagcctttccaagtgcggctgcagccccgggggatgggggcccacagcccgggccagagccagtgatggggcaggaccgatgccagccgggtacctcagtttctcctttattgctcctgtacgaacccctcccctcccccctgtaaacacagtgctgcgagatcgctggcagagaaggcttcctccagcggctgggtggtgaaggaccctggctcttctctcggggcgacccctcagtgctcggcagtcatactggggtgcgagagaggtgggcagcagctcagcctccccccgctggggagcgaaagtttcttggtctcagcttcatttccgtgaagggcaccgagaactcgaagcccttccagtggtaccagctcactccctgggaaaggggttgtcaagagagagtcaaagccggatgtcccatctgctcttcccgttccccttaaggaggtagctcccagcactcaaccaacctccccgcagagctcccttcctgaccctccgctgcagaggattgaggcttaattctgagctggccctttccagccaataaatcaactccagctccctcaaaaaaaaaaaaacctacaaaatcttttaatagctaataaatcacaatacacaatactcgcgcaattgtactatatcttaccttaaccctttaaatcctccttcaaatttactcctttgctcaaacaaaaacagctctggggggcccccgttcccaatttgtccttatagtaatcctttaccactcactggtcctctatttaaagcttggagttaggaaaactctgggctccccaactttatctttctaagcaatctcccttttcgacttgggctttaataaaaaaacccccaccttatgcctttccaacgttcgacatc

SEQ ID NO: 379663 - DNA, 2197 bp, Homo sapiens
tgggagggtacctgaaggtggggtcaagggaggccccaaaacagtctacacagcaggagggatggctggggctcttgagctataagtggcacctcagggccctgacgggcgtctcgccatgctgctcctgggcctgctgctgctgctgcccctgctggctggcgcccgcctgctgtggaactggtggaagctccggagcctccacctcccgcctcttgccccgggcttcttgcacttgctgcagcccgacctcccaatctatctgcttggcctgactcagaaattcgggcccatctacaggctccaccttgggctgcaagatgtggtggtgctgaactccaagaggaccattgaggaagccatggtcaaaaagtgggcagactttgctggcagacctgagccacttacctacaagctggtgtctaggaactacccggacctgtccttgggagactactccctgctctggaaagcccacaagaagctcacccgctcagccctgctgctgggcatccgtgactccatggagccagtggtggagcagctgacccaggagttctgtgagcgcatgagagcccagcccggcacccctgtggccattgaggaggaattctctctcctcacctgcagcatcatctgttacctcaccttcggagacaagatcaaggacgacaacttaatgcctgcctattacaaatgtatccaggaggtgttaaaaacctggagccactggtccatccaaattgtggacgtgattccctttctcaggttcttccccaatccaggtctccggaggctgaagcaggccatagagaagagggatcacatcgtggagatgcagctgaggcagcacaaggagagcctcgtggcaggccagtggagggacatgatggactacatgctccaaggggtggcgcagccgagcatggaagagggctctggacagctcctggaagggcacgtgcacatggctgcagtggacctcctgatcggtggcactgagaccacagcaaacaccctctcctgggccgtggtttttttgcttcaccaccctgagattcagcagcgactgcaggaggagctagaccacgaactgggccctggtgcctccagctcccgggtcccctacaaggaccgtgcacggctgcccttgctcaatgccaccatcgccgaggtgctgcgcctgcggcccgttgtgcccttagccttgccccaccgcaccacacggcccagcaggtgactcccgagggttggggatgagtgaggaaagcccgagcccagggaggtcctggccagcctctaactccagcccccttcagcatctccggctacgacatccctgagggcacagtcatcattccgaacctccaaggcgcccacctggatgagacggtctgggagaggccacatgagttctggcctgatcgcttcctggagccaggcaagaactccagagctctggccttcggctgcggtgcccgcgtgtgcctgggcgagccgctggcgcgcctggagctcttcgtggtgctgacccgactgctgcaggccttcacgctgctgccctccggggacgccctgccctccctgcagcccctgccccactgcagtgtcatcctcaagatgcagcctttccaagtgcggctgcagccccgggggatgggggcccacagcccgggccagagccagtgatggggcaggaccgatgccagccgggtacctcagtttctcctttattgctcctgtacgaacccctcccctcccccctgtaaacacagtgctgcgagatcgctggcagagaaggcttcctccagcggctgggtggtgaaggaccctggctcttctctcggggcgacccctcagtgctcggcagtcatactggggtgcgagagaggtgggcagcagctcagcctccccccgctggggagcgaaagtttcttggtctcagcttcatttccgtgaagggcaccgagaactcgaagcccttccagtggtaccagctcactccctgggaaaggggttgtcaagagagagtcaaagccggatgtcccatctgctcttcccgttccccttaaggaggtagctcccagcactcaaccaacctccccgcagagctcccttcctgaccctccgctgcagaggattgaggcttaattctgagctggccctttccagccaataaatcaactccagctccctc

SEQ ID NO: 379664 - DNA, 929 bp, Homo sapiens
gcgaattcaatagtgattgtagagctgagatcgcaccacacggtccagcagcatctccggctacgacatccctgagggcacagtcatcattccgaacctccaaggcgcccacctggatgagacggtctgggagaggccacatgagttctggcctgatcgcttcctggagccaggcaagaactccagagctctggccttcggctgcggtgcccgcgtgtgcctgggcgagccgctggcgcgcctggagctcttcgtggtgctgacccgactgctgcaggccttcacgctgctgccctccggggacgccctgccctccctgcagcccctgccccactgcagtgtcatcctcaagatgcagcctttccaagtgcggctgcagccccgggggatgggggcccacagcccgggccagagccagtgatggggcaggaccgatgccagccgggtacctcagtttctcctttattgctcctgtacgaacccctcccctcccccctgtaaacacagtgctgcgagatcgctggcagagaaggcttcctccagcggctgggtggtgaaggaccctggctcttctctcggggcgacccctcagtgctcggcagtcatactggggtgcgagagaggtgggcagcagctcagcctccccccgctggggagcgaaagtttcttggtctcagcttcatttccgtgaagggcaccgagaactcgaagcccttccagtggtaccagctcactccctgggaaaggggttgtcaagagagagtcaaagccggatgtcccatctgctcttcccgttccccttaaggaggtagctcccagcactcaaccaacctccccgcagagctcccttcctgaccctccgctgcagaggattgaggcttaattctgagctggccctttccagccaataaatcaactccagctccctc

SEQ ID NO: 379665 - DNA, 2142 bp, Homo sapiens
  misc_feature (2133)..(2133): n is a, c, g, or t
tgggagggtacctgaaggtggggtcaagggaggccccaaaacagtctacacagcaggagggatggctggggctcttgagctataagtggcacctcagggccctgacgggcgtctcgccatgctgctcctgggcctgctgctgctgctgcccctgctggctggcgcccgcctgctgtggaactggtggaagctccggagcctccacctcccgcctcttgccccgggcttcttgcacttgctgcagcccgacctcccaatctatctgcttggcctgactcagaaattcgggcccatctacaggctccaccttgggctgcaagatgtggtggtgctgaactccaagaggaccattgaggaagccatggtcaaaaagtgggcagactttgctggcagacctgagccacttacctacaagctggtgtctaggaactacccggacctgtccttgggagactactccctgctctggaaagcccacaagaagctcacccgctcagccctgctgctgggcatccgtgactccatggagccagtggtggagcagctgacccaggagttctgtgagcgcatgagagcccagcccggcacccctgtggccattgaggaggaattctctctcctcacctgcagcatcatctgttacctcaccttcggagacaagatcaaggacgacaacttaatgcctgcctattacaaatgtatccaggaggtgttaaaaacctggagccactggtccatccaaattgtggacgtgattccctttctcaggttcttccccaatccaggtctccggaggctgaagcaggccatagagaagagggatcacatcgtggagatgcagctgaggcagcacaaggagagcctcgtggcaggccagtggagggacatgatggactacatgctccaaggggtggcgcagccgagcatggaagagggctctggacagctcctggaagggcacgtgcacatggctgcagtggacctcctgatcggtggcactgagaccacagcaaacaccctctcctgggccgtggtttttttgcttcaccaccctgagattcagcagcgactgcaggaggagctagaccacgaactgggccctggtgcctccagctcccgggtcccctacaaggaccgtgcacggctgcccttgctcaatgccaccatcgccgaggtgctgcgcctgcggcccgttgtgcccttagccttgccccaccgcaccacacggcccagcagcatctccggctacgacatccctgagggcacagtcatcattccgaacctccaaggcgcccacctggatgagacggtctgggagaggccacatgagttctggcctgatcgcttcctggagccaggcaagaactccagagctctggccttcggctgcggtgcccgcgtgtgcctgggcgagccgctggcgcgcctggagctcttcgtggtgctgacccgactgctgcaggccttcacgctgctgccctccggggacgccctgccctccctgcagcccctgccccactgcagtgtcatcctcaagatgcagcctttccaagtgcggctgcagccccgggggatgggggcccacagcccgggccagagccagtgatggggcaggaccgatgccagccgggtacctcagtttctcctttattgctcctgtacgaacccctcccctcccccctgtaaacacagtgctgcgagatcgctggcagagaaggcttcctccagcggctgggtggtgaaggaccctggctcttctctcggggcgacccctcagtgctcggcagtcatactggggtgcgagagaggtgggcagcagctcagcctccccccgctggggagcgaaagtttcttggtctcagcttcatttccgtgaagggcaccgagaactcgaagcccttccagtggtaccagctcactccctgggaaaggggttgtcaagagagagtcaaagccggatgtcccatctgctcttcccgttccccttaaggaggtagctcccagcactcaaccaacctccccgcagagctcccttcctgaccctccgctgcagaggattgaggcttaattctgagctggccctttccagccaataaatcaactccagctccctctgcgaggctggcatgattnttccatttc

SEQ ID NO: 379666 - DNA, 2299 bp, Homo sapiens
  misc_feature (2129)..(2130): n is a, c, g, or t
  misc_feature (2132)..(2132): n is a, c, g, or t
  misc_feature (2143)..(2143): n is a, c, g, or t
  misc_feature (2160)..(2160): n is a, c, g, or t
  misc_feature (2227)..(2227): n is a, c, g, or t
  misc_feature (2240)..(2241): n is a, c, g, or t
  misc_feature (2254)..(2254): n is a, c, g, or t
  misc_feature (2256)..(2256): n is a, c, g, or t
  misc_feature (2275)..(2275): n is a, c, g, or t
  misc_feature (2285)..(2285): n is a, c, g, or t
tgggagggtacctgaaggtggggtcaagggaggccccaaaacagtctacacagcaggagggatggctggggctcttgagctataagtggcacctcagggccctgacgggcgtctcgccatgctgctcctgggcctgctgctgctgctgcccctgctggctggcgcccgcctgctgtggaactggtggaagctccggagcctccacctcccgcctcttgccccgggcttcttgcacttgctgcagcccgacctcccaatctatctgcttggcctgactcagaaattcgggcccatctacaggctccaccttgggctgcaagatgtggtggtgctgaactccaagaggaccattgaggaagccatggtcaaaaagtgggcagactttgctggcagacctgagccacttacctacaagctggtgtctaggaactacccggacctgtccttgggagactactccctgctctggaaagcccacaagaagctcacccgctcagccctgctgctgggcatccgtgactccatggagccagtggtggagcagctgacccaggagttctgtgagcgcatgagagcccagcccggcacccctgtggccattgaggaggaattctctctcctcacctgcagcatcatctgttacctcaccttcggagacaagatcaaggacgacaacttaatgcctgcctattacaaatgtatccaggaggtgttaaaaacctggagccactggtccatccaaattgtggacgtgattccctttctcaggttcttccccaatccaggtctccggaggctgaagcaggccatagagaagagggatcacatcgtggagatgcagctgaggcagcacaaggagagcctcgtggcaggccagtggagggacatgatggactacatgctccaaggggtggcgcagccgagcatggaagagggctctggacagctcctggaagggcacgtgcacatggctgcagtggacctcctgatcggtggcactgagaccacagcaaacaccctctcctgggccgtggtttttttgcttcaccaccctgagattcagcagcgactgcaggaggagctagaccacgaactgggccctggtgcctccagctcccgggtcccctacaaggaccgtgcacggctgcccttgctcaatgccaccatcgccgaggtgctgcgcctgcggcccgttgtgcccttagccttgccccaccgcaccacacggcccagcagcatctccggctacgacatccctgagggcacagtcatcattccgaacctccaaggcgcccacctggatgagacggtctgggagaggccacatgagttctggcctgatcgcttcctggagccaggcaagaactccagagctctggccttcggctgcggtgcccgcgtgtgcctgggcgagccgctggcgcgcctggagctcttcgtggtgctgacccgactgctgcaggccttcacgctgctgccctccggggacgccctgccctccctgcagcccctgccccactgcagtgtcatcctcaagatgcagcctttccaagtgcggctgcagccccgggggatgggggcccacagcccgggccagagccagtgatggggcaggaccgatgccagccgggtacctcagtttctcctttattgctcctgtacgaacccctcccctcccccctgtaaacacagtgctgcgagatcgctggcagagaaggcttcctccagcggctgggtggtgaaggaccctggctcttctctcggggcgacccctcagtgctcggcagtcatactggggtgcgagagaggtgggcagcagctcagcctccccccgctggggagcgaaagtttcttggtctcagcttcatttccgtgaagggcaccgagaactcgaagcccttccagtggtaccagctcactccctgggaaaggggttgtcaagagagagtcaaagccggatgtcccatctgctcttcccgttccccttaaggaggtagctcccagcactcaaccaacctccccgcagagctcccttcctgaccctccgctgcagaggattgaggcttaattctgagctggccctttccagccaataaatcaactccagctccctcaaaaaaaaaaaaaannanctctcccaccncccacacatccatcccnccatacccacacataccttttcaactctttcaccttctctctactatcacaaaaataaaaaaacctngggggggccccgnnccaaattcccctntnggggcggtttaaaatactnggcccctttnaaactcgtgcctgg

SEQ ID NO: 379667 - DNA, 2306 bp, Homo sapiens
  misc_feature (2130)..(2130): n is a, c, g, or t
  misc_feature (2146)..(2146): n is a, c, g, or t
  misc_feature (2150)..(2150): n is a, c, g, or t
  misc_feature (2162)..(2162): n is a, c, g, or t
  misc_feature (2198)..(2198): n is a, c, g, or t
  misc_feature (2234)..(2234): n is a, c, g, or t
  misc_feature (2247)..(2248): n is a, c, g, or t
  misc_feature (2261)..(2261): n is a, c, g, or t
  misc_feature (2263)..(2263): n is a, c, g, or t
  misc_feature (2282)..(2282): n is a, c, g, or t
  misc_feature (2292)..(2292): n is a, c, g, or t
tgggagggtacctgaaggtggggtcaagggaggccccaaaacagtctacacagcaggagggatggctggggctcttgagctataagtggcacctcagggccctgacgggcgtctcgccatgctgctcctgggcctgctgctgctgctgcccctgctggctggcgcccgcctgctgtggaactggtggaagctccggagcctccacctcccgcctcttgccccgggcttcttgcacttgctgcagcccgacctcccaatctatctgcttggcctgactcagaaattcgggcccatctacaggctccaccttgggctgcaagatgtggtggtgctgaactccaagaggaccattgaggaagccatggtcaaaaagtgggcagactttgctggcagacctgagccacttacctacaagctggtgtctaggaactacccggacctgtccttgggagactactccctgctctggaaagcccacaagaagctcacccgctcagccctgctgctgggcatccgtgactccatggagccagtggtggagcagctgacccaggagttctgtgagcgcatgagagcccagcccggcacccctgtggccattgaggaggaattctctctcctcacctgcagcatcatctgttacctcaccttcggagacaagatcaaggacgacaacttaatgcctgcctattacaaatgtatccaggaggtgttaaaaacctggagccactggtccatccaaattgtggacgtgattccctttctcaggttcttccccaatccaggtctccggaggctgaagcaggccatagagaagagggatcacatcgtggagatgcagctgaggcagcacaaggagagcctcgtggcaggccagtggagggacatgatggactacatgctccaaggggtggcgcagccgagcatggaagagggctctggacagctcctggaagggcacgtgcacatggctgcagtggacctcctgatcggtggcactgagaccacagcaaacaccctctcctgggccgtggtttttttgcttcaccaccctgagattcagcagcgactgcaggaggagctagaccacgaactgggccctggtgcctccagctcccgggtcccctacaaggaccgtgcacggctgcccttgctcaatgccaccatcgccgaggtgctgcgcctgcggcccgttgtgcccttagccttgccccaccgcaccacacggcccagcagcatctccggctacgacatccctgagggcacagtcatcattccgaacctccaaggcgcccacctggatgagacggtctgggagaggccacatgagttctggcctgatcgcttcctggagccaggcaagaactccagagctctggccttcggctgcggtgcccgcgtgtgcctgggcgagccgctggcgcgcctggagctcttcgtggtgctgacccgactgctgcaggccttcacgctgctgccctccggggacgccctgccctccctgcagcccctgccccactgcagtgtcatcctcaagatgcagcctttccaagtgcggctgcagccccgggggatgggggcccacagcccgggccagagccagtgatggggcaggaccgatgccagccgggtacctcagtttctcctttattgctcctgtacgaacccctcccctcccccctgtaaacacagtgctgcgagatcgctggcagagaaggcttcctccagcggctgggtggtgaaggaccctggctcttctctcggggcgacccctcagtgctcggcagtcatactggggtgcgagagaggtgggcagcagctcagcctccccccgctggggagcgaaagtttcttggtctcagcttcatttccgtgaagggcaccgagaactcgaagcccttccagtggtaccagctcactccctgggaaaggggttgtcaagagagagtcaaagccggatgtcccatctgctcttcccgttccccttaaggaggtagctcccagcactcaaccaacctccccgcagagctcccttcctgaccctccgctgcagaggattgaggcttaattctgagctggccctttccagccaataaatcaactccagctccctcaaaaaaaaaaaccacncccccaccccacccancacnaccccccaaccncaccacccacccaccaaccccccacacccacccccncaccaccacccccaaccacccaaaacaaaaaacctngggggggccccgnnccaaattcccctntnggggcggtttaaaatactnggcccctttnaaactcgtgcctgg

SEQ ID NO: 379668 - DNA, 2059 bp, Homo sapiens
tgggagggtacctgaaggtggggtcaagggaggccccaaaacagtctacacagcaggagggatggctggggctcttgagctataagtggcacctcagggccctgacgggcgtctcgccatgctgctcctgggcctgctgctgctgctgcccctgctggctggcgcccgcctgctgtggaactggtggaagctccggagcctccacctcccgcctcttgccccgggcttcttgcacttgctgcagcccgacctcccaatctatctgcttggcctgactcagaaattcgggcccatctacaggctccaccttgggctgcaagatgtggtggtgctgaactccaagaggaccattgaggaagccatggtcaaaaagtgggcagactttgctggcagacctgagccacttacctacaagctggtgtctaggaactacccggacctgtccttgggagactactccctgctctggaaagcccacaagaagctcacccgctcagccctgctgctgggcatccgtgactccatggagccagtggtggagcagctgacccaggagttctgtgagcgcatgagagcccagcccggcacccctgtggccattgaggaggaattctctctcctcacctgcagcatcatctgttacctcaccttcggagacaagatcaaggacgacaacttaatgcctgcctattacaaatgtatccaggaggtgttaaaaacctggagccactggtccatccaaattgtggacgtgattccctttctcaggttcttccccaatccaggtctccggaggctgaagcaggccatagagaagagggatcacatcgtggagatgcagctgaggcagcacaaggagagcctcgtggcaggccagtggagggacatgatggactacatgctccaaggggtggcgcagccgagcatggaagagggctctggacagctcctggaagggcacgtgcacatggctgcagtggacctcctgatcggtggcactgagaccacagcaaacaccctctcctgggccgtggtttttttgcttcaccaccctgagattcagcagcgactgcaggaggagctagaccacgaactgggccctggtgcctccagctcccgggtcccctacaaggaccgtgcacggctgcccttgctcaatgccaccatcgccgaggtgctgcgcctgcggcccgttgtgcccttagccttgccccaccgcaccacacggcccagcagcatctccggctacgacatccctgagggcacagtcatcattccgaacctccaaggcgcccacctggatgagacggtctgggagaggccacatgagttctggcctgatcgcttcctggagccaggcaagaactccagagctctggccttcggctgcggtgcccgcgtgtgcctgggcgagccgctggcgcgcctggagctcttcgtggtgctgacccgactgctgcaggccttcacgctgctgccctccggggacgccctgccctccctgcagcccctgccccactgcagtgtcatcctcaagatgcagcctttccaagtgcggctgcagccccgggggatgggggcccacagcccgggccagagccagtgatggggcaggaccgatgccagccgggtacctcagtttctcctttattgctcctgtacgaacccctcccctcccccctgtaaacacagtgctgcgagatcgctggcagagaaggcttcctccagcggctgggtggtgaaggaccctggctcttctctcggggcgacccctcagtgctcggcagtcatactggggtgcgagagaggtgggcagcagctcagcctccccccgctggggagcgaaagtttcttggtctcagcttcatttccgtgaagggcaccgagaactcgaagcccttccagtggtaccagctcactccctgggaaaggggttgtcaagagagagtcactcaaccaacctccccgcagagctcccttcctgaccctccgctgcagaggattgaggcttaattctgagctggccctttccagccaataaatcaactccagctccctc

SEQ ID NO: 379669 - DNA, 2059 bp, Homo sapiens
tgggagggtacctgaaggtggggtcaagggaggccccaaaacagtctacacagcaggagggatggctggggctcttgagctataagtggcacctcagggccctgacgggcgtctcgccatgctgctcctgggcctgctgctgctgctgcccctgctggctggcgcccgcctgctgtggaactggtggaagctccggagcctccacctcccgcctcttgccccgggcttcttgcacttgctgcagcccgacctcccaatctatctgcttggcctgactcagaaattcgggcccatctacaggctccaccttgggctgcaagatgtggtggtgctgaactccaagaggaccattgaggaagccatggtcaaaaagtgggcagactttgctggcagacctgagccacttacctacaagctggtgtctaggaactacccggacctgtccttgggagactactccctgctctggaaagcccacaagaagctcacccgctcagccctgctgctgggcatccgtgactccatggagccagtggtggagcagctgacccaggagttctgtgagcgcatgagagcccagcccggcacccctgtggccattgaggaggaattctctctcctcacctgcagcatcatctgttacctcaccttcggagacaagatcaaggacgacaacttaatgcctgcctattacaaatgtatccaggaggtgttaaaaacctggagccactggtccatccaaattgtggacgtgattccctttctcaggttcttccccaatccaggtctccggaggctgaagcaggccatagagaagagggatcacatcgtggagatgcagctgaggcagcacaaggagagcctcgtggcaggccagtggagggacatgatggactacatgctccaaggggtggcgcagccgagcatggaagagggctctggacagctcctggaagggcacgtgcacatggctgcagtggacctcctgatcggtggcactgagaccacagcaaacaccctctcctgggccgtggtttttttgcttcaccaccctgagattcagcagcgactgcaggaggagctagaccacgaactgggccctggtgcctccagctcccgggtcccctacaaggaccgtgcacggctgcccttgctcaatgccaccatcgccgaggtgctgcgcctgcggcccgttgtgcccttagccttgccccaccgcaccacacggcccagcagcatctccggctacgacatccctgagggcacagtcatcattccgaacctccaaggcgcccacctggatgagacggtctgggagaggccacatgagttctggcctgatcgcttcctggagccaggcaagaactccagagctctggccttcggctgcggtgcccgcgtgtgcctgggcgagccgctggcgcgcctggagctcttcgtggtgctgacccgactgctgcaggccttcacgctgctgccctccggggacgccctgccctccctgcagcccctgccccactgcagtgtcatcctcaagatgcagcctttccaagtgcggctgcagccccgggggatgggggcccacagcccgggccagagccagtgatggggcaggaccgatgccagccgggtacctcagtttctcctttattgctcctgtacgaacccctcccctcccccctgtaaacacagtgctgcgagatcgctggcagagaaggcttcctccagcggctgggtggtgaaggaccctggctcttctctcggggcgacccctcagtgctcggcagtcatactggggtgcgagagaggtgggcagcagctcagcctccccccgctggggacccttccagtggtaccagctcactccctgggaaaggggttgtcaagagagagtcaaagccggatgtcccatctgctcttcccgttccccttaaggaggtagctcccagcactcaaccaacctccccgcagagctcccttcctgaccctccgctgcagaggattgaggcttaattctgagctggccctttccagccaataaatcaactccagctccctc

SEQ ID NO: 379670 - DNA, 762 bp, Homo sapiens
ggaacagcagttgcccagataagccaaggcttagaaacgagcctctgaatgcagttgctaattcacgagcttcaggtcgtcactttaagggccttttctaccttgttgggaagaaacaagccctagaagtcctgagtgaaaagcagcatggtgagaacattccagtgcacagcaagggcctcgaatccaggccggtgaagagatcacgcatgggcagcagagccgcacgtgccgctcaggtgacccgttgctagtgggtcctggcaaccacacacggggctgttatgctttggtcaccatggaaattcccgggaggtgccaagtgtctgggctttgttttccaacagctgaaagacgatgcagttgccctggtagacgtgatcgctcctcctgactttgttctggactcaccgattggcagagccgacggcgaggtaaagggaggacagggcctcacgggagtgccccaagggttgatgggcatttctgcggagctgagatgctcctgtgggtcaggggtctggtgtcttctggaaagtggtcacacatggaggagcttcttggggagggcccgggacaagtcaggactgtctcactctggtgcttccccatgctggctctgtggttgcaggggacttgcccatcccctgcctgccttttcctcccgagatggggtggtggcactgcccgcctgcacaggcagaggttggaggtccacacactgtgacctctgccctcctgcatcagccttttaggcgacgg

SEQ ID NO: 379671 - DNA, 2921 bp, Homo sapiens
gggaccggaaatgagaatggcgccgctggagatcctttcctgcttttggtttccctggcaggggttgaactgtggagtgtgtgggctcttatcacgcgatggcatccactgtggaaggaggcgacacagctctgctcccagaattccccagggggcccctcgatgcctaccgagcaagagcgtccttcagctggaaggagctggcgctgttcacggaaggggagggcatgctccgctttaagaaaaccatcttctcagctcttgagaatgaccctcttttcgctcgttcccctggagccgatctgtccttggagaagtatcgcgagctgaacttccttcgatgcaagcggatcttcgagtatgacttcctcagtgtcgaagacatgttcaagagccctctgaaggtccccgccttgattcagtgcctgggcatgtatgactcttctctggctgccaagtacctcctccatagcttggtttttggatcagcagtttacagttctggttctgaaagacatctcacatatattcaaaagatcttcaggatggagatttttggatgttttgctctgaccgaattaagccacggcagtaataccaaggccattcgcacaactgcccactacgatcctgccactgaggaattcatcatacattcccctgatttcgaagctgccaagttttgggttggcaacatgggcaagacagccactcacgcggtggtgtttgctaagctgtgtgtgccaggggaccagtgccatgggctgcatccctttatcgtgcagatccgggacccgaagacccttcttcccatgcctggagtgatggttggcgacataggaaaaaaactcgggcagaacggtctggataatggtttcgccatgttccacaaggtcagagttcctcgccagagccttctgaaccggatgggagacgtcacccccgagggcacctatgtcagcccctttaaggacgtcaggcagcgctttggagcgtccctggggagcctgtcctcgggccgggtctccatcgtgagcctggccatccttaacctaaagctggccgtggccatcgctcttcgcttctcagccactcggcgtcagtttggacccacagaggaggaggaaataccagtgcttgagtatccaatgcagcaatggcgcttgcttccatatctggcagctgtctacgccttagaccatttctccaagtcgctcttcctggacctggtggagctccagcgaggacttgcatcgggagaccgcagcgccagacaggcagagcttggacgtgagatccacgccctggcatcggccagcaagcccctggcctcgtggaccacccagcaaggaattcaggaatgccgggaggcgtgtggaggacacggctatctggccatgaaccggttgggtgtccttagagatgacaacgatcccaactgcacatacgaaggtgacaacaacatcctgctgcagcagacaagcaactatttgctgggtctcctggcacaccaggtccacgatggagcttgcttccgcagtccgctgaagtcagtggactttctggacgcctatcccggcatccttgaccagaagtttgaggtctccagtgttgccgactgcttggactctgcagtcgccctggcagcatacaagtggctggtttgctacctgctccgagagacttatcaaaaattaaaccaagagaaaagatcaggaagcagtgactttgaagcaaggaacaaatgccaggtgtcccacggccgtccgttggcgctggccttcgtggagctcacggtggtccagaggttccacgagcacgtgcaccagccttccgtgccgccctcgctgcgggccgtgctggggcggctcagtgctctgtacgccctgtggtccctgagccgccacgcggccctgctctaccgaggaggatacttctccggtgagcaggcgggagaagtgttggagagcgccgtcctggctttgtgttcccagctgaaagacgatgcagttgccctggtagacgtgatcgctcctcctgactttgttctggactcaccgattggcagagccgacggcgagctctacaaaaacctctggggcgctgtcctgcaggaaagcaaggtgttggagcgggcatcctggtggccagagttttctgtgaacaaacctgtcataggaagtctgaaatcgaagctctagtgggactggcacacattcagccaagtctaatgaaacgaagggaactaatcagacgtggacctcaacttctgattccagaacacgccggagattgctgctgctttctgagcccgcacctgtgcgcctaaactgctgattggcctcaactgcccaggcggacgggagggaggcacccggccggctggactaatctgggatcgcggtgatttgcagcgtggaaaagaaatgcagatgatcatgtctacctgatgcgccgtgggttttttgataattagaatttcgcacattcagttttcagggttcagctcctttctctaaagtaaacagcccattgtcagggatcttctggtcagacaacctgtgattcatctagattttttaccgagctccacttcattgagaagtcaatgatgccagtctggttctttgtcaactctccctcggctttgtcacataattgaattatgtcataaccttattaatttgcacatagatcatctgaatgtcgtggtttaagacttaaggaggaacatctgtttgattactttcttttgtggaactggaaatttccatcgaggaaatgtttttttaaaaagtctaatgatttgaatgggcaattcagtctccaaccgcccccctccccctgccgccagttatatacaaatcactttattggtaatagttttcaaatatgttacacagcacctgttcaagagtcgg

SEQ ID NO: 379672 - DNA, 2973 bp, Homo sapiens
atgggacggacggaggccgagaggcgtggcgggggagcagtggggccaggccagagacagctgcgctgtgcgggcagctagtcccagtactccgagtcggtcgcgggccgacaggcatcccctgagcgcctgctgggctcttatcacgcgatggcatccactgtggaaggaggcgacacagctctgctcccagaattccccagggggcccctcgatgcctaccgagcaagagcgtccttcagctggaaggagctggcgctgttcacggaaggggagggcatgctccgctttaagaaaaccatcttctcagctcttgagaatgaccctcttttcgctcgttcccctggagccgatctgtccttggagaagtatcgcgagctgaacttccttcgatgcaagcggatcttcgagtatgacttcctcagtgtcgaagacatgttcaagagccctctgaaggtccccgccttgattcagtgcctgggcatgtatgactcttctctggctgccaagtacctcctccatagcttggtttttggatcagcagtttacagttctggttctgaaagacatctcacatatattcaaaagatcttcaggatggagatttttggatgttttgctctgaccgaattaagccacggcagtaataccaaggccattcgcacaactgcccactacgatcctgccactgaggaattcatcatacattcccctgatttcgaagctgccaagttttgggttggcaacatgggcaagacagccactcacgcggtggtgtttgctaagctgtgtgtgccaggggaccagtgccatgggctgcatccctttatcgtgcagatccgggacccgaagacccttcttcccatgcctggagtgatggttggcgacataggaaaaaaactcgggcagaacggtctggataatggtttcgccatgttccacaaggtcagagttcctcgccagagccttctgaaccggatgggagacgtcacccccgagggcacctatgtcagcccctttaaggacgtcaggcagcgctttggagcgtccctggggagcctgtcctcgggccgggtctccatcgtgagcctggccatccttaacctaaagctggccgtggccatcgctcttcgcttctcagccactcggcgtcagtttggacccacagaggaggaggaaataccagtgcttgagtatccaatgcagcaatggcgcttgcttccatatctggcagctgtctacgccttagaccatttctccaagtcgctcttcctggacctggtggagctccagcgaggacttgcatcgggagaccgcagcgccagacaggcagagcttggacgtgagatccacgccctggcatcggccagcaagcccctggcctcgtggaccacccagcaaggaattcaggaatgccgggaggcgtgtggaggacacggctatctggccatgaaccggttgggtgtccttagagatgacaacgatcccaactgcacatacgaaggtgacaacaacatcctgctgcagcagacaagcaactatttgctgggtctcctggcacaccaggtccacgatggagcttgcttccgcagtccgctgaagtcagtggactttctggacgcctatcccggcatccttgaccagaagtttgaggtctccagtgttgccgactgcttggactctgcagtcgccctggcagcatacaagtggctggtttgctacctgctccgagagacttatcaaaaattaaaccaagagaaaagatcaggaagcagtgactttgaagcaaggaacaaatgccaggtgtcccacggccgtccgttggcgctggccttcgtggagctcacggtggtccagaggttccacgagcacgtgcaccagccttccgtgccgccctcgctgcgggccgtgctggggcggctcagtgctctgtacgccctgtggtccctgagccgccacgcggccctgctctaccgaggaggatacttctccggtgagcaggcgggagaagtgttggagagcgccgtcctggctttgtgttcccagctgaaagacgatgcagttgccctggtagacgtgatcgctcctcctgactttgttctggactcaccgattggcagagccgacggcgagctctacaaaaacctctggggcgctgtcctgcaggaaagcaaggtgttggagcgggcatcctggtggccagagttttctgtgaacaaacctgtcataggaagtctgaaatcgaagctctagtgggactggcacacattcagccaagtctaatgaaacgaagggaactaatcagacgtggacctcaacttctgattccagaacacgccggagattgctgctgctttctgagcccgcacctgtgcgcctaaactgctgattggcctcaactgcccaggcggacgggagggaggcacccggccggctggactaatctgggatcgcggtgatttgcagcgtggaaaagaaatgcagatgatcatgtctacctgatgcgccgtgggttttttgataattagaatttcgcacattcagttttcagggttcagctcctttctctaaagtaaacagcccattgtcagggatcttctggtcagacaacctgtgattcatctagattttttaccgagctccacttcattgagaagtcaatgatgccagtctggttctttgtcaactctccctcggctttgtcacataattgaattatgtcataaccttattaatttgcacatagatcatctgaatgtcgtggtttaagacttaaggaggaacatctgtttgattactttcttttgtggaactggaaatttccatcgaggaaatgtttttttaaaaagtctaatgatttgaatgggcaattcagtctccaaccgcccccctccccctgccgccagttatatacaaatcactttattggtaatagttttcaaatatgttacacagcacctgttcaagagtcgg

SEQ ID NO: 379673 - DNA, 2968 bp, Homo sapiens
  misc_feature (15)..(15): n is a, c, g, or t
tctggaaaacaaatnaaaaaaaaaaaaccaaaaagtggggccaggccagagacagctgcgctgtgcgggcagctagtcccagtactccgagtcggtcgcgggccgacaggcatcccctgagcgcctgctgggctcttatcacgcgatggcatccactgtggaaggaggcgacacagctctgctcccagaattccccagggggcccctcgatgcctaccgagcaagagcgtccttcagctggaaggagctggcgctgttcacggaaggggagggcatgctccgctttaagaaaaccatcttctcagctcttgagaatgaccctcttttcgctcgttcccctggagccgatctgtccttggagaagtatcgcgagctgaacttccttcgatgcaagcggatcttcgagtatgacttcctcagtgtcgaagacatgttcaagagccctctgaaggtccccgccttgattcagtgcctgggcatgtatgactcttctctggctgccaagtacctcctccatagcttggtttttggatcagcagtttacagttctggttctgaaagacatctcacatatattcaaaagatcttcaggatggagatttttggatgttttgctctgaccgaattaagccacggcagtaataccaaggccattcgcacaactgcccactacgatcctgccactgaggaattcatcatacattcccctgatttcgaagctgccaagttttgggttggcaacatgggcaagacagccactcacgcggtggtgtttgctaagctgtgtgtgccaggggaccagtgccatgggctgcatccctttatcgtgcagatccgggacccgaagacccttcttcccatgcctggagtgatggttggcgacataggaaaaaaactcgggcagaacggtctggataatggtttcgccatgttccacaaggtcagagttcctcgccagagccttctgaaccggatgggagacgtcacccccgagggcacctatgtcagcccctttaaggacgtcaggcagcgctttggagcgtccctggggagcctgtcctcgggccgggtctccatcgtgagcctggccatccttaacctaaagctggccgtggccatcgctcttcgcttctcagccactcggcgtcagtttggacccacagaggaggaggaaataccagtgcttgagtatccaatgcagcaatggcgcttgcttccatatctggcagctgtctacgccttagaccatttctccaagtcgctcttcctggacctggtggagctccagcgaggacttgcatcgggagaccgcagcgccagacaggcagagcttggacgtgagatccacgccctggcatcggccagcaagcccctggcctcgtggaccacccagcaaggaattcaggaatgccgggaggcgtgtggaggacacggctatctggccatgaaccggttgggtgtccttagagatgacaacgatcccaactgcacatacgaaggtgacaacaacatcctgctgcagcagacaagcaactatttgctgggtctcctggcacaccaggtccacgatggagcttgcttccgcagtccgctgaagtcagtggactttctggacgcctatcccggcatccttgaccagaagtttgaggtctccagtgttgccgactgcttggactctgcagtcgccctggcagcatacaagtggctggtttgctacctgctccgagagacttatcaaaaattaaaccaagagaaaagatcaggaagcagtgactttgaagcaaggaacaaatgccaggtgtcccacggccgtccgttggcgctggccttcgtggagctcacggtggtccagaggttccacgagcacgtgcaccagccttccgtgccgccctcgctgcgggccgtgctggggcggctcagtgctctgtacgccctgtggtccctgagccgccacgcggccctgctctaccgaggaggatacttctccggtgagcaggcgggagaagtgttggagagcgccgtcctggctttgtgttcccagctgaaagacgatgcagttgccctggtagacgtgatcgctcctcctgactttgttctggactcaccgattggcagagccgacggcgagctctacaaaaacctctggggcgctgtcctgcaggaaagcaaggtgttggagcgggcatcctggtggccagagttttctgtgaacaaacctgtcataggaagtctgaaatcgaagctctagtgggactggcacacattcagccaagtctaatgaaacgaagggaactaatcagacgtggacctcaacttctgattccagaacacgccggagattgctgctgctttctgagcccgcacctgtgcgcctaaactgctgattggcctcaactgcccaggcggacgggagggaggcacccggccggctggactaatctgggatcgcggtgatttgcagcgtggaaaagaaatgcagatgatcatgtctacctgatgcgccgtgggttttttgataattagaatttcgcacattcagttttcagggttcagctcctttctctaaagtaaacagcccattgtcagggatcttctggtcagacaacctgtgattcatctagattttttaccgagctccacttcattgagaagtcaatgatgccagtctggttctttgtcaactctccctcggctttgtcacataattgaattatgtcataaccttattaatttgcacatagatcatctgaatgtcgtggtttaagacttaaggaggaacatctgtttgattactttcttttgtggaactggaaatttccatcgaggaaatgtttttttaaaaagtctaatgatttgaatgggcaattcagtctccaaccgcccccctccccctgccgccagttatatacaaatcactttattggtaatagttttcaaatatgttacacagcacctgttcaagagtcgg

SEQ ID NO: 379674 - DNA, 2283 bp, Homo sapiens
  misc_feature (82)..(82): n is a, c, g, or t
cagcgctgtgtggccttgggcaagtcacttctctgagtctgtttcctcatctttaaaatggggatgataccacccatgttgngggtgttatgagaactgtgtgtgccaggggaccagtgccatgggctgcatccctttatcgtgcagatccgggacccgaagacccttcttcccatgcctggagtgatggttggcgacataggaaaaaaactcgggcagaacggtctggataatggtttcgccatgttccacaaggtcagagttcctcgccagagccttctgaaccggatgggagacgtcacccccgagggcacctatgtcagcccctttaaggacgtcaggcagcgctttggagcgtccctggggagcctgtcctcgggccgggtctccatcgtgagcctggccatccttaacctaaagctggccgtggccatcgctcttcgcttctcagccactcggcgtcagtttggacccacagaggaggaggaaataccagtgcttgagtatccaatgcagcaatggcgcttgcttccatatctggcagctgtctacgccttagaccatttctccaagtcgctcttcctggacctggtggagctccagcgaggacttgcatcgggagaccgcagcgccagacaggcagagcttggacgtgagatccacgccctggcatcggccagcaagcccctggcctcgtggaccacccagcaaggaattcaggaatgccgggaggcgtgtggaggacacggctatctggccatgaaccggttgggtgtccttagagatgacaacgatcccaactgcacatacgaaggtgacaacaacatcctgctgcagcagacaagcaactatttgctgggtctcctggcacaccaggtccacgatggagcttgcttccgcagtccgctgaagtcagtggactttctggacgcctatcccggcatccttgaccagaagtttgaggtctccagtgttgccgactgcttggactctgcagtcgccctggcagcatacaagtggctggtttgctacctgctccgagagacttatcaaaaattaaaccaagagaaaagatcaggaagcagtgactttgaagcaaggaacaaatgccaggtgtcccacggccgtccgttggcgctggccttcgtggagctcacggtggtccagaggttccacgagcacgtgcaccagccttccgtgccgccctcgctgcgggccgtgctggggcggctcagtgctctgtacgccctgtggtccctgagccgccacgcggccctgctctaccgaggaggatacttctccggtgagcaggcgggagaagtgttggagagcgccgtcctggctttgtgttcccagctgaaagacgatgcagttgccctggtagacgtgatcgctcctcctgactttgttctggactcaccgattggcagagccgacggcgagctctacaaaaacctctggggcgctgtcctgcaggaaagcaaggtgttggagcgggcatcctggtggccagagttttctgtgaacaaacctgtcataggaagtctgaaatcgaagctctagtgggactggcacacattcagccaagtctaatgaaacgaagggaactaatcagacgtggacctcaacttctgattccagaacacgccggagattgctgctgctttctgagcccgcacctgtgcgcctaaactgctgattggcctcaactgcccaggcggacgggagggaggcacccggccggctggactaatctgggatcgcggtgatttgcagcgtggaaaagaaatgcagatgatcatgtctacctgatgcgccgtgggttttttgataattagaatttcgcacattcagttttcagggttcagctcctttctctaaagtaaacagcccattgtcagggatcttctggtcagacaacctgtgattcatctagattttttaccgagctccacttcattgagaagtcaatgatgccagtctggttctttgtcaactctccctcggctttgtcacataattgaattatgtcataaccttattaatttgcacatagatcatctgaatgtcgtggtttaagacttaaggaggaacatctgtttgattactttcttttgtggaactggaaatttccatcgaggaaatgtttttttaaaaagtctaatgatttgaatgggcaattcagtctccaaccgcccccctccccctgccgccagttatatacaaatcactttattggtaatagttttcaaatatgttacacagcacctgttcaagagtcgg

SEQ ID NO: 379675 - DNA, 1651 bp, Homo sapiens
cagcaccacgcttcacacagaccgagcctggtgcgtgcgagaacgtgcagccgtcccactcgggggcccactctagcggcggcaccgtgttcctgtggcctccaggctgctggaacagtgtagaactcaggacagccctgggctgagccaggaagtgcctccagccaggggggccctgggcaggtgccctccctgtgcttcagtttccctacctataaaatcagacccaccccatacacttggttgtcaatgaagacaacctggtacctgcaggatgctggcagtgccttgtccctgggggtgagttgtgacaaatgctgtgttctctattgttactttttctccttctgtttgtcattccgaagtcgccctggcagcatacaagtggctggtttgctacctgctccgagagacttatcaaaaattaaaccaagagaaaagatcaggaagcagtgactttgaagcaaggaacaaatgccaggtgtcccacggccgtccgttggcgctggccttcgtggagctcacggtggtccagaggttccacgagcacgtgcaccagccttccgtgccgccctcgctgcgggccgtgctggggcggctcagtgctctgtacgccctgtggtccctgagccgccacgcggccctgctctaccgaggaggatacttctccggtgagcaggcgggagaagtgttggagagcgccgtcctggctttgtgttcccagctgaaagacgatgcagttgccctggtagacgtgatcgctcctcctgactttgttctggactcaccgattggcagagccgacggcgagctctacaaaaacctctggggcgctgtcctgcaggaaagcaaggtgttggagcgggcatcctggtggccagagttttctgtgaacaaacctgtcataggaagtctgaaatcgaagctctagtgggactggcacacattcagccaagtctaatgaaacgaagggaactaatcagacgtggacctcaacttctgattccagaacacgccggagattgctgctgctttctgagcccgcacctgtgcgcctaaactgctgattggcctcaactgcccaggcggacgggagggaggcacccggccggctggactaatctgggatcgcggtgatttgcagcgtggaaaagaaatgcagatgatcatgtctacctgatgcgccgtgggttttttgataattagaatttcgcacattcagttttcagggttcagctcctttctctaaagtaaacagcccattgtcagggatcttctggtcagacaacctgtgattcatctagattttttaccgagctccacttcattgagaagtcaatgatgccagtctggttctttgtcaactctccctcggctttgtcacataattgaattatgtcataaccttattaatttgcacatagatcatctgaatgtcgtggtttaagacttaaggaggaacatctgtttgattactttcttttgtggaactggaaatttccatcgaggaaatgtttttttaaaaagtctaatgatttgaatgggcaattcagtctccaaccgcccccctccccctgccgccagttatatacaaatcactttattggtaatagttttcaaatatgttacacagcacctgttcaagagtcgg

SEQ ID NO: 379676 - DNA, 1483 bp, Homo sapiens
atgggacggacggaggccgagaggcgtggcgggggagcagtggggccaggccagagacagctgcgctgtgcgggcagctagtcccagtactccgagtcggtcgcgggccgacaggcatcccctgagcgcctgctgggctcttatcacgcgatggcatccactgtggaaggaggcgacacagctctgctcccagaattccccagggggcccctcgatgcctaccgagcaagagcgtccttcagctggaaggagctggcgctgttcacggaaggggagggcatgctccgctttaagaaaaccatcttctcagctcttgagaatgaccctcttttcgctcgttcccctggagccgatctgtccttggagaagtatcgcgagctgaacttccttcgatgcaagcggatcttcgagtatgacttcctcagtgtcgaagacatgttcaagagccctctgaaggtccccgccttgattcagtgcctgggcatgtatgactcttctctggctgccaagtacctcctccatagcttggtttttggatcagcagtttacagttctggttctgaaagacatctcacatatattcaaaagatcttcaggatggagatttttggatgttttgctctgaccgaattaagccacggcactctacaaaaacctctggggcgctgtcctgcaggaaagcaaggtgttggagcgggcatcctggtggccagagttttctgtgaacaaacctgtcataggaagtctgaaatcgaagctctagtgggactggcacacattcagccaagtctaatgaaacgaagggaactaatcagacgtggacctcaacttctgattccagaacacgccggagattgctgctgctttctgagcccgcacctgtgcgcctaaactgctgattggcctcaactgcccaggcggacgggagggaggcacccggccggctggactaatctgggatcgcggtgatttgcagcgtggaaaagaaatgcagatgatcatgtctacctgatgcgccgtgggttttttgataattagaatttcgcacattcagttttcagggttcagctcctttctctaaagtaaacagcccattgtcagggatcttctggtcagacaacctgtgattcatctagattttttaccgagctccacttcattgagaagtcaatgatgccagtctggttctttgtcaactctccctcggctttgtcacataattgaattatgtcataaccttattaatttgcacatagatcatctgaatgtcgtggtttaagacttaaggaggaacatctgtttgattactttcttttgtggaactggaaatttccatcgaggaaatgtttttttaaaaagtctaatgatttgaatgggcaattcagtctccaaccgcccccctccccctgccgccagttatatacaaatcactttattggtaatagttttcaaatatgttacacagcacctgttcaagagtcgg

SEQ ID NO: 379677 - DNA, 2666 bp, Homo sapiens
gggaccggaaatgagaatggcgccgctggagatcctttcctgcttttggtttccctggcaggggttgaactgtggagtgtgtgggctcttatcacgcgatggcatccactgtggaaggaggcgacacagctctgctcccagaattccccagggggcccctcgatgcctaccgagcaagagcgtccttcagctggaaggagctggcgctgttcacggaaggggagggcatgctccgctttaagaaaaccatcttctcagctcttgagaatgaccctcttttcgctcgttcccctggagccgatctgtccttggagaagtatcgcgagctgaacttccttcgatgcaagcggatcttcgagtatgacttcctcagtgtcgaagacatgttcaagagccctctgaaggtccccgccttgattcagtgcctgggcatgtatgactcttctctggctgccaagtacctcctccatagcttggtttttggatcagcagtttacagttctggttctgaaagacatctcacatatattcaaaagatcttcaggatggagatttttggatgttttgctctgaccgaattaagccacggcagtaataccaaggccattcgcacaactgcccactacgatcctgccactgaggaattcatcatacattcccctgatttcgaagctgccaagttttgggttggcaacatgggcaagacagccactcacgcggtggtgtttgctaagctgtgtgtgccaggggaccagtgccatgggctgcatccctttatcgtgcagatccgggacccgaagacccttcttcccatgcctggagtgatggttggcgacataggaaaaaaactcgggcagaacggtctggataatggtttcgccatgttccacaaggtcagagttcctcgccagagccttctgaaccggatgggagacgtcacccccgagggcacctatgtcagcccctttaaggacgtcaggcagcgctttggagcgtccctggggagcctgtcctcgggccgggtctccatcgtgagcctggccatccttaacctaaagctggccgtggccatcgctcttcgcttctcagccactcggcgtcagtttggacccacagaggaggaggaaataccagtgcttgagtatccaatgcagcaatggcgcttgcttccatatctggcagctgtctacgccttagaccatttctccaagtcgctcttcctggacctggtggagctccagcgaggacttgcatcgggagaccgcagcgccagacaggcagagcttggacgtgagatccacgccctggcatcggccagcaagcccctggcctcgtggaccacccagcaaggaattcaggaatgccgggaggcgtgtggaggacacggctatctggccatgaaccggttgggtgtccttagagatgacaacgatcccaactgcacatacgaaggtgacaacaacatcctgctgcagcagacaagcaactatttgctgggtctcctggcacaccaggtccacgatggagcttgcttccgcagtccgctgaagtcagtggactttctggacgcctatcccggcatccttgaccagaagtttgaggtctccagtgttgccgactgcttggactctgcagtcgccctggcagcatacaagtggctggtttgctacctgctccgagagacttatcaaaaattaaaccaagagaaaagatcaggaagcagtgactttgaagcaaggaacaaatgccaggtgtcccacggccgtccgttggcgctggccttcgtggagctcacggtggtccagaggttccacgagcacgtgcaccagccttccgtgccgccctcgctgcgggccgtgctggggcggctcagtgctctgtacgccctgtggtccctgagccgccacgcggccctgctctaccgaggaagctttttaggtggtttttcccaatggctggcacccatgcatctttggtactaggatacactgcatatccattcatgtcctgtgtctctgggcttgtgaagaataagatcctccccaccccaagagccagcgtttaccccctggagggtggtgctgaccccgtggaggccttgacagtgctcaggtgcaccaaggaagggacacaagtgtctgccagagagggcgggcacagggcaggagccccactgctgcctgagaaaaaccctaagtgatgagacacagttctctccagcggaaatcacagcaaacgcagatcccaccacagatgtgctcccgaacgcacaaggccacagccttggacctcttagggccctgccagaaaccacagcggctggaggtgacaccaaggaccaagtccccctgcggcctctgagtccctgcaggaggatacttctccggtgagcaggcgggagaagtgttggagagcgccgtcctggctttgtgttcccagaggtgagccgtgggtgctgtcgcgttctctacatccatgttacacaaccgcccagagcgacacgcatccccttagcatcacccagaccgacacgcaccgccttagtatcacccagactgacacgcacccccttagcgtcacccagagcctacacgcacccccttacccagaccgacacgcacccccttagcatcacccagagctgacacacaccgccttagcgtcac

SEQ ID NO: 379678 - DNA, 381 bp, Homo sapiens
tcacgcggtggtgtttgctaagctgtgtgtgccaggggaccagtgccatgggctgcatccctttatcgtgcaggtaggacgctggggtggccctcagtgggggcagtgtttacccccaggaagcactggtaatgtctggagtcatttttgtcataacaagggtggggcatgcttctggcatctggtgagtggaccagggacactgcccaggaccccagtgcatcccatagccccgcccacagtgcaaacagccccgcccacagtgcattccacagccctgcccacaatgcagatagccccgtccacagtgcatcccacaaccctgcccacagtgcacagacagccgcgcccacagtgcacagacagctccgcccacagtgt

SEQ ID NO: 379679 - DNA, 359 bp, Homo sapiens
caggcctcagggaattgatgaggagtctggaaatgaacacggattgttgatgtttcttaagcctccagtcctctagtccattgggaatgatagtcatatctctgtctgggtgtctccgggtcagactgtgtcccatgaagcctgtggcctggaggtcaactatataagggcacatggagagtccatcttttactccaaataagccttacccatctcctgcatttccagaaaaccatcttctcagctcttgagaatgaccctcttttcgctcgttcccctggagccgatctgtccttggagaagtatcgcgagctgaacttccttcgatgcaagcggatcttcgagtatgacttcctcag

SEQ ID NO: 379680 - DNA, 2853 bp, Homo sapiens
gggaccggaaatgagaatggcgccgctggagatcctttcctgcttttggtttccctggcaggggttgaactgtggagtgtgtgggctcttatcacgcgatggcatccactgtggaaggaggcgacacagctctgctcccagaattccccagggggcccctcgatgcctaccgagcaagagcgtccttcagctggaaggagctggcgctgttcacggaaggggagggcatgctccgctttaagaaaaccatcttctcagctcttgagaatgaccctcttttcgctcgttcccctggagccgatctgtccttggagaagtatcgcgagctgaacttccttcgatgcaagcggatcttcgagtatgacttcctcagtgtcgaagacatgttcaagagccctctgaaggtccccgccttgattcagtgcctgggcatgtatgactcttctctggctgccaagtacctcctccatagcttggtttttggatcagcagtttacagttctggttctgaaagacatctcacatatattcaaaagatcttcaggatggagatttttggatgttttgctctgaccgaattaagccacggcagtaataccaaggccattcgcacaactgcccactacgatcctgccactgaggaattcatcatacattcccctgatttcgaagctgccaagttttgggttggcaacatgggcaagacagccactcacgcggtggtgtttgctaagctgtgtgtgccaggggaccagtgccatgggctgcatccctttatcgtgcagatccgggacccgaagacccttcttcccatgcctggagtgatggttggcgacataggaaaaaaactcgggcagaacggtctggataatggtttcgccatgttccacaaggtcagagttcctcgccagagccttctgaaccggatgggagacgtcacccccgagggcacctatgtcagcccctttaaggacgtcaggcagcgctttggagcgtccctggggagcctgtcctcgggccgggtctccatcgtgagcctggccatccttaacctaaagctggccgtggccatcgctcttcgcttctcagccactcggcgtcagtttggacccacagaggaggaggaaataccagtgcttgagtatccaatgcagcaatggcgcttgcttccatatctggcagctgtctacgccttagaccatttctccaagtcgctcttcctggacctggtggagctccagcgaggacttgcatcgggagaccgcagcgccagacaggcagagcttggacgtgagatccacgccctggcatcggccagcaagcccctggcctcgtggaccacccagcaaggaattcaggaatgccgggaggcgtgtggaggacacggctatctggccatgaaccggttgggtgtccttagagatgacaacgatcccaactgcacatacgaaggtgacaacaacatcctgctgcagcagacaagcaactatttgctgggtctcctggcacaccaggtccacgatggagcttgcttccgcagtccgctgaagtcagtggactttctggacgcctatcccggcatccttgaccagaagtttgaggtctccagtgttgccgactgcttggactctgcagtcgccctggcagcatacaagtggctggtttgctacctgctccgagagacttatcaaaaattaaaccaagagaaaagatcaggaagcagtgactttgaagcaaggaacaaatgccaggtgtcccacggccgtccgttggcgctggccttcgtggagctcacggtggtccagaggttccacgagcacgtgcaccagccttccgtgccgccctcgctgcgggccgtgctggggcggctcagtgctctgtacgccctgtggtccctgagccgccacgcggccctgctctaccgagctgaaagacgatgcagttgccctggtagacgtgatcgctcctcctgactttgttctggactcaccgattggcagagccgacggcgagctctacaaaaacctctggggcgctgtcctgcaggaaagcaaggtgttggagcgggcatcctggtggccagagttttctgtgaacaaacctgtcataggaagtctgaaatcgaagctctagtgggactggcacacattcagccaagtctaatgaaacgaagggaactaatcagacgtggacctcaacttctgattccagaacacgccggagattgctgctgctttctgagcccgcacctgtgcgcctaaactgctgattggcctcaactgcccaggcggacgggagggaggcacccggccggctggactaatctgggatcgcggtgatttgcagcgtggaaaagaaatgcagatgatcatgtctacctgatgcgccgtgggttttttgataattagaatttcgcacattcagttttcagggttcagctcctttctctaaagtaaacagcccattgtcagggatcttctggtcagacaacctgtgattcatctagattttttaccgagctccacttcattgagaagtcaatgatgccagtctggttctttgtcaactctccctcggctttgtcacataattgaattatgtcataaccttattaatttgcacatagatcatctgaatgtcgtggtttaagacttaaggaggaacatctgtttgattactttcttttgtggaactggaaatttccatcgaggaaatgtttttttaaaaagtctaatgatttgaatgggcaattcagtctccaaccgcccccctccccctgccgccagttatatacaaatcactttattggtaatagttttcaaatatgttacacagcacctgttcaagagtcgg

SEQ ID NO: 379681 - DNA, 2871 bp, Homo sapiens
gggaccggaaatgagaatggcgccgctggagatcctttcctgcttttggtttccctggcaggggttgaactgtggagtgtgtgggctcttatcacgcgatggcatccactgtggaaggaggcgacacagctctgctcccagaattccccagggggcccctcgatgcctaccgagcaagagcgtccttcagctggaaggagctggcgctgttcacggaaggggagggcatgctccgctttaagaaaaccatcttctcagctcttgagaatgaccctcttttcgctcgttcccctggagccgatctgtccttggagaagtatcgcgagctgaacttccttcgatgcaagcggatcttcgagtatgacttcctcagtgtcgaagacatgttcaagagccctctgaaggtccccgccttgattcagtgcctgggcatgtatgactcttctctggctgccaagtacctcctccatagcttggtttttggatcagcagtttacagttctggttctgaaagacatctcacatatattcaaaagatcttcaggatggagatttttggatgttttgctctgaccgaattaagccacggcagtaataccaaggccattcgcacaactgcccactacgatcctgccactgaggaattcatcatacattcccctgatttcgaagctgccaagttttgggttggcaacatgggcaagacagccactcacgcggtggtgtttgctaagctgtgtgtgccaggggaccagtgccatgggctgcatccctttatcgtgcagatccgggacccgaagacccttcttcccatgcctggagtgatggttggcgacataggaaaaaaactcgggcagaacggtctggataatggtttcgccatgttccacaaggtcagagttcctcgccagagccttctgaaccggatgggagacgtcacccccgagggcacctatgtcagcccctttaaggacgtcaggcagcgctttggagcgtccctggggagcctgtcctcgggccgggtctccatcgtgagcctggccatccttaacctaaagctggccgtggccatcgctcttcgcttctcagccactcggcgtcagtttggacccacagaggaggaggaaataccagtgcttgagtatccaatgcagcaatggcgcttgcttccatatctggcagctgtctacgccttagaccatttctccaagtcgctcttcctggacctggtggagctccagcgaggacttgcatcgggagaccgcagcgccagacaggcagagcttggacgtgagatccacgccctggcatcggccagcaagcccctggcctcgtggaccacccagcaaggaattcaggaatgccgggaggcgtgtggaggacacggctatctggccatgaaccggttgggtgtccttagagatgacaacgatcccaactgcacatacgaaggtgacaacaacatcctgctgcagcagacaagcaactatttgctgggtctcctggcacaccaggtccacggtgaggctctgctgcacacagaagtttgaggtctccagtgttgccgactgcttggactctgcagtcgccctggcagcatacaagtggctggtttgctacctgctccgagagacttatcaaaaattaaaccaagagaaaagatcaggaagcagtgactttgaagcaaggaacaaatgccaggtgtcccacggccgtccgttggcgctggccttcgtggagctcacggtggtccagaggttccacgagcacgtgcaccagccttccgtgccgccctcgctgcgggccgtgctggggcggctcagtgctctgtacgccctgtggtccctgagccgccacgcggccctgctctaccgaggaggatacttctccggtgagcaggcgggagaagtgttggagagcgccgtcctggctttgtgttcccagctgaaagacgatgcagttgccctggtagacgtgatcgctcctcctgactttgttctggactcaccgattggcagagccgacggcgagctctacaaaaacctctggggcgctgtcctgcaggaaagcaaggtgttggagcgggcatcctggtggccagagttttctgtgaacaaacctgtcataggaagtctgaaatcgaagctctagtgggactggcacacattcagccaagtctaatgaaacgaagggaactaatcagacgtggacctcaacttctgattccagaacacgccggagattgctgctgctttctgagcccgcacctgtgcgcctaaactgctgattggcctcaactgcccaggcggacgggagggaggcacccggccggctggactaatctgggatcgcggtgatttgcagcgtggaaaagaaatgcagatgatcatgtctacctgatgcgccgtgggttttttgataattagaatttcgcacattcagttttcagggttcagctcctttctctaaagtaaacagcccattgtcagggatcttctggtcagacaacctgtgattcatctagattttttaccgagctccacttcattgagaagtcaatgatgccagtctggttctttgtcaactctccctcggctttgtcacataattgaattatgtcataaccttattaatttgcacatagatcatctgaatgtcgtggtttaagacttaaggaggaacatctgtttgattactttcttttgtggaactggaaatttccatcgaggaaatgtttttttaaaaagtctaatgatttgaatgggcaattcagtctccaaccgcccccctccccctgccgccagttatatacaaatcactttattggtaatagttttcaaatatgttacacagcacctgttcaagagtcgg

SEQ ID NO: 379682 - DNA, 2865 bp, Homo sapiens
gggaccggaaatgagaatggcgccgctggagatcctttcctgcttttggtttccctggcaggggttgaactgtggagtgtgtgggctcttatcacgcgatggcatccactgtggaaggaggcgacacagctctgctcccagaattccccagggggcccctcgatgcctaccgagcaagagcgtccttcagctggaaggagctggcgctgttcacggaaggggagggcatgctccgctttaagaaaaccatcttctcagctcttgagaatgaccctcttttcgctcgttcccctggagccgatctgtccttggagaagtatcgcgagctgaacttccttcgatgcaagcggatcttcgagtatgacttcctcagtgtcgaagacatgttcaagagccctctgaaggtccccgccttgattcagtgcctgggcatgtatgactcttctctggctgccaagtacctcctccatagcttggtttttggatcagcagtttacagttctggttctgaaagacatctcacatatattcaaaagatcttcaggatggagatttttggatgttttgctctgaccgaattaagccacggcagtaataccaaggccattcgcacaactgcccactacgatcctgccactgaggaattcatcatacattcccctgatttcgaagctgccaagttttgggttggcaacatgggcaagacagccactcacgcggtggtgtttgctaagctgtgtgtgccaggggaccagtgccatgggctgcatccctttatcgtgcagatccgggacccgaagacccttcttcccatgcctggagtgatggttggcgacataggaaaaaaactcgggcagaacggtctggataatggtttcgccatgttccacaaggtcagagttcctcgccagagccttctgaaccggatgggagacgtcacccccgagggcacctatgtcagcccctttaaggacgtcaggcagcgctttggagcgtccctggggagcctgtcctcgggccgggtctccatcgtgagcctggccatccttaacctaaagctggccgtggccatcgctcttcgcttctcagccactcggcgtcagtttggacccacagaggaggaggaaataccagtgcttgagtatccaatgcagcaatggcgcttgcttccatatctggcagctgtctacgccttagaccatttctccaagtcgctcttcctggacctggtggagctccagcgaggacttgcatcgggagaccgcagcgccagacaggcagagcttggacgtgagatccacgccctggcatcggccagcaagcccctggcctcgtggaccacccagcaaggaattcaggaatgccgggaggcgtgtggaggacacggctatctggccatgaaccggttgggtgtccttagagatgacaacgatcccaactgcacatacgaaggtgacaacaacatcctgctgcagcagacaagcaactatttgctgggtctcctggcacaccaggtccacgatggagcttgcttccgcagtccgctgaagtcagtggactttctggacgcctatcccggcatccttgaccagaagtttgaggtctccagtgttgccgactgcttggactctgcagtcgccctggcagcatacaagtggctggtttgctacctgctccgagagacttatcaaaaattaaaccaagagaaaagatcaggaagcagtgactttgaagcaaggaacaaatgccaggtgtcccacggccgtccgttggcgctggccttcgtggagctcacggtggtccagaggttccacgagcacgtgcaccagccttccgtgccgccctcgctgcgggccgtgctggggcggctcagtgctctgtacgccctgtggtccctgagccgccacgcggccctgctctaccgaggaggatacttctccggtgagcaggcgggagaagtgttggagagcgccgtcctggctttgtgttcccagctgaaagacgatgcagttgccctggtagacgtgatcgctcctcctgactttgttctggactcaccgattggcagagccgacggcgagatcctggtggccagagttttctgtgaacaaacctgtcataggaagtctgaaatcgaagctctagtgggactggcacacattcagccaagtctaatgaaacgaagggaactaatcagacgtggacctcaacttctgattccagaacacgccggagattgctgctgctttctgagcccgcacctgtgcgcctaaactgctgattggcctcaactgcccaggcggacgggagggaggcacccggccggctggactaatctgggatcgcggtgatttgcagcgtggaaaagaaatgcagatgatcatgtctacctgatgcgccgtgggttttttgataattagaatttcgcacattcagttttcagggttcagctcctttctctaaagtaaacagcccattgtcagggatcttctggtcagacaacctgtgattcatctagattttttaccgagctccacttcattgagaagtcaatgatgccagtctggttctttgtcaactctccctcggctttgtcacataattgaattatgtcataaccttattaatttgcacatagatcatctgaatgtcgtggtttaagacttaaggaggaacatctgtttgattactttcttttgtggaactggaaatttccatcgaggaaatgtttttttaaaaagtctaatgatttgaatgggcaattcagtctccaaccgcccccctccccctgccgccagttatatacaaatcactttattggtaatagttttcaaatatgttacacagcacctgttcaagagtcgg

SEQ ID NO: 379683 - DNA, 2573 bp, Homo sapiens
gggaccggaaatgagaatggcgccgctggagatcctttcctgcttttggtttccctggcaggggttgaactgtggagtgtgtgggctcttatcacgcgatggcatccactgtggaaggaggcgacacagctctgctcccagaattccccagggggcccctcgatgcctaccgagcaagagcgtccttcagctggaaggagctggcgctgttcacggaaggggagggcatgctccgctttaagaaaaccatcttctcagctcttgagaatgaccctcttttcgctcgttcccctggagccgatctgtccttggagaagtatcgcgagctgaacttccttcgatgcaagcggatcttcgagtatgacttcctcagtgtcgaagacatgttcaagagccctctgaaggtccccgccttgattcagtgcctgggcatgtatgactcttctctggctgccaagtacctcctccatagcttggtttttggatcagcagtttacagttctggttctgaaagacatctcacatatattcaaaagatcttcaggatggagatttttggatgttttgctctgaccgaattaagccacggcagtaataccaaggccattcgcacaactgcccactacgatcctgccactgaggaattcatcatacattcccctgatttcgaagctgccaagttttgggttggcaacatgggcaagacagccactcacgcggtggtgtttgctaagctgtgtgtgccaggggaccagtgccatgggctgcatccctttatcgtgcagatccgggacccgaagacccttcttcccatgcctggagtgatggttggcgacataggaaaaaaactcgggcagaacggtctggataatggtttcgccatgttccacaaggtcagagttcctcgccagagccttctgaaccggatgggagacgtcacccccgagggcacctatgtcagcccctttaaggacgtcaggcagcgctttggagcgtccctggggagcctgtcctcgggccgggtctccatcgtgagcctggccatccttaacctaaagctggccgtggccatcgctcttcgcttctcagccactcggcgtcagtttggacccacagaggaggaggaaataccagtgcttgagtatccaatgcagcaatggcgcttgcttccatatctggcagctgtctacgccttagaccatttctccaagtcgctcttcctggacctggtggagctccagcgaggacttgcatcgggagaccgcagcgccagacaggcagagcttggacgtgagatccacgccctggcatcggccagcaagcccctggcctcgtggaccacccagcaaggaattcaggaatgccgggaggcgtgtggaggacacggctatctggccatgaaccggttgggtgtccttagagatgacaacgatcccaactgcacatacgaaggtgacaacaacatcctgctgcagcagacaagcaactatttgctgggtctcctggcacaccaggtccacgatggagcttgcttccgcagtccgctgaagtcagtggactttctggacgcctatcccggcatccttgaccagaagtttgaggtctccagtgttgccgactgcttggactctgcagtcgccctggcagcatacaagtggctggtttgctacctgctccgagagacttatcaaaaattaaaccaagagaaaagatcaggaagcagtgactttgaagcaaggaacaaatgccaggtgtcccacggccgtccgttggcgctggccttcgtggagctcacggtggtccagaggttccacgagcacgtgcaccagccttccgtgccgccctcgctgcgggccgtgctggggcggctcagtgctctgtacgccctgtggtccctgagccgccacgcggccctgctctaccgaggaggatacttctccggtgagcaggcgggagaagtgttggagagcgccgtcctggctttgtgttcccagctcaactgcccaggcggacgggagggaggcacccggccggctggactaatctgggatcgcggtgatttgcagcgtggaaaagaaatgcagatgatcatgtctacctgatgcgccgtgggttttttgataattagaatttcgcacattcagttttcagggttcagctcctttctctaaagtaaacagcccattgtcagggatcttctggtcagacaacctgtgattcatctagattttttaccgagctccacttcattgagaagtcaatgatgccagtctggttctttgtcaactctccctcggctttgtcacataattgaattatgtcataaccttattaatttgcacatagatcatctgaatgtcgtggtttaagacttaaggaggaacatctgtttgattactttcttttgtggaactggaaatttccatcgaggaaatgtttttttaaaaagtctaatgatttgaatgggcaattcagtctccaaccgcccccctccccctgccgccagttatatacaaatcactttattggtaatagttttcaaatatgttacacagcacctgttcaagagtcgg

SEQ ID NO: 379684 - DNA, 1176 bp, Homo sapiens
gggaccggaaatgagaatggcgccgctggagatcctttcctgcttttggtttccctggcaggggttgaactgtggagtgtgtgggctcttatcacgcgatggcatccactgtggaaggaggcgacacagctctgctcccagaattccccagggggcccctcgatgcctaccgagcaagagcgtccttcagctggaaggagctggcgctgttcacggaaggggagggcatgctccgctttaagaaaaccatcttctcagctcttgagaatgaccctcttttcgctcgttcccctggagccgatctgtccttggagaagtatcgcgagctgaacttccttcgatgcaagcggatcttcgagtatgacttcctcagtgtcgaagacatgttcaagagccctctgaaggtccccgccttgattcagtgcctgggcatgtatgactcttctctggctgccaagtacctcctccatagcttggtttttggatcagcagtttacagttctggttctgaaagacatctcacatatattcaaaagatcttcaggatggagatttttggatgttttgctctgaccgaattaagccacggcagtaataccaaggccattcgcacaactgcccactacgatcctgccactgaggaattcatcatacattcccctgatttcgaagctgccaagttttgggttggcaacatgggcaagacagccactcacgcggtggtgtttgctaagctgtgtgtgccaggggaccagtgccatgggctgcatccctttatcgtgcagatccgggacccgaagacccttcttcccatgcctggagtgatggttggcgacataggaaaaaaactcgggcagaacggtctggataatggtttcgccatgttccacaaggtcagagttcctcgccagagccttctgaaccggatgggagacgtcacccccgagggcacctatgtcagcccctttaaggacgtcaggcagcgctttggagcgtccctggggagcctgtcctcgggccgggtctccatcgtgagcctggccatccttaacctaaagctggccgtggccatcgctcttcgcttctcagccactcggcgtcagtttggacccacagaggaggaggaaataccagtgcttgagtatccaatgcaggtatgaggttttcaagcatcct

SEQ ID NO: 379685 - DNA, 2197 bp, Homo sapiens
attgtgaccagaggggtttgtgtggctgaagaggcaggaggaacagtgtatccacagcgtgggaccatgccaggcacaaaacggtttcaacatgtcattgagaccccggagcctggcaagtgggagttgtctgggtacgaggcagctgtgccaatcacggagaagtcaaacccactgacccaggatctagacaaagcagatgctgagaacattgttcgactgctagggcaatgtgatgctgagatcttccaggaggaggggcaagccctgtccacataccagagactctacagcgaatccattctgaccaccatggtacaggtggctgggaaagttcaggaagtgctgaaggagccagatggggggctggttgtgctgagtggagggggcacctctggccggatggcattcctcatgtcggtgtcctttaatcagctgatgaaaggtctgggacagaaacctctttacacctacctcattgcaggtggtgacaggtctgtggtggcctctagggaggggacagaagatagtgccttgcacgggattgaggaactgaagaaggtggctgccgggaagaagagagtgattgtcattggcatttctgtgggactctctgctccctttgtggcaggccagatggactgctgcatgaacaacacagctgtcttcttgccagtcctggttggcttcaatccagtgagcatggccagaaatgaccccattgaagactggagttcaacattccgacaagtagcagagcggatgcagaaaatgcaggagaaacagaaagcttttgtgctcaatcctgccatcgggcccgagggtctcagcggctcctcccggatgaaaggtggaagtgccaccaagattctgctggaaaccctgttattagcagcccataagactgtggaccagggcattgcagcatctcaaagatgcctcctggaaatcttgcggacatttgagcgagctcatcaggtgacctacagccaaagccccaagattgccaccctgatgaagagtgtcagcaccagtctggagaagaaaggccacgtgtacctggttggctggcagaccctgggtatcattgccatcatggatggagtagagtgcatccacacctttggtgctgatttccgagatgtccgtggctttctcattggtgatcacagtgacatgtttaaccagaaggctgagctcaccaaccagggtccccagttcaccttctcccaggaggacttcctgacttccatccttccctctctcacggaaatcgatactgtggtcttcattttcaccctggatgacaacctcacggaggtgcagactatagtggagcaggtgaaagagaagaccaaccacatccaggccctggcacacagcaccgtgggtcagaccttgccgatccctctgaagaagctctttccctccatcatcagcatcacatggccactgcttttctttgaatatgaagggaacttcatccagaagttccagcgtgagctaagcaccaaatgggtgctgaatacagtgagtacaggtgctcatgtgcttcttggtaagatcctacaaaaccacatgttggaccttcggattagcaactccaagctcttctggcgggcgctggccatgctgcagcggttctctggacagtccaaggctcgatgcatcgagagcctcctccgagcgatccactttccccagccactgtcagatgatattcgggctgctcccatctcctgccatgtccaggttgcacatgagaaggaacaggtgatacccatcgccttgctgagcctcctattccggtgctcgatcactgaggctcaggcacacctggctgcagctccttctgtctgtgaggctgtcaggagtgctcttgctgggccaggtcagaagcgcactgcggaccccctcgagatcctagagcctgacgttcagtgaacccatgtttctgggtgggtgaaaggggcccaaccctgcccacttcagcccagcccgcccaaggggacttgtgccagcagaacatgtgggaggaagaagccccgtttccagggcatccgcagcccagggtagggagaaatattctctccactttgggggagagttcttgctctcgacctagtggtttctactctcaccgacttattctgatttcagaaataaaatgaaatgtcttattttggaaaaaaaaaaa

SEQ ID NO: 379686 - DNA, 2149 bp, Homo sapiens
attgtgaccagaggggtttgtgtggctgaagaggcaggaggaacagtgtatccacagcgtgggaccatgccaggcacaaaacggtttcaacatgtcattgagaccccggagcctggcaagtgggagttgtctgggtacgaggcagctgtgccaatcacggagaagtcaaacccactgacccaggatctagacaaagcagatgctgagaacattgttcgactgctagggcaatgtgatgctgagatcttccaggaggaggggcaagccctgtccacataccagagactctacagcgaatccattctgaccaccatggtacaggtggctgggaaagttcaggaagtgctgaaggagccagatggggggctggttgtgctgagtggagggggcacctctggccggatggcattcctcatgtcggtgtcctttaatcagctgatgaaaggtctgggacagaaacctctttacacctacctcattgcaggtggtgacaggtctgtggtggcctctagggaggggacagaagatagtgccttgcacgggattgaggaactgaagaaggtggctgccgggaagaagagagtgattgtcattggcatttctgtgggactctctgctccctttgtggcaggccagatggactgctgcatgaacaacacagctgtcttcttgccagtcctggttggcttcaatccagtgagcatggccagaaatgaccccattgaagactggagttcaacattccgacaagtagcagagcggatgcagcccgagggtctcagcggctcctcccggatgaaaggtggaagtgccaccaagattctgctggaaaccctgttattagcagcccataagactgtggaccagggcattgcagcatctcaaagatgcctcctggaaatcttgcggacatttgagcgagctcatcaggtgacctacagccaaagccccaagattgccaccctgatgaagagtgtcagcaccagtctggagaagaaaggccacgtgtacctggttggctggcagaccctgggtatcattgccatcatggatggagtagagtgcatccacacctttggtgctgatttccgagatgtccgtggctttctcattggtgatcacagtgacatgtttaaccagaaggctgagctcaccaaccagggtccccagttcaccttctcccaggaggacttcctgacttccatccttccctctctcacggaaatcgatactgtggtcttcattttcaccctggatgacaacctcacggaggtgcagactatagtggagcaggtgaaagagaagaccaaccacatccaggccctggcacacagcaccgtgggtcagaccttgccgatccctctgaagaagctctttccctccatcatcagcatcacatggccactgcttttctttgaatatgaagggaacttcatccagaagttccagcgtgagctaagcaccaaatgggtgctgaatacagtgagtacaggtgctcatgtgcttcttggtaagatcctacaaaaccacatgttggaccttcggattagcaactccaagctcttctggcgggcgctggccatgctgcagcggttctctggacagtccaaggctcgatgcatcgagagcctcctccgagcgatccactttccccagccactgtcagatgatattcgggctgctcccatctcctgccatgtccaggttgcacatgagaaggaacaggtgatacccatcgccttgctgagcctcctattccggtgctcgatcactgaggctcaggcacacctggctgcagctccttctgtctgtgaggctgtcaggagtgctcttgctgggccaggtcagaagcgcactgcggaccccctcgagatcctagagcctgacgttcagtgaacccatgtttctgggtgggtgaaaggggcccaaccctgcccacttcagcccagcccgcccaaggggacttgtgccagcagaacatgtgggaggaagaagccccgtttccagggcatccgcagcccagggtagggagaaatattctctccactttgggggagagttcttgctctcgacctagtggtttctactctcaccgacttattctgatttcagaaataaaatgaaatgtcttattttggaaaaaaaaaaa

SEQ ID NO: 379687 - DNA, 852 bp, Homo sapiens
attgtgaccagaggggtttgtgtggctgaagaggcaggaggaacagtgtatccacagcgtgggaccatgccaggcacaaaacggtttcaacatgtcattgagaccccggagcctggcaagtgggagttgtctgggtacgaggcagctgtgccaatcacggagaagtcaaacccactgacccaggatctagacaaagcagatgctgagaacattgttcgactgctagggcaatgtgatgctgagatcttccaggaggaggggcaagccctgtccacataccagagactctacagcgaatccattctgaccaccatggtacaggtggctgggaaagttcaggaagtgctgaaggagccagatggggggctggttgtgctgagtggagggggcacctctggccggatggcattcctcatgtcggtgtcctttaatcagctgatgaaaggtctgggacagaaacctctttacacctacctcattgcaggtggtgacaggtctgtggtggcctctagggaggggacagaagatagtgccttgcacgggattgaggaactgaagaaggtggctgccgggaagaagagagtgattgtcattggcatttctgtgggactctctgctccctttgtggcaggccagatggactgctgcatgaacaacacagctgtcttcttgccagtcctggttggcttcaatccagtgagcatggccaggcacccctttcctcccccgaggatcctcagatctctcactgtcttcccttccctgagagcccctcattaccaaatcacctccctcttattctctatgtcagtggtcactcttatttcagaataaatcaacatattaaaccag

SEQ ID NO: 379688 - DNA, 1264 bp, Homo sapiens
ctagtgtgctgagggtggaagaaaaggggaaggcggagctaggtgggaagttcattggaatagacggtccagagaagagaatatgggtcagaagtcatgaggctttggcttagcatgggcagtgtggaaagctctagatccagtccccaaacttggccctagtccactgacttgttacataatcttgggcaaaacactgtaccttttgaacttcagctctttcacctgtgcacagtgttttcatgggagggaccctcccatcttcttctgccccagggtccccagttcaccttctcccaggaggacttcctgacttccatccttccctctctcacggaaatcgatactgtggtcttcattttcaccctggatgacaacctcacggaggtgcagactatagtggagcaggtgaaagagaagaccaaccacatccaggccctggcacacagcaccgtgggtcagaccttgccgatccctctgaagaagctctttccctccatcatcagcatcacatggccactgcttttctttgaatatgaagggaacttcatccagaagttccagcgtgagctaagcaccaaatgggtgctgaatacagtgagtacaggtgctcatgtgcttcttggtaagatcctacaaaaccacatgttggaccttcggattagcaactccaagctcttctggcgggcgctggccatgctgcagcggttctctggacagtccaaggctcgatgcatcgagagcctcctccgagcgatccactttccccagccactgtcagatgatattcgggctgctcccatctcctgccatgtccaggttgcacatgagaaggaacaggtgatacccatcgccttgctgagcctcctattccggtgctcgatcactgaggctcaggcacacctggctgcagctccttctgtctgtgaggctgtcaggagtgctcttgctgggccaggtcagaagcgcactgcggaccccctcgagatcctagagcctgacgttcagtgaacccatgtttctgggtgggtgaaaggggcccaaccctgcccacttcagcccagcccgcccaaggggacttgtgccagcagaacatgtgggaggaagaagccccgtttccagggcatccgcagcccagggtagggagaaatattctctccactttgggggagagttcttgctctcgacctagtggtttctactctcaccgacttattctgatttcagaaataaaatgaaatgtcttattttggaaaaaaaaaaa

SEQ ID NO: 379689 - DNA, 321 bp, Homo sapiens
ctgctgcactcgtccctctttctgctcttttgttttctgcccattgaagaagcccttgctgccccttcggaacgcagtctgggcctactctctgcacctctccagggaccagcagaatttagttctaagggagctgtgccttcacctccccgctcagggaggcacctaagctttctgagggggaattgggcccttcttgagagctggtggcttttctcccagatgcctcctggaaatcttgcggacatttgagcgagctcatcaggtgacctacagccaaagccccaagattgccaccctgatgaagagtgtcagcaccag

SEQ ID NO: 379690 - DNA, 740 bp, Homo sapiens
gctgaggcaggagaatcacttgaacccgggaggcggaggtaacagtgagccaagatcacaccactgcactccagcctgggccacagagtgagactctgtctccaaaaacaaacaaacaaacaaacaaatgaaaacttccaaggaaatggaagttcacaccaggccaggcttgtgagcatgaaacctacctgcccaaccccaccaaccaccccagtttgacaacatatccctttgagtgcaagacatggcagagaagcaaaaatgaacaaaaccaaccctgctggcactttcctcctcacccagcaaacactcttcttgtatttaagattgggtttctcaaactttttaaaatcactttctcctttaggataaacatataaatcttggctcctcccgacaacctgattctgatatttccactggagagtacccattcccagcataagaatcactgctatctctacacagtcccaccagccaaggttcagcagtattttcggaagtttgtattataaaaaaacagatttttttaaatcttaaaaatgtctaaatataaaatgcagttatgatgctgactttgcttttcaaactatacaactaccgctatctttcagatttaggccaagtgcaatggctcacacctgtaatcctagtactttgggaggccaaggctggaggatcactttaaagaggccagaaacttgagaccagcctgggcaacatagtgagaccccatgtct

SEQ ID NO: 379691 - DNA, 624 bp, Homo sapiens
tagtaccagctactcgggaggctgaggcaggagaatgctgtgaacccgggaggcagaggttgtggtaagccgagatcgcaccactgcattccggcctaggtgacagagcaagactccgtctcaagaaaatcgtcccaactgcatgtggtccttgggtgagatcatcttaaggagtactcagcaagggattgtactttgcttggttaggactggaatttacactctaattttggcccagtgatcttggaacagattgagcatctcaaatctgaaaatctgaaattcagaatgctccaaaacctgaaaccttgtgcgccgatgtgactttcaaaagaaatgctcattggagcatttaaaattttggattttcagatttgtgatgctcaactagtaggtataatgcaaatattccaaaatccaaaacagttctggtcccaagtgttttgaataaggaatactcatcctgtacaccaggaggtagactcaggcacagtctcgcccggcatctcacctggattttattgcaatagcctcctaactggtttctctgacttgaatcatactttcctttagtatgttttctatgcagctgccatggtatcctattaaaaaacaaaacaaaac

SEQ ID NO: 379692 - DNA, 590 bp, Homo sapiens
tactgtagcaaactgaggtactatgcattgatttcacagtctacttagttgatttcataattagttaatttcatgtatttttctacttttctatcagtctgaaaagttatatgttcctttcatcttccactcctttacctcactgaaacaatatggcctaggaactttctgatcagtcattcttcagatcagagcatgggggagcaatgtgggtgataaacactcggtagtcgctcaggtaattatctctagttcctttgggagggattaaaaattccatttcagaggcttccctgtatatttcttataatcatattggaatgaatataattcttatgacagttgtaagtgtaatcattgtcaactaatacttttattgtcctacttaaagtcttgagtttttttttaattgctatgataattattatatgtaatgtctggatcctacagaccctacctcaacaattataattaaaaatgctaaagtctcgagtaagcaaaaccaggaaaatagccttcacgtagatttcgtatcttagtactttgtatttctgtctgtctgagagaactacacattactaaaatagagg

SEQ ID NO: 379693 - DNA, 1262 bp, Homo sapiens
agaagttactttgaaataaattgaaggattagcagtggtgactgaggaataaaaattataatttaaaattgtccttaaagctggaattcttaacttattgaccttatatcctacatattataggactttgtaaatttaggctgatatggaaatgtatatttatatcaaatttaaatttttagaatgatggtgctactatattctaattgttaatttgataattgtaattgtaatttgttaatttgttctaataatgttttcatgacattattcatttgctgcttggcttgatggcataacaagtatgggttatttaccctgaaaaggaaacagtatcacccttccagaatctctatttacagctacagaagatgcaacacacctgtttctggaccacttccagatcagatgtgatgcatgctttagatcatttactttgatctaggaattactgtctggcatttcgtggtgtagggtaggtgtctccagcactgtataggtgtctggaattgagataagaatcaatttcaatacaaaatacattttttgcttaaagcacgcaaggattctatgaattcaggtaaattcacagggtggaaaacaggaactaatgttatatattcctgtagttatcttcataatgaagcagaaagaaaaacaaaaaagttacaaaaataaatgaaaagaactgtattttctagaattgaaaaataattcttttagatgatagataagatgtttacatcaacctgcaaaaagtcaatgttgaagaggtctcattgtatctcacagaattttgatttgcctactcacccacaggagacatttctgggacagtagcaacataaggtccatcccaaaactttggctcattatcattaatatcctgcactttgatgatgaattctgattcaggctccaggggctttctggtttctatgtccacagcctgagcacgaagagtgtagaaaggtttttcttctctatctaggctccttattgcatgaatgtcccctgtggtttcatcaatggtaaaaacggtgccagcgccatctcctgagagggtgtatttcgcagtgccctttcccttgtctaagtcggaatggagctttagggaagagagggagagagagaggaagagaaagagaaggacaaagaaagaacaccattaaaaggatgttgccaaattaaaaagtcataatttgcaatacaattcctttaatcaaaaatgttaaataaaaatcttatggttctgaaaaaaa

SEQ ID NO: 379694 - DNA, 388 bp, Homo sapiens
ttcaggctctacttttaattctagttctcttttgttgcctctaccactcttcagttatttcctccactgaagtcttgaacccttttacctcattcatgagggttggaatcaacttcttccaaactccgattaatgtcgatattttgacttcttcctatgaatcaccaacattcttaatggcatctagaatggtgactcctttccagaaggttttcaatttactttgcccagatccatcagaggaatcactacgtatggcagctatagccttacaaaatgtatcctttaaataataaggccttaagctagacattacttctacagtgctgatagatttgcttgactcagggttaccacaaaccttccatttgtaaaaaaaaataaaaat

SEQ ID NO: 379695 - DNA, 490 bp, Homo sapiens
ttggaccacaggtcctcctgtggaggaggggtctccagccactttccccagctctctcccctccactctaagtcaacattggttccaattacctccctcctcctcattaggagcccacagtactgataatgaccattttaaatatctttttctaaaaatatcaccaaaaacaagaaaggcacaagatagaaggctcaaagaaaatacgaaacatgtagctttaaatttttcatccttcaaaggaaggaccaaagataattaaaatattagtgaaggaagtacaggtagataaaaataggtatttacatatatgctgcccctttgggggggactttcaattttaaaaacttagctgataaaaacgataaagctggccgggcgcggtggctcacgcctgtaatcccagcactttgggaggccgaggcaggcggatcacgaggtcaggagatcgagaccatcctgactaacacggtgaaaccgtgtctctact

SEQ ID NO: 379696 - DNA, 655 bp, Homo sapiens
  misc_feature (649)..(652): n is a, c, g, or t
  misc_feature (655)..(655): n is a, c, g, or t
ctaagacgcgctacagcccttcctagcagagtttatccattcgtccccaagagcagctagaagagatttgaggtcatgacctcccactgccgctcaggggctgaccctatttaggaaaccaaagagggtgggttgaacctactctcacggacttggatccagtgcgcacacttgcctgcggaaaagggctctccccagccacccggagatgggggtaagaggaagagcagaggcttggggtagggccacctggtgtttaaacaggcactttctccttctctggggcttatttttgttcagaactagaccagagtgtttgaacctcctttgcaggagggctgggaatcctctttagagcacttaatcctatttatcccctggaatgtgcgtgctggccagtaggagggctggctttggcagctccctgacccccgcgctgcccgcccctccggggtaatgtggcattactggcccacagaggttttgagccaatcagctctgagactgggttagaatgtaacagctttaacttgggatttaagaagcttttaaaaggtaataatcctctgaaagaaaaatgacgtaaccacagcgtgtactatgaaagctgttattttaataaagaacgctgggccatgaactcataaannnnaan

SEQ ID NO: 379697 - DNA, 423 bp, Homo sapiens
ctgctcatcccatgcctggcagtgtcatggtaggagcctagggcgatagggccctgtcccagggctgctgggtgctgacctggtggcccacagtccagagcctgccacaggaggtgcaagacagagcaagctggacagatggaggaagccaggctgccagacaaggcctccccaccccacctggcacagaacaaggcgggtggtggggccaggagccggggtatgcccagacacctgcatgcctgaccaggagcccagaggctcagaacccaccacccagctgcaggtcagccctccctggggcgcaggcgtccccaacctctccccctgtgccctgaagctggacattttggggcaaagccagccaggagagccagactaaacaaagtggactcaataaagtggattttcccagaaataaaa

SEQ ID NO: 379698 - DNA, 373 bp, Homo sapiens
gtgaggttgagcagcttttcacatgcatatgaccatgtggatatcctcttctgtgaactacctgttcaagtctgaagcagatactatttggtagtatcaactaaaactgaatataatacataccctaaatttagcaattttgtacctgtttttttcttacatacctgtaatcccagcactttggggggccgaggcgagcagatcacctgaggtcggtagttcgagaccaacctgaccaacatggagaaaccctctactaaaaatacaaaattagccaggcgtggtttcgcatgcctgtaaatcccagttacttgggaagctgaggagggagaatcacttgaacccaggaggcggaggttgcagtgagctgaga

SEQ ID NO: 379699 - DNA, 912 bp, Homo sapiens
caaaaaaaaaaaaattattttctacccctcaaaacagccactttctcctccatctcctcttccctgatgaagaaaggcgtatgagcatctggacctcattgggtttaggtcatcatgttcttgcaattcctgtgtgcttatgcacattaaatgaatttgtatgccttttcctcttattaatctgcctattgtaaattcattttcagtgaacttcaaagggcagaggggaaactgtcccttggcctctacccctccaaggccccactttttcgtcaacactccttggacgcagcagaagtatgaacataatatggtcctgaatgaggctgagtctttgggcgcagaagacccgggttaataaaaataggaaggtaagaaaagaaaagaaaaatcaagacacatcataggactaaattcctattatttatccactcaggattgaccacccctttgggccagatagttgtacccccatgtaccaggtgggcacatgaagacacaagaagtgctgtgatggttcattttgcacgtcaccttgcgtggagtatgccaactcattgtttggtcaaacactagtctggacatggtggtaaaggtattttttagatgagattaacgcttaaatcagtaaagcaggttacccaccatactacgggtgggccctgtccaatcagttgaaggcattaagaacaaagattgaggtttcctaaagaagatggaattctccttgagactacaacatagaaaccctatctgagtttccagcctgttgccctgtggaattcaaactcaggactccggtctatggcattaaccctcacttaacttttcagcctgccagcctgccctatggatttcggacttgccagccacacaattccttaaaataaatctctccgtctctgtctgttt

SEQ ID NO: 379700 - DNA, 1739 bp, Homo sapiens
caggagctggttccaggaaagaagggcacatgagcaaacatgatggcccctttatgagaggtaatttactgaaatgcacagcgattacctgctcacccagccctgatgtaattaaaaatggcaggctaggggctctgtttcccccggctctggcagagaaacctgggtttcgacttgtgaagcttgaggttggatgtgggaattggcttggagtcataggcgatgagagggacattaggatattatgaagcccgtgaactcaactcctgagaaggacacagcagagcgagagaaaagatggaataaaaaggcctacctcattgggctcgtgtgggtgaggagaactgaagagtctgagagcgcggcacgagccagaggctacggaaaacactgccctcctacactccaccttggagagacccagaaaagaacaagcttcatttgtaaaaaaggaaaacaactcaggcaatgggggtggcttaaaggcactctacagtgtgcagatgccttccacttcttccatctgccctgtctctccaagaacccctatggccccggtctcagaacagagctgagtgcagaaatgaaaatctatggctctgtgttccaaaacgatgaagaatttcaagatggtggcagtggtaaaatccttctccaggaaaaatctgtccttggcccaatgtgtaaacacttgctgaggaacttggaataacttgcagtgtcttgcagtattgtgaaaccagcaacttgttcacaattcttctgaatttcttgggaaatttgaagtggagtacctgtaccaacatgaaatgacacgaatttaagtgacgctcaacaacgaaaagcaaaaagaaccaaagaggaagcaactgaaacaacatctggatgtatttaaaaatatacaatgcctccaaaatcaggtgtcattaatgaaaattctgaagaaatgccaccggacatagccaacgcacctacgctgttgttattcatttcctgcttttcacagaaaacaattttgttgcatggaagatcgtgaacttcaaagggcagaggggaaactgtcccttggcctctacccctccaaggccccactttttcgtcaacactccttggacgcagcagaagtatgaacataatatggtcctgaatgaggctgagtctttgggcgcagaagacccgggttaataaaaataggaaggtaagaaaagaaaagaaaaatcaagacacatcataggactaaattcctattatttatccactcaggattgaccacccctttgggccagatagttgtacccccatgtaccaggtgggcacatgaagacacaagaagtgctgtgatggttcattttgcacgtcaccttgcgtggagtatgccaactcattgtttggtcaaacactagtctggacatggtggtaaaggtattttttagatgagattaacgcttaaatcagtaaagcaggttacccaccatactacgggtgggccctgtccaatcagttgaaggcattaagaacaaagattgaggtttcctaaagaagatggaattctccttgagactacaacatagaaaccctatctgagtttccagcctgttgccctgtggaattcaaactcaggactccggtctatggcattaaccctcacttaacttttcagcctgccagcctgccctatggatttcggacttgccagccacacaattccttaaaataaatctctccgtctctgtctgttt

SEQ ID NO: 379701 - DNA, 1568 bp, Homo sapiens
caggagctggttccaggaaagaagggcacatgagcaaacatgatggcccctttatgagaggtaatttactgaaatgcacagcgattacctgctcacccagccctgatgtaattaaaaatggcaggctaggggctctgtttcccccggctctggcagagaaacctgggtttcgacttgtgaagcttgaggttggatgtgggaattggcttggagtcataggcgatgagagggacattaggatattatgaagcccgtgaactcaactcctgagaaggacacagcagagcgagagaaaagatggaataaaaaggcctacctcattgggctcgtgtgggtgaggagaactgaagagtctgagagcgcggcacgagccagaggctacggaaaacactgccctcctacactccaccttggagagacccagaaaagaacaagcttcatttgtaaaaaaggaaaacaactcaggcaatgggggtggcttaaaggcactctacagtgtgcagatgccttccacttcttccatctgccctgtctctccaagaacccctatggccccggtctcagaacagagctgagtgcagaaatgaaaatctatggctctgtgttccaaaacgatgaagaatttcaagatggtggcagtggtaaaatccttctccaggaaaaatctgtccttggcccaatgtgtaaacacttgctgagtgaaacaacatctggatgtatttaaaaatatacaatgcctccaaaatcaggtgtcattaatgaaaattctgaagaaatgccaccggacatagccaacgcacctacgctgttgttattcatttcctgcttttcacagaaaacaattttgttgcatggaagatcgtgaacttcaaagggcagaggggaaactgtcccttggcctctacccctccaaggccccactttttcgtcaacactccttggacgcagcagaagtatgaacataatatggtcctgaatgaggctgagtctttgggcgcagaagacccgggttaataaaaataggaaggtaagaaaagaaaagaaaaatcaagacacatcataggactaaattcctattatttatccactcaggattgaccacccctttgggccagatagttgtacccccatgtaccaggtgggcacatgaagacacaagaagtgctgtgatggttcattttgcacgtcaccttgcgtggagtatgccaactcattgtttggtcaaacactagtctggacatggtggtaaaggtattttttagatgagattaacgcttaaatcagtaaagcaggttacccaccatactacgggtgggccctgtccaatcagttgaaggcattaagaacaaagattgaggtttcctaaagaagatggaattctccttgagactacaacatagaaaccctatctgagtttccagcctgttgccctgtggaattcaaactcaggactccggtctatggcattaaccctcacttaacttttcagcctgccagcctgccctatggatttcggacttgccagccacacaattccttaaaataaatctctccgtctctgtctgttt

SEQ ID NO: 379702 - DNA, 1268 bp, Homo sapiens
caggagctggttccaggaaagaagggcacatgagcaaacatgatggcccctttatgagaggtaatttactgaaatgcacagcgattacctgctcacccagccctgatgtaattaaaaatggcaggctaggggctctgtttcccccggctctggcagagaaacctgggtttcgacttgtgaagcttgaggttggatgtgggaattggcttggagtcataggcgatgagagggacattaggatattatgaagcccgtgaactcaactcctgagaaggacacagcagagcgagagaaaagatggaataaaaaggcctacctcattgggctcgtgtgggtgaggagaactgaagagtctgagagcgcggcacgagccagaggctacggaaaacactgccctcctacactccaccttggagagacccagaaaagaacaagcttcatttgtaaaaaaggaaaacaactcaggcaatgggggtggcttaaaggcactctacagtgtgcagatgccttccacttcttccatctgccctgtctctccaagaacccctatggccccggtctcagaacagagctgagtgcagaaatgaaaatctatggctctgtgttccaaaacgatgaagaatttcaagatggtggcagtggtaaaatccttctccaggaaaaatctgtccttggcccaatgtgtaaacacttgctgagtattgtgaaaccagcaacttgttcacaattcttctgaatttcttgggaaatttgaagtggagtacctgtaccaacatgaaatgacacgaatttaagtgacgctcaacaacgaaaagcaaaaagaaccaaagaggaagcaactgaaacaacatctggatgtatttaaaaatatacaatgcctccaaaatcaggtgtcattaatgaaaattctgaagaaatgccaccggacatagccaacgcacctacgctgttgttattcatttcctgcttttcacagaaaacaattttgttgcatggaagatcggtgagttaaaaaaagacctgccctgggtgtcaagcacagtagttacaccgctggttctgctccctctgcttgggatacatgggcagggtgccctggtggtagggccttggtcaccagcaaagtcagttcccatgggatcctctttctgagctgatgcccactcccctgaagaaggggcttctattcaggcctcttgttgcaaggagcagaaacccacttaggctggctcaagtccgctgtgttccgctgttcagcatcctgtttc

SEQ ID NO: 379703 - DNA, 1709 bp, Homo sapiens
caggagctggttccaggaaagaagggcacatgagcaaacatgatggcccctttatgagaggtaatttactgaaatgcacagcgattacctgctcacccagccctgatgtaattaaaaatggcaggctaggggctctgtttcccccggctctggcagagaaacctgggtttcgacttgtgaagcttgaggttggatgtgggaattggcttggagtcataggcgatgagagggacattaggatattatgaagcccgtgaactcaactcctgagaaggacacagcagagcgagagaaaagatggaataaaaaggcctacctcattgggctcgtgtgggtgaggagaactgaagagtctgagagcgcggcacgagccagaggctacggaaaacactgccctcctacactccaccttggagagacccagaaaagaacaagcttcatttgtaaaaaaggaaaacaactcaggcaatgggggtggcttaaaggcactctacagtgtgcagatgccttccacttcttccatctgccctgtctctccaagaacccctatggccccggtctcagaacagagctgagtgcagaaatgaaaatctatggctctgtgttccaaaacgatgaagaatttcaagatggtggcagtggtaaaatccttctccaggaaaaatctgtccttggcccaatgtgtaaacacttgctgagtattgtgaaaccagcaacttgttcacaattcttctgaatttcttgggaaatttgaagtggagtacctgtaccaacatgaaatgacacgaatttaagtgacgctcaacaacgaaaagcaaaaagaaccaaagaggaagcaactgaaacaacatctggatgtatttaaaaatatacaatgcctccaaaatcaggtgtcattaatgaaaattctgaagaaatgccaccggacatagccaacgcacctacgctgttgttattcatttcctgcttttcacagaaaacaattttgttgcatggaagatcgtgaacttcaaagggcagaggggaaactgtcccttggcctctacccctccaaggccccactttttcgtcaacactccttggacgcagcagaagtatgaacataatatggtcctgaatgaggctgagtctttgggcgcagaagacccgggttaataaaaataggaaggtaagaaaagaaaagaaaaatcaagacacatcataggactaaattcctattatttatccactcaggattgaccacccctttgggccagatagttgtacccccatgtaccaggtgggcacatgaagacacaagaagtgctgtgatggttcattttgcacgtcaccttgcgtggagtatgccaactcattgtttggtcaaacactagtctggacatggtggtaaaggtattttttagatgagattaacgcttaaatcagtaaagcaggttacccaccatactacgggtgggccctgtccaatcagttgaaggcattaagaacaaagattgaggtttcctaaagaagatggaattctccttgagactacaacatagaaaccctatctgagtttccagcctgttgccctgtggaattcaaactcaggactccggtctatggcattaaccctcacttaacttttcagcctgccagcctgccctatggatttcggacttgccagccacacaattccttaaaataaatctctccgtctctgtctgttt

SEQ ID NO: 379704 - DNA, 599 bp, Homo sapiens
gtcagtcgaaagcgaaccagaagcaccgggcacagcagctcctctggctgtgtagacagacctggcaatgtggccgtgcagcccagacgatcagagagaagccaggcgttgaccaagccccaaggtgcctgaggccatggtgcaactctgctggtgactggggcaccttggagcagagcttcacccggatgggaaatcctcactcctgggtggcactccctcctggacaggcccggtggcagagtgtccgtgctgctgggtgctgtccccagccctcctggtccatcttcttaagatgcgtccactgctttatatttaaaattctctttttcacaggcaaggaaaggaaaccactgcttagagacactaggtacagggcatcaagagggtgcagcccagccccgccaggacgaggcgccgacttctcattcagggttgacggagccaagagtttgtgcaaaatgtatgcatggtggttgctgccagcctccctcatgactaaatgcatatctattcctgtcaaaacgtgtatcacaatgtacttgaaactgttatctttgtgctctattgtttgaataattaaagaaattacagagact

SEQ ID NO: 379705 - DNA, 375 bp, Homo sapiens
ggaaattggtggtttcttttgtttgaattttttccaaagtatttttctttaagagtttatacactgcagtcatccagcttttccctgcctcgtgctttataggaacctttaaagaaatctgcacaagaataatctcttttttaatcgcattataaacctgttcatacgcaagtatgggaaatgtgaggatgttatcggagttgaatgggtcatctgttgaatatcatgtgcttgtttcacacaagcatacacatgttgggaattttgcaatcggcctgggaaaaacctggatgagggcatattctgtggggattccctttactccccgaagtaggagggtccccaaaggaaagaacaaaataaagagtgactgaa

SEQ ID NO: 379706 - DNA, 193 bp, Homo sapiens
gcagaatggggcctgccctttggatacagctcacactttccagtgtacccctgtccccaccactcctgtttgtctcccatctggctccggtaggcatgtgcgtttgcagctctgtattagctgatcctgttctcccagcacaccccgcactcccacccctccccgcctggcacatgccctctctcgcccatgc

SEQ ID NO: 379707 - DNA, 793 bp, Homo sapiens
ctgaagccaactacacagtttcaaggatctttgctggttttctttaatatgcttcttggttaagtgataaactgaatttttgcttcttggaataagatcagaaggcttattttgctatatttcaaatatgtggcttatttcatgatttgggctcttgtttgttgaagaacttttgaagctttttaataattattttcagttataattcacgatttatgagaagggtacagattgtgatgaactttttatacacccttaagtaattaacaagtcttaatctccaattttatgtttcatatcaaagaaagcgtttttattgaggaaattctactccactaaaattgatgcaagcatttgctgcctgcagacttacctcctaaaatgtggttgtttggtaagctcactttgcagactgttatatatcctaattccttgcgctgtaagccagcactagcaaatctagatacagcagaagccacgctgatacagtcaatatgtgaagcagtctgggcgggggtctctggagaactggggagcttctgcttgtctaaaagggtggctattcctcagaaacagttaagtgctgccactccagagcaggcctgttgccatcatcttctgacattaagaaacacaggaaatccagattgttgtgtgaattcatgaacaaaagattgaccactgcaagccaaatgaaacaagtttgtggccacatttggaccacatgccactagtatgcaatctctgcatcaaactattatgagtaaagaagaaacttggacaagcatctgaa

SEQ ID NO: 379708 - DNA, 1657 bp, Homo sapiens
  misc_feature (1)..(3): n is a, c, g, or t
  misc_feature (344)..(344): n is a, c, g, or t
  misc_feature (514)..(514): n is a, c, g, or t
  misc_feature (1437)..(1437): n is a, c, g, or t
nnngccacataaaaatgtactaatacctttatattaacttcttgtccgtcccagagaaagaagtgtcccgattccatactcagacttagcacctcccctgtgatttttgtttctatttcttactgcttttaattgtgaccctgctaaatctcttggaaagcttgtgaaagcagtgattgctggaccttacccacagagtctctgattttagtagtttgggagtaagactagagaatttgcatttctaacaagttgcctggtgatggtgctgctgctgtctggggaaccacgcttggagaaccactgtcttatagatagtgcttgagttttttgttttgttttgngacagagcgagaccctgattaaaaaaacaaacaaacaaacaaacaaaaacgcaaggtgactttaagttgaagagcaagcacttgccatttgagccctagccaaaactatgaactgtaatgtgggtgaggttgttcttttccatatttccttcttcttcacttctttcacnttacacactgaatccctattggctgttcaaacataactaacctcctccctgtgtaccaaacacctgaactgtctctcactttcccctctctaatccaaacttgtggcctcttaataggggttgatttttaggaagcttagagaaaaacaacaaagtgttgattttagtaacttgtatggtcataactagctaatagaattaatcttcatttacattttaaaaggagattttttttcttttttaagcaaaagtgtcctttggaaaagtatgtgtgggagggaagcatgttgtaagcaaagcaataaaggaaatgagtagggttttcctgtctttgactggtgtacagacctccaaagtcagagggattggtgttattctaaagagtcttcagtcctctctggcttactgaggtgtagttatagcatagtcaacagctcagggtttggatttaagtgcacagacctgggttcaaattccagtctttataagtgactgcaacattattcaagttacttaacatattcaagcctcagcttcctcatttgtaaatatcataagtgtactacctgatagacttgtgaagattatacaaaatagcattgtaaaagtacctagtgcataatagacattacctatatgtaagtttatactaccattattattttgtcagatggaatatgtattatgtttttattgggttgagtgttctgtcaatgtcaggtaggtcaagttggttaataacatcattcaagttttctgtctttactgactttttaaaaatatctctctgtcaattactaagcgaggattattgaaatctccaaatatcattgtgaatttgtttctcctttcagttctatcaaattttgttttatgtgttttgaaacagtgttattagtatatacaaatttaggattgctgtnttttcttgaagaattaaccccttttttatgatgagatacctctctgtgttcttgataatatggtccatgttcttaagtttactttgtctaacattggtataaccacttaagctctatttcattgtttcagagtatcacttgaacctggaaggcagaggttgcagtgagccgagaatgcgccggtgtacccccgcctgggctgcagagtgtgagactcctc

SEQ ID NO: 379709 - DNA, 417 bp, Homo sapiens
ctgagatgaaacagcctggatcagccaccatgataaataggaagaccttttatactagtatcccaaagggtgagagtaaactggcagaaagtaatcttggccccagacaaatgtcagctattttagttactagagaacatttttaaaaagtctatgtgtaagactaaatttttatatttgttatactaggttggcaaaaaatgtagaggaagtatatttattcaaaagttgttgtaatgtatcattttcaaatataatttttgttattaagttcagaagttattagggtcttttctttggaggctttttcaaggggaatataaatgttcttaatattatcagatatacttccagaattaatacatagagcggaccttgtagccaaagaagcacaactagtggaaaagtgaaaaaaag

SEQ ID NO: 379710 - DNA, 982 bp, Homo sapiens
gtatacctggctaatgaaggaaatccagattcgttgccaaaaccaagttttaaaggaatttgcaatccttcacagttcattcaaggaggcaatggaaattttgatgaagaaattttttaaaatctttcttaaaaggagtccttacattggcattgtatcatgactaaagtcttcctccctctctcccttctatgctttttgtttctgttttctatctttcaatgacatcagtttcatggatataaatggttaaaagacaatgattacaacacacagttgagtgacacaaatcttgttgtagtgttagaaatacatcaatacattgggatcataaagagaaatggcaagaaaaaaaatcttaagttaataacagaaaatgctgattcccacagtccgtgtagaaaataacacgtttttttttctgtcagtggagataactgagactagttaatattgtcaattctgttccttctgactgagccaggtgaggcaaaatttagcatatgagttgagggacaaaactattaccttggcaacataaaaattaatactgtctacattgtttactaggaaatgcatgcaaaattaatacactcttggtagtacaggttcgtttcacttctatagtgtgtggttaatagaaagctgattcaacagacgatagattcaacagacgatgtagaattgtctaaaatccagccaggcgcggtggttcacgcctgtactcccagcactttgggaggctgaggcggcagatcacaatgtcaggagatcgagaccatcctggctaacattgtgaaacctcgtctctactaaaaatacaaaaaaattagccgggagtggtggtgggcgcctgtagtcccagctactcgggaggctgaggcaggagaatagcgtgaacccaggaggcggagcttgcagtgagccgacatcgcgccactgcattccagcctgggcgacagagcgagactccatctcaaaa

SEQ ID NO: 379711 - DNA, 271 bp, Homo sapiens
gattcagcatttgaaaggtgcctgtggaaacagctgtgctggagggaagtgctttcaattcgtgcactcagcaatatggaaattaacttggccagcgcatgagcatgaataaatgcttagctgcctttgcaatcacaaagcagctttctatctttggcacttttcagacattcagtaaaacagactaaatttaatgccagatgacagcaccagactgtcttcagtgaaactcatgcaaaaaccttaagaagccacatcccccaacccctcc

SEQ ID NO: 379712 - DNA, 274 bp, Homo sapiens
gtacagtgcttgttcaggtcttttgcccatttctctatttaaatcgcttgttttttctaattgatttgtaagaatttcttgcatgctctaaactcaggggtcaaggctgtggtctggtgttggtgtgggtgttgcactcctgctgtcccagtcccaggtacttgggaggctgagataggaggatcgcttgagcctgggacgtcagggctgcagtgagccgaggttgcaccagtgcactccagcctgggtgacagagtgagatcctgtctcaaaa

SEQ ID NO: 379713 - DNA, 619 bp, Homo sapiens
ggagaaacaggggcacacgaaggttaagcaacctgctcaaggtcacccagctctcctgctctgaaccacatcctttgctaagaacttcatgggcagtatcccatccaaaccttgcaacaacccagaagggcctcttcttcagggaatggaagcagccgactggaccgggattggagtgtgtctcccacctgggggcgccagagggcacatatactgctgtactcgtttgtgccaccagagggcagcctccgcacatcgatctctactgcttccgagaactgtccaaaccggcgggactgagagagagaaacctggtccagggcagagaaagagaggagcccactgcagtgcgtgcaagcgatcttccacgcgtccatcctgaatgtgttaaaagcagcagttaaagagggagggctctggagttggactgtttgcgtttgaacccagactctgggcaaaagctgctgaacctctctgaatctaatagcctcatctgtgaattggaaggatactagcgaggattaaatgagagtgcataggaagggcctagccccggtgcccagcacagaggctccatatgtgtcaccgttgtcaatttctgactcatgtattcatctat

SEQ ID NO: 379714 - DNA, 699 bp, Homo sapiens
tataaattaacagctgttttaactttagggcctcttcttcagggaatggaagcagccgactggaccgggattggagtgtgtgtaaggctggtggagggagtgggaggcggggggctccggcagctggcattcttcgggggcagcctcagctggcacctcggggggcaccaggcagtggccagagcagggggtctccaggtgccggggactgaggctaccccctgctgtgggctgcagcttgctctcttctcaacttcccagctcccacctgggggcgccagagggcacatatactgctgtactcgtttgtgccaccagagggcagcctccgcacatcgatctctactgcttccgagaactgtccaaaccggcgggactgagagagagaaacctggtccagggcagagaaagagaggagcccactgcagtgcgtgcaagcgatcttccacgcgtccatcctgaatgtgttaaaagcagcagttaaagagggagggctctggagttggactgtttgcgtttgaacccagactctgggcaaaagctgctgaacctctctgaatctaatagcctcatctgtgaattggaaggatactagcgaggattaaatgagagtgcataggaagggcctagccccggtgcccagcacagaggctccatatgtgtcaccgttgtcaatttctgactcatgtattcatctat

SEQ ID NO: 379715 - DNA, 352 bp, Homo sapiens
agaaaaaaaagactgacaaaaaaggagacaagattgaaatccatgaataaggaggaatcactataggtcctgcagacatcaaatgttattaagagaatattatgaacaactttttgttaattattttaaaatttaggtaaaatggaccaatgtctttaaaaagttcaatttagcaaagctaactcaaatagagatagaaacttagaatattcctgtaactattaaaagaagcagtgataaaaaaagaaaacttcctatagagaaaaccccacagagagcttcatcaatgatttctgccaaatattcaatgaagaaattatgtcaatcttatacagttttctctagataatag

SEQ ID NO: 379716 - DNA, 517 bp, Homo sapiens
ttttgctggaggagcccctctgtcaagggtcgctccagtaaccactctgcaccccgagtgattgagtgcagagcaggaagcgggcagatatttgcagaaggaggctgggagagctcagggattagttcccagggagacctcccttttgaggccggactcctctcctgcagccgagcacgcagccattaaggaagtctttgagtttggtttaatggcccctctttgttttgaagtggctgtttactgaaccttcaaagcccgctcggcagcaggatgtgatcgagggcctgaataattggatgaggcaccccaataggaaacagggagcggggagcagagccaggactagccgacagccaagccctctgtctgagcctccgctggagggactgaggtcatcctgcaaccagaagttgacctggagcgggggtcccctggaacctggcctctttgatgttgtgctggccttaattaggaacaccctaattaagtcactgaggaggaagcttttttctta

SEQ ID NO: 379717 - DNA, 835 bp, Homo sapiens
gcttcttgaatacatgtataatttctttagaacctcactcaggcagaatatgccatcaccagtgatgtgagaagagggtctttgcccttttatcccttgttgtctatccaatgcctagaacagcagtaggaattaggtaggtgcagaattcatatcaaatgaatgaaactgattcaccacaaaggactggattctgttttgcaaacagcattttcatatttttcattttgcggtgtgctctgtctgaattaactgtcctataacatcacttacaatcacaactctctctttgtggctctgactgaatttttgaccagcttttatattgaataacacattctatgatttgcaaaatgtttatttcaaccaattttatccaaaattatatttctagtcttttgtacaatttaagtttggttcattccccatgaaggtgtcactttataataagtagcgtgtactcgcagagatgaattctgaggaactgaggtctcccgccaacagccagcatcaacttgccagtcttgtgagtgaatcatcctggaaatggattcttcagccacaatcaagccttcagatgatggtagccctggctgagagcttgactgcaactgtgtgagtgatcctaagccagaaccaccagccaagccactcacaacttcctgacccacagacactgtaatagatgtttattgttgttttaagctgctaaatttagagtcatttgtttcacagcaatagataatggatacatatcctaattactaaataggtagagatgagacaaatgatctgtaggaaaggaatacagttgtacaacagcaaataaacaatg

SEQ ID NO: 379718 - DNA, 341 bp, Homo sapiens
tgggctcaatagaggatattcttacaatttattttacgattttagggtttttcccttgtgtagaatctttaaaatactttgccattttatttgatgttgattatttggatgagttacattattctgaagaaacaaactgcaaaaaatagaattttttggcaagcataattgtatcctattactgtatgcattttaggaatatagatagcagccttaattgaagtgagtataattataatatgctaaggtttaattttaacatgaaaaagaattggagtgtcagataagccttattatttaaagcatccctctaataaaactgcactttttactgacaggga

SEQ ID NO: 379719 - DNA, 202 bp, Homo sapiens
gagatgctactgttcaaaatatgactgtggttgtttttaaagcaaattttaaaattggttattgtatatgtaatagtacttatacttttcattataagtattattatgtaataagtatacatgtaatacttaggtttgtagatgcagaaaaaattctggaagactctgtccaagcttttggtagtggttattttttaggagt

SEQ ID NO: 379720 - DNA, 389 bp, Homo sapiens
ataattgattttgcataggaacaacaaaagtctcaaggaattgaagtttttaataccccccttagcactttactttcaccaaaacctcctctttctagtacatgagcagttttgttctttgtgatgttttcctctacattctttagaataattttgttacttgacaactagacttgtcaatcgtcttagactcttttgaaaaatctaatctttgaaaatgacacaaattcctttattgctttaaggctgttttcattcacccctcccacagccccctccactgcaattttttgttttttgcggggatttttttctttcatctctcttcttttaacatgatgctgtgggtagttttcaagaattctataaagaactcaacaaaaagtgta

SEQ ID NO: 379721 - DNA, 1872 bp, Homo sapiens
acacctggtgctgatcaacgccgaggccgactcgtcgccacccagcgcgccgcaggccggggcggagaggcgcagggcgctgggcagtctccggcgagggcaaggagcggtgcccggctgggccggctatgtctcccgctactgcggttcccgccggcgcccgcgacctcgggggagcagccgggttcgggggcgccgcgctgtgaggccggggcctagagccagccgcggccgcgcaggaggggcccagggcccgcgctcgcccgcgtccccgccttcctcccgcgctcagccccgcctcggctcgctgcccttggctctcgtcgccatggcctccgtcgcccaggagagcgcgggctcgcagcgccggctaccgccgcgtcacggggcgctgcgcgggctgctactgctctgcctgtggctgccaagcggccgtgcggccttgccgcccgcggcgccgctgtccgaactgcacgcgcagctgtcgggcgtggagcagctgctggaggagttccgccggcaactgcagcaggagcggcctcaggaggagctggagctggagctgcgcgcgggcggcggcccccaggaggactgcccgggccggggcagcggcggctacagcgcaatgcctgacgccatcatccgcaccaaggactccctggcggcgggtgccagcttcctgcgggcgccggcggccgtgcggggctggcggcaatgcgtggcggcctgctgctccgagccgcgctgctccgtggccgtggtggagctgccccggcgccccgcgcccccggcagccgtgctcggctgctacctcttcaactgcacggcgcgcggccgcaacgtctgcaagttcgcgctgcacagcggctacagcagctacagcctcagccgcgcgccggacggcgccgccctggccaccgcgcgcgcctcgccccggcaggaaaaggatgcgcctccacttagcaaggctgggcaggatgtggttctgcatctgcccacagacggggtggttctagacggccgcgagagcacagatgaccacgccatcgtccagtatgagtgggcactgctgcagggggacccgtcagtggacatgaaggtgcctcaatcaggaaccctgaagctgtcccacctacaggagggaacctacaccttccagctgaccgtgacggacactgccgggcagagaagctctgacaacgtgtcagtgacagtgcttcgcgcagcctactccacaggagatggatggtccatttgctgcatctgttccaagagggaagctaaggagtttagtgaaaccagttgaactcgtggaagcagagagtggaatggcggttactggaggctgtgcgggggacggactgggaaaggagagacgctggtcaaagggtacaaagtgtcactgagaccggaggaacaggttctggtgatctgttgcacagcatggtgactatagttaatgataatgtattgtctgtttcaaaattgctaaaacagtaggttttaaatgttgtcatcacaaaaagattacaagtaggggagatgatagatatgtcagttagcttgatgtaatcattccacaatgcaaacatatatcaaaacatcacattgtgcctcataaatatatactctcctcttttgtcaattaaaaatacatattaaaaaaacaaggaaaaggcataccacaggattgaagaaagacttggctcttgggtgtaatcaattgctgatataataagtcacttcaaaaattttagaaagagaaaaagagtgcagctaaggagtacggttaaaattaattgaaatacgcaaaggacccatcaatttgaaagtgctacctacacattttcatagacactttgcatccagatg

SEQ ID NO: 379722 - DNA, 3487 bp, Homo sapiens
acacctggtgctgatcaacgccgaggccgactcgtcgccacccagcgcgccgcaggccggggcggagaggcgcagggcgctgggcagtctccggcgagggcaaggagcggtgcccggctgggccggctatgtctcccgctactgcggttcccgccggcgcccgcgacctcgggggagcagccgggttcgggggcgccgcgctgtgaggccggggcctagagccagccgcggccgcgcaggaggggcccagggcccgcgctcgcccgcgtccccgccttcctcccgcgctcagccccgcctcggctcgctgcccttggctctcgtcgccatggcctccgtcgcccaggagagcgcgggctcgcagcgccggctaccgccgcgtcacggggcgctgcgcgggctgctactgctctgcctgtggctgccaagcggccgtgcggccttgccgcccgcggcgccgctgtccgaactgcacgcgcagctgtcgggcgtggagcagctgctggaggagttccgccggcaactgcagcaggagcggcctcaggaggagctggagctggagctgcgcgcgggcggcggcccccaggaggactgcccgggccggggcagcggcggctacagcgcaatgcctgacgccatcatccgcaccaaggactccctggcggcgggtgccagcttcctgcgggcgccggcggccgtgcggggctggcggcaatgcgtggcggcctgctgctccgagccgcgctgctccgtggccgtggtggagctgccccggcgccccgcgcccccggcagccgtgctcggctgctacctcttcaactgcacggcgcgcggccgcaacgtctgcaagttcgcgctgcacagcggctacagcagctacagcctcagccgcgcgccggacggcgccgccctggccaccgcgcgcgcctcgccccggcaggaaaaggatgcgcctccacttagcaaggctgggcaggatgtggttctgcatctgcccacagacggggtggttctagacggccgcgagagcacagatgaccacgccatcgtccagtatgagtgggcactgctgcagggggacccgtcagtggacatgaaggtgcctcaatcaggaaccctgaagctgtcccacctacaggagggaacctacaccttccagctgaccgtgacggacactgccgggcagagaagctctgacaacgtgtcagtgacagtgcttcgcgcagcctactccacaggaggatgtttgcacacttgctcacgctaccacttcttctgtgacgatggctgctgcattgacatcacgctcgcctgcgatggagtgcagcagtgtcctgatgggtctgatgaagacttctgccagaatctgggcctggaccgcaagatggtaacccacacggcagctagtcctgccctgccaagaaccacagggccgagtgaagatgcagggggtgactccttggtggaaaagtctcagaaagccactgccccaaacaagccacctgcattatcaaacacagagaagaggaatcattccgccttttggggaccagagagtcaaatcattcctgtgatgccaggtgcagtgctacccctggcgctgggtttggctatcactgctctgctgcttctcatggttgcatgccgactacgactggtgaaacagaaactgaaaaaagctcgtcccattacatctgaggaatcggactacctcataaatgggatgtatctatagtaatgtaatttcaataccttggggcagggacatgttttgtttataatttatacatctattaagttctggatatttacagcttcttttgtttttaattgggccagaagattctgcaaatcccaaatctttctttattatttattgtaaaaaaagtttccttagaagtcataaaatattttgaaatttagagaggaattcatgattaaagattcctaaaaatataattctgatttatgtaagctgtccctgaaaatagaaatgtgtacttagctgagagaaaattcagcatctcaggaggtggtattaggatgactgtgttaacccattaccttttagaagccaactgttggccccttaccatgctggactgctataggcccagcttccccttgttctgtggcccttttcttcctccttgaagctcccagtattctttttcttttcccctctaaacctgtttctgagagtggatctcaagcaagttcatgccttcaatcagatgttacttagggtgggtatacctaaattataaaccttatgtacaagtcagtaagccttagggaaggtgagtgtgggtccttcctaatccctctgacgtcatgtcatataggtggctgcctccttagactgacctttgggagaaaaaaaccccagactttgaattagtaacagctctaagatggtcatgcagtgagataggaaatcaagatggaagcagagaatctggcatgccaaaaactaacagaaacttagttgaaggcaaagagagcaaggagaacgtttaatacttcattacatcaaatcaacactgctccatggtgagagcacagcaactcatttatatatatatatataggctttgttgatgaaaaacgacaattgaagagaggacgttgagtggattcctgggtacagcttttgtaaaaatgtcaccatggctttcatccaatggaatgagtcgatgttttttaatgctataaaatgttagaatgtgccatcagctaatgccaggcttacgtatttctagaccataaagcagtttttcacaaattcatctttacagaaaaccagcatctagcttagcatctttccccttttaatttgtaggcttttaaaggcaaatcattcccaccatcacttaacgccgggattatacacattctagaaatgattctgagaggagtgtatagtatggtgcctatctacactcacatgatattcttattcacgttttttttaaccataagtggcaaatattttaaaatatttgaaaaacactccagaatctagtacgctttatttttagactgaacctaaagtaggttgttcttttaacaaagggtttaattcgggtggggaatataacatatcaaaatacatgaacaaatggaaagttacttctagaaaagcaaagaaattgggtatcatttttgtttcttgggaagctaattttgttgaatgtttagaattgagcaaagatgtaaatttttgaagggcagtttagaaaaattaactttgtgaatgaacttaagatgtctgtactctatatgtgatgctgtgcagtttgtttttatatggaaagatgtcaactatagccataaccaataaaataaaaactgatgaggcatgcagctttcagcacatcttttatacatgaagaaattaattttgtgttgctatggtgttgaaatatccaagatgttctgtatctatgtaaacatgattcctttaataaattgtattttattatta

SEQ ID NO: 379723 - DNA, 3526 bp, Homo sapiens
acacctggtgctgatcaacgccgaggccgactcgtcgccacccagcgcgccgcaggccggggcggagaggcgcagggcgctgggcagtctccggcgagggcaaggagcggtgcccggctgggccggctatgtctcccgctactgcggttcccgccggcgcccgcgacctcgggggagcagccgggttcgggggcgccgcgctgtgaggccggggcctagagccagccgcggccgcgcaggaggggcccagggcccgcgctcgcccgcgtccccgccttcctcccgcgctcagccccgcctcggctcgctgcccttggctctcgtcgccatggcctccgtcgcccaggagagcgcgggctcgcagcgccggctaccgccgcgtcacggggcgctgcgcgggctgctactgctctgcctgtggctgccaagcggccgtgcggccttgccgcccgcggcgccgctgtccgaactgcacgcgcagctgtcgggcgtggagcagctgctggaggagttccgccggcaactgcagcaggagcggcctcaggaggagctggagctggagctgcgcgcgggcggcggcccccaggaggactgcccgggccggggcagcggcggctacagcgcaatgcctgacgccatcatccgcaccaaggactccctggcggcgggtgccagcttcctgcgggcgccggcggccgtgcggggctggcggcaatgcgtggcggcctgctgctccgagccgcgctgctccgtggccgtggtggagctgccccggcgccccgcgcccccggcagccgtgctcggctgctacctcttcaactgcacggcgcgcggccgcaacgtctgcaagttcgcgctgcacagcggctacagcagctacagcctcagccgcgcgccggacggcgccgccctggccaccgcgcgcgcctcgccccggcaggaaaaggatgcgcctccacttagcaaggctgggcaggatgtggttctgcatctgcccacagacggggtggttctagacggccgcgagagcacagatgaccacgccatcgtccagtatgagtgggcactgctgcagggggacccgtcagtggacatgaaggtgcctcaatcaggaaccctgaagctgtcccacctacaggagggaacctacaccttccagctgaccgtgacggacactgccgggcagagaagctctgacaacgtgtcagtgacagtgcttcgcgcagcctactccacaggaggatgtttgcacacttgctcacgctaccacttcttctgtgacgatggctgctgcattgacatcacgctcgcctgcgatggagtgcagcagtgtcctgatgggtctgatgaagacttctgccagaatctgggcctggaccgcaagatggtaacccacacggcagctagtcctgccctgccaagaaccacagggccgagtgaagatgcagggggtgactccttggtggaaaagtctcagaaagccactgccccaaacaagccacctgcattatcaaacacagagaagaggaatcattccgccttttggggaccagagagtcaaatcattcctgtgatgccagatagtagttcctcagggaagaacagaaaagaggaaagttatatatttgagtcaaagggtgatggaggaggaggggaacacccagccccagaaacaggtgcagtgctacccctggcgctgggtttggctatcactgctctgctgcttctcatggttgcatgccgactacgactggtgaaacagaaactgaaaaaagctcgtcccattacatctgaggaatcggactacctcataaatgggatgtatctatagtaatgtaatttcaataccttggggcagggacatgttttgtttataatttatacatctattaagttctggatatttacagcttcttttgtttttaattgggccagaagattctgcaaatcccaaatctttctttattatttattgattaaagattcctaaaaatataattctgatttatgtaagctgtccctgaaaatagaaatgtgtacttagctgagagaaaattcagcatctcaggaggtggtattaggatgactgtgttaacccattaccttttagaagccaactgttggccccttaccatgctggactgctataggcccagcttccccttgttctgtggcccttttcttcctccttgaagctcccagtattctttttcttttcccctctaaacctgtttctgagagtggatctcaagcaagttcatgccttcaatcagatgttacttagggtgggtatacctaaattataaaccttatgtacaagtcagtaagccttagggaaggtgagtgtgggtccttcctaatccctctgacgtcatgtcatataggtggctgcctccttagactgacctttgggagaaaaaaaccccagactttgaattagtaacagctctaagatggtcatgcagtgagataggaaatcaagatggaagcagagaatctggcatgccaaaaactaacagaaacttagttgaaggcaaagagagcaaggagaacgtttaatacttcattacatcaaatcaacactgctccatggtgagagcacagcaactcatttatatatatatatataggctttgttgatgaaaaacgacaattgaagagaggacgttgagtggattcctgggtacagcttttgtaaaaatgtcaccatggctttcatccaatggaatgagtcgatgttttttaatgctataaaatgttagaatgtgccatcagctaatgccaggcttacgtatttctagaccataaagcagtttttcacaaattcatctttacagaaaaccagcatctagcttagcatctttccccttttaatttgtaggcttttaaaggcaaatcattcccaccatcacttaacgccgggattatacacattctagaaatgattctgagaggagtgtatagtatggtgcctatctacactcacatgatattcttattcacgttttttttaaccataagtggcaaatattttaaaatatttgaaaaacactccagaatctagtacgctttatttttagactgaacctaaagtaggttgttcttttaacaaagggtttaattcgggtggggaatataacatatcaaaatacatgaacaaatggaaagttacttctagaaaagcaaagaaattgggtatcatttttgtttcttgggaagctaattttgttgaatgtttagaattgagcaaagatgtaaatttttgaagggcagtttagaaaaattaactttgtgaatgaacttaagatgtctgtactctatatgtgatgctgtgcagtttgtttttatatggaaagatgtcaactatagccataaccaataaaataaaaactgatgaggcatgcagctttcagcacatcttttatacatgaagaaattaattttgtgttgctatggtgttgaaatatccaagatgttctgtatctatgtaaacatgattcctttaataaattgtattttattatta

SEQ ID NO: 379724 - DNA, 3671 bp, Homo sapiens
acacctggtgctgatcaacgccgaggccgactcgtcgccacccagcgcgccgcaggccggggcggagaggcgcagggcgctgggcagtctccggcgagggcaaggagcggtgcccggctgggccggctatgtctcccgctactgcggttcccgccggcgcccgcgacctcgggggagcagccgggttcgggggcgccgcgctgtgaggccggggcctagagccagccgcggccgcgcaggaggggcccagggcccgcgctcgcccgcgtccccgccttcctcccgcgctcagccccgcctcggctcgctgcccttggctctcgtcgccatggcctccgtcgcccaggagagcgcgggctcgcagcgccggctaccgccgcgtcacggggcgctgcgcgggctgctactgctctgcctgtggctgccaagcggccgtgcggccttgccgcccgcggcgccgctgtccgaactgcacgcgcagctgtcgggcgtggagcagctgctggaggagttccgccggcaactgcagcaggagcggcctcaggaggagctggagctggagctgcgcgcgggcggcggcccccaggaggactgcccgggccggggcagcggcggctacagcgcaatgcctgacgccatcatccgcaccaaggactccctggcggcgggtgccagcttcctgcgggcgccggcggccgtgcggggctggcggcaatgcgtggcggcctgctgctccgagccgcgctgctccgtggccgtggtggagctgccccggcgccccgcgcccccggcagccgtgctcggctgctacctcttcaactgcacggcgcgcggccgcaacgtctgcaagttcgcgctgcacagcggctacagcagctacagcctcagccgcgcgccggacggcgccgccctggccaccgcgcgcgcctcgccccggcaggaaaaggatgcgcctccacttagcaaggctgggcaggatgtggttctgcatctgcccacagacggggtggttctagacggccgcgagagcacagatgaccacgccatcgtccagtatgagtgggcactgctgcagggggacccgtcagtggacatgaaggtgcctcaatcaggaaccctgaagctgtcccacctacaggagggaacctacaccttccagctgaccgtgacggacactgccgggcagagaagctctgacaacgtgtcagtgacagtgcttcgcgcagcctactccacaggaggatgtttgcacacttgctcacgctaccacttcttctgtgacgatggctgctgcattgacatcacgctcgcctgcgatggagtgcagcagtgtcctgatgggtctgatgaagacttctgccagaatctgggcctggaccgcaagatggtaacccacacggcagctagtcctgccctgccaagaaccacagggccgagtgaagatgcagggggtgactccttggtggaaaagtctcagaaagccactgccccaaacaagccacctgcattatcaaacacagagaagaggaatcattccgccttttggggaccagagagtcaaatcattcctgtgatgccagatagtagttcctcagggaagaacagaaaagaggaaagttatatatttgagtcaaagggtgatggaggaggaggggaacacccagccccagaaacaggtgcagtgctacccctggcgctgggtttggctatcactgctctgctgcttctcatggttgcatgccgactacgactggtgaaacagaaactgaaaaaagctcgtcccattacatctgaggaatcggactacctcataaatgggatgtatctatagtaatgtaatttcaataccttggggcagggacatgttttgtttataatttatacatctattaagttctggatatttacagcttcttttgtttttaattgggccagaagattctgcaaatcccaaatctttctttattatttattgtaaaaaaagtttccttagaagtcataaaatattttgaaatttagagaggaattcatgattaaagattcctaaaaatataattctgatttatgtaagctgtccctgaaaatagaaatgtgtacttagctgagagaaaattcagcatctcaggaggtggtattaggatgactgtgttaacccattaccttttagaagccaactgttggccccttaccatgctggactgctataggcccagcttccccttgttctgtggcccttttcttcctccttgaagctcccagtattctttttcttttcccctctaaacctgtttctgagagtggatctcaagcaagttcatgccttcaatcagatgttacttagggtgggtatacctaaattataaaccttatgtacaagtcagtaagccttagggaaggtgagtgtgggtccttcctaatccctctgacgtcatgtcatataggtggctgcctccttagactgacctttgggagaaaaaaaccccagactttgaattagtaacagctctaagatggtcatgcagtgagataggaaatcaagatggaagcagagaatctggcatgccaaaaactaacagaaacttagttgaaggcaaagagagcaaggagaacgtttaatacttcattacatcaaatcaacactgctccatggtgagagcacagcaactcatttatatatatatatataggctttgttgatgaaaaacgacaattgaagagaggacgttgagtggattcctgggtacagcttttgtaaaaatgtcaccatggctttcatccaatggaatgagtcgatgttttttaatgctataaaatgttagaatgtgccatcagctaatgccaggcttacgtatttctagaccataaagcagtttttcacaaattcatctttacagaaaaccagcatctagcttagcatctttccccttttaatttgtaggcttttaaaggcaaatcattcccaccatcacttaacgccgggattatacacattctagaaatgattctgagaggagtgtatagtatggtgcctatctacactcacatgatattcttattcacgttttttttaaccataagtggcaaatattttaaaatatttgaaaaacactccagaatctagtacgctttatttttagactgaacctaaagtaggttgttcttttaacaaagggtttaattcgggtggggaatataacatatcaaaatacatgaacaaatggaaagttacttctagaaaagcaaagaaattgggtatcatttttgtttcttgggaagctaattttgttgaatgtttagaattgagcaaagatgtaaatttttgaagggcagtttagaaaaattaactttgtgaatgaacttaagatgtctgtactctatatgtgatgctgtgcagtttgtttttatatggaaagatgtcaactatagccataaccaataaaataaaaactgatgaggcatgcagctttcagcacatcttttatacatgaagaaattaattttgtgttgctatggtgttgaaatccagagtcttgttttgtaacttgatctttataatggtttttttaacaaaaaaaaaaaagtgggggggggccaaattaaattgggcggcaaaagaaagaagaaaagcgaagggggttcccaaagggggggggaaagaggttggtaagaag

SEQ ID NO: 379725 - DNA, 3240 bp, Homo sapiens
acacctggtgctgatcaacgccgaggccgactcgtcgccacccagcgcgccgcaggccggggcggagaggcgcagggcgctgggcagtctccggcgagggcaaggagcggtgcccggctgggccggctatgtctcccgctactgcggttcccgccggcgcccgcgacctcgggggagcagccgggttcgggggcgccgcgctgtgaggccggggcctagagccagccgcggccgcgcaggaggggcccagggcccgcgctcgcccgcgtccccgccttcctcccgcgctcagccccgcctcggctcgctgcccttggctctcgtcgccatggcctccgtcgcccaggagagcgcgggctcgcagcgccggctaccgccgcgtcacggggcgctgcgcgggctgctactgctctgcctgtggctgccaagcggccgtgcggccttgccgcccgcggcgccgctgtccgaactgcacgcgcagctgtcgggcgtggagcagctgctggaggagttccgccggcaactgcagcaggagcggcctcaggaggagctggagctggagctgcgcgcgggcggcggcccccaggaggactgcccgggccggggcagcggcggctacagcgcaatgcctgacgccatcatccgcaccaaggactccctggcggcgggtgccagcttcctgcgggcgccggcggccgtgcggggctggcggcaatgcgtggcggcctgctgctccgagccgcgctgctccgtggccgtggtggagctgccccggcgccccgcgcccccggcagccgtgctcggctgctacctcttcaactgcacggcgcgcggccgcaacgtctgcaagttcgcgctgcacagcggctacagcagctacagcctcagccgcgcgccggacggcgccgccctggccaccgcgcgcgcctcgccccggcaggaaaaggatgcgcctccacttagcaaggctgggcaggatgtggttctgcatctgcccacagacggggtggttctagacggccgcgagagcacagatgaccacgccatcgtccagtatgagtgggcactgctgcagggggacccgtcagtggacatgaagatgcagggggtgactccttggtggaaaagtctcagaaagccactgccccaaacaagccacctgcattatcaaacacagagaagaggaatcattccgccttttggggaccagagagtcaaatcattcctgtgatgccagatagtagttcctcagggaagaacagaaaagaggaaagttatatatttgagtcaaagggtgatggaggaggaggggaacacccagccccagaaacaggtgcagtgctacccctggcgctgggtttggctatcactgctctgctgcttctcatggttgcatgccgactacgactggtgaaacagaaactgaaaaaagctcgtcccattacatctgaggaatcggactacctcataaatgggatgtatctatagtaatgtaatttcaataccttggggcagggacatgttttgtttataatttatacatctattaagttctggatatttacagcttcttttgtttttaattgggccagaagattctgcaaatcccaaatctttctttattatttattgtaaaaaaagtttccttagaagtcataaaatattttgaaatttagagaggaattcatgattaaagattcctaaaaatataattctgatttatgtaagctgtccctgaaaatagaaatgtgtacttagctgagagaaaattcagcatctcaggaggtggtattaggatgactgtgttaacccattaccttttagaagccaactgttggccccttaccatgctggactgctataggcccagcttccccttgttctgtggcccttttcttcctccttgaagctcccagtattctttttcttttcccctctaaacctgtttctgagagtggatctcaagcaagttcatgccttcaatcagatgttacttagggtgggtatacctaaattataaaccttatgtacaagtcagtaagccttagggaaggtgagtgtgggtccttcctaatccctctgacgtcatgtcatataggtggctgcctccttagactgacctttgggagaaaaaaaccccagactttgaattagtaacagctctaagatggtcatgcagtgagataggaaatcaagatggaagcagagaatctggcatgccaaaaactaacagaaacttagttgaaggcaaagagagcaaggagaacgtttaatacttcattacatcaaatcaacactgctccatggtgagagcacagcaactcatttatatatatatatataggctttgttgatgaaaaacgacaattgaagagaggacgttgagtggattcctgggtacagcttttgtaaaaatgtcaccatggctttcatccaatggaatgagtcgatgttttttaatgctataaaatgttagaatgtgccatcagctaatgccaggcttacgtatttctagaccataaagcagtttttcacaaattcatctttacagaaaaccagcatctagcttagcatctttccccttttaatttgtaggcttttaaaggcaaatcattcccaccatcacttaacgccgggattatacacattctagaaatgattctgagaggagtgtatagtatggtgcctatctacactcacatgatattcttattcacgttttttttaaccataagtggcaaatattttaaaatatttgaaaaacactccagaatctagtacgctttatttttagactgaacctaaagtaggttgttcttttaacaaagggtttaattcgggtggggaatataacatatcaaaatacatgaacaaatggaaagttacttctagaaaagcaaagaaattgggtatcatttttgtttcttgggaagctaattttgttgaatgtttagaattgagcaaagatgtaaatttttgaagggcagtttagaaaaattaactttgtgaatgaacttaagatgtctgtactctatatgtgatgctgtgcagtttgtttttatatggaaagatgtcaactatagccataaccaataaaataaaaactgatgaggcatgcagctttcagcacatcttttatacatgaagaaattaattttgtgttgctatggtgttgaaatatccaagatgttctgtatctatgtaaacatgattcctttaataaattgtattttattatta

SEQ ID NO: 379726 - DNA, 2528 bp, Homo sapiens
acacctggtgctgatcaacgccgaggccgactcgtcgccacccagcgcgccgcaggccggggcggagaggcgcagggcgctgggcagtctccggcgagggcaaggagcggtgcccggctgggccggctatgtctcccgctactgcggttcccgccggcgcccgcgacctcgggggagcagccgggttcgggggcgccgcgctgtgaggccggggcctagagccagccgcggccgcgcaggaggggcccagggcccgcgctcgcccgcgtccccgccttcctcccgcgctcagccccgcctcggctcgctgcccttggctctcgtcgccatggcctccgtcgcccaggagagcgcgggctcgcagcgccggctaccgccgcgtcacggggcgctgcgcgggctgctactgctctgcctgtggctgccaagcggccgtgcggccttgccgcccgcggcgccgctgtccgaactgcacgcgcagctgtcgggcgtggagcagctgctggaggagttccgccggcaactgcagcaggagcggcctcaggaggagctggagctggagctgcgcgcgggcggcggcccccaggaggactgcccgggccggggcagcggcggctacagcgcaatgcctgacgccatcatccgcaccaaggactccctggcggcgggtgccagcttcctgcgggcgccggcggccgtgcggggctggcggcaatgcgtggcggcctgctgctccgagccgcgctgctccgtggccgtggtggagctgccccggcgccccgcgcccccggcagccgtgctcggctgctacctcttcaactgcacggcgcgcggccgcaacgtctgcaagttcgcgctgcacagcggctacagcagctacagcctcagccgcgcgccggacggcgccgccctggccaccgcgcgcgcctcgccccggcaggaaaaggatgcgcctccacttagcaaggctgggcaggatgtggttctgcatctgcccacagacggggtggttctagacggccgcgagagcacagatgaccacgccatcgtccagtatgagtgggcactgctgcagggggacccgtcagtggacatgaaggtgcctcaatcaggaaccctgaagctgtcccacctacaggagggaacctacaccttccagctgaccgtgacggacactgccgggcagagaagctctgacaacgtgtcagtgacagtgcttcgcgcagcctactccacaggaggatgtttgcacacttgctcacgctaccacttcttctgtgacgatggctgctgcattgacatcacgctcgcctgcgatggagtgcagcagtgtcctgatgggtctgatgaagacttctgccagaatctgggcctggaccgcaagatggtaacccacacggcagctagtcctgccctgccaagaaccacagggccgagtgaagatgcagggggtgactccttggtggaaaagtctcagaaagccactgccccaaacaagccacctgcattatcaaacacagagaagaggaatcattccgccttttggggaccagagagtcaaatcattcctgtgatgccagatagtagttcctcagggaagaacagaaaagaggaaagttatatatttgagtcaaagggtgatggaggaggaggggaacacccagccccagaaacaggtgcagtgctacccctggcgctgggtttggctatcactgctctgctgcttctcatggttgcatgccgactacgactggtgaaacagaaactgaaaaaagctcgtcccattacatctgaggaatcggactacctcataaatgggatgtatctatagtaatgtaatttcaataccttggggcagggacatgttttgtttataatttatacatctattaagttctggatatttacagcttcttttgtttttaattgggccagaagattctgcaaatcccaaatctttctttattatttattgtaaaaaaagtttccttagaagtcataaaatattttgaaatttagagaggaattcatgattaaagattcctaaaaatataattctgatttatgtaagctgtccctgaaaatagaaatgtgtacttagctgagagaaaattcagcatctcaggaggtggtattaggatgactgtgttaacccattaccttttagaagccaactgttggccccttaccatgctggactgctataggcccagcttccccttgttctgtggcccttttcttcctccttgaagctcccagtattctttttcttttcccctctaaacctgtttctgagagtggatctcaagcaagttcatgccttcaatcagatgttacttagggtgggtatacctaaattataaaccttatgtacaagtcagtaagccttagggaaggtgagtgtgggtccttcctaatccctctgacgtcatgtcatataggtggctgcctccttagactgacctttgggagaaaaaaaccccagactttgaattagtaacagctaacctttccgggaccgtgcacga

SEQ ID NO: 379727 - DNA, 2020 bp, Homo sapiens
acacctggtgctgatcaacgccgaggccgactcgtcgccacccagcgcgccgcaggccggggcggagaggcgcagggcgctgggcagtctccggcgagggcaaggagcggtgcccggctgggccggctatgtctcccgctactgcggttcccgccggcgcccgcgacctcgggggagcagccgggttcgggggcgccgcgctgtgaggccggggcctagagccagccgcggccgcgcaggaggggcccagggcccgcgctcgcccgcgtccccgccttcctcccgcgctcagccccgcctcggctcgctgcccttggctctcgtcgccatggcctccgtcgcccaggagagcgcgggctcgcagcgccggctaccgccgcgtcacggggcgctgcgcgggctgctactgctctgcctgtggctgccaagcggccgtgcggccttgccgcccgcggcgccgctgtccgaactgcacgcgcagctgtcgggcgtggagcagctgctggaggagttccgccggcaactgcagcaggagcggcctcaggaggagctggagctggagctgcgcgcgggcggcggcccccaggaggactgcccgggccggggcagcggcggctacagcgcaatgcctgacgccatcatccgcaccaaggactccctggcggcgggtgccagcttcctgcgggcgccggcggccgtgcggggctggcggcaatgcgtggcggcctgctgctccgagccgcgctgctccgtggccgtggtggagctgccccggcgccccgcgcccccggcagccgtgctcggctgctacctcttcaactgcacggcgcgcggccgcaacgtctgcaagttcgcgctgcacagcggctacagcagctacagcctcagccgcgcgccggacggcgccgccctggccaccgcgcgcgcctcgccccggcagggtgcctcaatcaggaaccctgaagctgtcccacctacaggagggaacctacaccttccagctgaccgtgacggacactgccgggcagagaagctctgacaacgtgtcagtgacagtgcttcgcgcagcctactccacaggaggtgagaagaaagtccttccctcgcttcccactgcttgtggaaggcaatgtcgggttggcgctttgtcctctggctctgcgctccatgggctcttccattttatttttggttattgctgaatgagagagtctttgctaaaaacacaataacaaaagcaggctctcttctgttttgggcttagccgatgctactgggttggggtggaggaagcactccaggggatgagaagagatgctcccgcttctcttgactcgacttcatcaaagacaattgcttggctattctgggagaggactttgtttacagatggatggtccatttgctgcatctgttccaagagggaagctaaggagtttagtgaaaccagttgaactcgtggaagcagagagtggaatggcggttactggaggctgtgcgggggacggactgggaaaggagagacgctggtcaaagggtacaaagtgtcactgagaccggaggaacaggttctggtgatctgttgcacagcatggtgactatagttaatgataatgtattgtctgtttcaaaattgctaaaacagtaggttttaaatgttgtcatcacaaaaagattacaagtaggggagatgatagatatgtcagttagcttgatgtaatcattccacaatgcaaacatatatcaaaacatcacattgtgcctcataaatatatactctcctcttttgtcaattaaaaatacatattaaaaaaacaaggaaaaggcataccacaggattgaagaaagacttggctcttgggtgtaatcaattgctgatataataagtcacttcaaaaattttagaaagagaaaaagagtgcagctaaggagtacggttaaaattaattgaaatacgcaaaggacccatcaatttgaaagtgctacctacacattttcatagacactttgcatccagatg

SEQ ID NO: 379728 - DNA, 3583 bp, Homo sapiens
acacctggtgctgatcaacgccgaggccgactcgtcgccacccagcgcgccgcaggccggggcggagaggcgcagggcgctgggcagtctccggcgagggcaaggagcggtgcccggctgggccggctatgtctcccgctactgcggttcccgccggcgcccgcgacctcgggggagcagccgggttcgggggcgccgcgctgtgaggccggggcctagagccagccgcggccgcgcaggaggggcccagggcccgcgctcgcccgcgtccccgccttcctcccgcgctcagccccgcctcggctcgctgcccttggctctcgtcgccatggcctccgtcgcccaggagagcgcgggctcgcagcgccggctaccgccgcgtcacggggcgctgcgcgggctgctactgctctgcctgtggctgccaagcggccgtgcggccttgccgcccgcggcgccgctgtccgaactgcacgcgcagctgtcgggcgtggagcagctgctggaggagttccgccggcaactgcagcaggagcggcctcaggaggagctggagctggagctgcgcgcgggcggcggcccccaggaggactgcccgggccggggcagcggcggctacagcgcaatgcctgacgccatcatccgcaccaaggactccctggcggcgggtgccagcttcctgcgggcgccggcggccgtgcggggctggcggcaatgcgtggcggcctgctgctccgagccgcgctgctccgtggccgtggtggagctgccccggcgccccgcgcccccggcagccgtgctcggctgctacctcttcaactgcacggcgcgcggccgcaacgtctgcaagttcgcgctgcacagcggctacagcagctacagcctcagccgcgcgccggacggcgccgccctggccaccgcgcgcgcctcgccccggcaggaaaaggatgcgcctccacttagcaaggctgggcaggatgtggttctgcatctgcccacagacggggtggttctagacggccgcgagagcacagatgaccacgccatcgtccagtatgagtgggcactgctgcagggggacccgtcagtggacatgaaggtgcctcaatcaggaaccctgaagctgtcccacctacaggagggaacctacaccttccagctgaccgtgacggacactgccgggcagagaagctctgacaacgtgtcagtgacagtgcttcgcgcagcctactccacaggaggatgtttgcacacttgctcacgctaccacttcttctgtgacgatggctgctgcattgacatcacgctcgcctgcgatggagtgcagcagtgtcctgatgggtctgatgaagacttctgccagaatctgggcctggaccgcaagatggtaacccacacggcagctagtcctgccctgccaagaaccacagggccgagtgaagatgcagggggtgactccttggtggaaaagtctcagaaagccactgccccaaacaagccacctgcattatcaaacacagagaagaggaatcattccgccttttggggaccagagagtcaaatcattcctgtgatgccagatagtagttcctcagggaagaacagaaaagaggaaagttatatatttgagtcaaagggtgatggaggaggaggggaacacccagccccagaaacaggtgcagtgctacccctggcgctgggtttggctatcactgctctgctgcttctcatggttgcatgccgactacgactggtgaaacagaaactgaaaaaagctcgtcccattacatctgaggaatcggactacctcataaatgggatgtatctatagtaatgtaatttcaataccttggggcagggacatgttttgtttataatttatacatctattaagttctggatatttacagcttcttttgtttttaattgggccagaagattctgcaaatcccaaatctttctttattatttattgtaaaaaaagtttccttagaagtcataaaatattttgaaatttagagaggaattcatgattaaagattcctaaaaatataattctgatttatgtaagctgtccctgaaaatagaaatgtgtacttagctgagagaaaattcagcatctcaggaggtggtattaggatgactgtgttaacccattaccttttagaagccaactgttggccccttaccatgctggactgctataggcccagcttccccttgttctgtggcccttttcttcctccttgaagctcccagtattctttttcttttcccctctaaacctgtttctgagagtggatctcaagcaagttcatgccttcaatcagatgttacttagggtgggtatacctaaattataaaccttatgtacaagtcagtaagccttagggaaggtgagtgtgggtccttcctaatccctctgacgtcatgtcatataggtggctgcctccttagactgacctttgggagaaaaaaaccccagactttgaattagtaacagctctaagatggtcatgcagtgagataggaaatcaagatggaagcagagaatctggcatgccaaaaactaacagaaacttagttgaaggcaaagagagcaaggagaacgtttaatacttcattacatcaaatcaacactgctccatggtgagagcacagcaactcatttatatatatatatataggctttgttgatgaaaaacgacaattgaagagaggacgttgagtggattcctgggtacagcttttgtaaaaatgtcaccatggctttcatccaatggaatgagtcgatgttttttaatgctataaaatgttagaatgtgccatcagctaatgccaggcttacgtatttctagaccataaagcagtttttcacaaattcatctttacagaaaaccagcatctagcttagcatctttccccttttaatttgtaggcttttaaaggcaaatcattcccaccatcacttaacgccgggattatacacattctagaaatgattctgagaggagtgtatagtatggtgcctatctacactcacatgatattcttattcacgttttttttaaccataagtggcaaatattttaaaatatttgaaaaacactccagaatctagtacgctttatttttagactgaacctaaagtaggttgttcttttaacaaagggtttaattcgggtggggaatataacatatcaaaatacatgaacaaatggaaagttacttctagaaaagcaaagaaattgggtatcatttttgtttcttgggaagctaattttgttgaatgtttagaattgagcaaagatgtaaatttttgaagggcagtttagaaaaattaactttgtgaatgaacttaagatgtctgtactctatatgtgatgctgtgcagtttgtttttatatggaaagatgtcaactatagccataaccaataaaataaaaactgatgaggcatgcagctttcagcacatcttttatacatgaagaaattaattttgtgttgctatggtgttgaaatatccaagatgttctgtatctatgtaaacatgattcctttaataaattgtattttattatta

SEQ ID NO: 379729 - DNA, 293 bp, Homo sapiens
atcttttatgaattatttattttctttctcagaaaaggatgcgcctccacttagcaaggctgggcaggatgtggttctgcatctgcccacagacggggtggttctagacggccgcgagagcacagatgaccacgccatcgtccagtatgagtgggcactgctgcagggggacccgtcagtggacatgaagctggcagctaggtctgctggggcacaccgagcctgtgagggagggaggccagcatgcggtgctcctgcccggggctcctgcccggggctcctgggatagccgc

SEQ ID NO: 379730 - DNA, 3622 bp, Homo sapiens
acacctggtgctgatcaacgccgaggccgactcgtcgccacccagcgcgccgcaggccggggcggagaggcgcagggcgctgggcagtctccggcgagggcaaggagcggtgcccggctgggccggctatgtctcccgctactgcggttcccgccggcgcccgcgacctcgggggagcagccgggttcgggggcgccgcgctgtgaggccggggcctagagccagccgcggccgcgcaggaggggcccagggcccgcgctcgcccgcgtccccgccttcctcccgcgctcagccccgcctcggctcgctgcccttggctctcgtcgccatggcctccgtcgcccaggagagcgcgggctcgcagcgccggctaccgccgcgtcacggggcgctgcgcgggctgctactgctctgcctgtggctgccaagcggccgtgcggccttgccgcccgcggcgccgctgtccgaactgcacgcgcagctgtcgggcgtggagcagctgctggaggagttccgccggcaactgcagcaggagcggcctcaggaggagctggagctggagctgcgcgcgggcggcggcccccaggaggactgcccgggccggggcagcggcggctacagcgcaatgcctgacgccatcatccgcaccaaggactccctggcggcgggtgccagcttcctgcgggcgccggcggccgtgcggggctggcggcaatgcgtggcggcctgctgctccgagccgcgctgctccgtggccgtggtggagctgccccggcgccccgcgcccccggcagccgtgctcggctgctacctcttcaactgcacggcgcgcggccgcaacgtctgcaagttcgcgctgcacagcggctacagcagctacagcctcagccgcgcgccggacggcgccgccctggccaccgcgcgcgcctcgccccggcaggaaaaggatgcgcctccacttagcaaggctgggcaggatgtggttctgcatctgcccacagacggggtggttctagacggccgcgagagcacagatgaccacgccatcgtccagtatgagtgggcactgctgcagggggacccgtcagtggacatgaaggtgcctcaatcaggaaccctgaagctgtcccacctacaggagggaacctacaccttccagctgaccgtgacggacactgccgggcagagaagctctgacaacgtgtcagtgacagtgcttcgcgcagcctactccacaggaggatgtttgcacacttgctcacgctaccacttcttctgtgacgatggctgctgcattgacatcacgctcgcctgcgatggagtgcagcagtgtcctgatgggtctgatgaagacttctgccagaatctgggcctggaccgcaagatggtaacccacacggcagctagtcctgccctgccaagaaccacagggccgagtgaagatgcagggggtgactccttggtggaaaagtctcagaaagccactgccccaaacaagccacctgcattatcaaacacagagaagaggaatcattccgccttttggggaccagagagtcaaatcattcctgtgatgccagatagtagttcctcagggaagaacagaaaagaggaaagttatatatttgagtcaaagggtgatggaggaggaggggaacacccagccccagaaacaggtgcagtgctacccctggcgctgggtttggctatcactgctctgctgcttctcatggttgcatgccgactacgactggtgaaacagaaactgaaaaaagctcgtcccattacatctgaggaatcggactacctcataaatgggatgtatctatagtaatgtaatttcaataccttggggcagggacatgttttgtttataatttatacatctattaagttctggatatttacagcttcttttgtttttaattgggccagaagattctgcaaatcccaaatctttctttattatttattgtaaaaaaagtttccttagaagtcataaaatattttgaaatttagagaggaattcatgattaaagattcctaaaaatataattctgatttatgtaagctgtccctgaaaatagaaatgtgtacttagctgagagaaaattcagcatctcaggaggtggtattaggatgactgtgttaacccattaccttttagaagccaactgttggccccttaccatgctggactgctataggcccagcttccccttgttctgtggcccttttcttcctccttgaagctcccagtattctttttcttttcccctctaaacctgtttctgagagtggatctcaagcaagttcatgccttcaatcagatgttacttagggtgggtatacctaaattataaaccttatgtacaagtcagtaagccttagggaaggtgagtgtgggtccttcctaatccctctgacgtcatgtcatataggtggctgcctccttagactgacctttgggagaaaaaaaccccagactttgaattagtaacagctctaagatggtcatgcagtgagataggaaatcaagatggaagcagagaatctggcatgccaaaaactaacagaaacttagttgaaggcaaagagagcaaggagaacgtttaatacttcattacatcaaatcaacactgctccatggtgagagcacagcaactcatttatatatatatatataggctttgttgatgaaaaacgacaattgaagagaggacgttgagtggattcctgggtacagcttttgtaaaaatgtcaccatggctttcatccaatggaatgagtcgatgttttttaatgctataaaatgttagaatgtgccatcagctaatgccaggcttacgtatttctagaccataaagcagtttttcacaaattcatctttacagaaaaccagcatctagcttagcatctttccccttttaatttgtaggcttttaaaggcaaatcattcccaccatcacttaacgccgggattatacacattctagaaatgattctgagaggagtgtatagtatggtgcctatctacactcacatgatattcttattcacgttttttttaaccataagtggcaaatattttaaaatatttgaaaaacactccagaatctagtacgctttatttttagactgaacctaaagtaggttgttcttttaacaaagggtttaattcgggtggggaatataacatatcaaaatacatgaacaaatggaaagttacttctagaaaagcaaagaaattgggtatcatttttgtttcttgggaagctaattttgttgaatgtttagaattgagcaaagatgtaaatttttgaagggcagtttagaaaaattaactttgtgaatgaacttaagatgtctgtactctatatgtgatgctgtgcagtttgtttttatatggaaagatgtcaactatagccataaccaataaaataaaaactgatgaggcatgcagctttcagcacatcttttatacatgaagaaattaattttgtgttgctatggtgttgaaatatccaagatgttctgtatctatgtaaacatgattcctttaataaattgtattttattattaagcctttttttccttttaatataatcataagttgctatt

SEQ ID NO: 379731 - DNA, 3530 bp, Homo sapiens
acacctggtgctgatcaacgccgaggccgactcgtcgccacccagcgcgccgcaggccggggcggagaggcgcagggcgctgggcagtctccggcgagggcaaggagcggtgcccggctgggccggctatgtctcccgctactgcggttcccgccggcgcccgcgacctcgggggagcagccgggttcgggggcgccgcgctgtgaggccggggcctagagccagccgcggccgcgcaggaggggcccagggcccgcgctcgcccgcgtccccgccttcctcccgcgctcagccccgcctcggctcgctgcccttggctctcgtcgccatggcctccgtcgcccaggagagcgcgggctcgcagcgccggctaccgccgcgtcacggggcgctgcgcgggctgctactgctctgcctgtggctgccaagcggccgtgcggccttgccgcccgcggcgccgctgtccgaactgcacgcgcagctgtcgggcgtggagcagctgctggaggagttccgccggcaactgcagcaggagcggcctcaggaggagctggagctggagctgcgcgcgggcggcggcccccaggaggactgcccgggccggggcagcggcggctacagcgcaatgcctgacgccatcatccgcaccaaggactccctggcggcgggtgccagcttcctgcgggcgccggcggccgtgcggggctggcggcaatgcgtggcggcctgctgctccgagccgcgctgctccgtggccgtggtggagctgccccggcgccccgcgcccccggcagccgtgctcggctgctacctcttcaactgcacggcgcgcggccgcaacgtctgcaagttcgcgctgcacagcggctacagcagctacagcctcagccgcgcgccggacggcgccgccctggccaccgcgcgcgcctcgccccggcaggaaaaggatgcgcctccacttagcaaggctgggcaggatgtggttctgcatctgcccacagacggggtggttctagacggccgcgagagcacagatgaccacgccatcgtccagtatgagtgggcactgctgcagggggacccgtcagtggacatgaaggtgcctcaatcaggaaccctgaagctgtcccacctacaggagggaacctacaccttccagctgaccgtgacggacactgccgggcagagaagctctgacaacgtgtcagtgacagtgcttcgcgcagcctactccacaggaggatgtttgcacacttgctcacgctaccacttcttctgtgacgatggctgctgcattgacatcacgctcgcctgcgatggagtgcagcagtgtcctgatgggtctgatgaagacttctgccagaatctgggcctggaccgcaagatggtaacccacacggcagctagtcctgccctgccaagaaccacagggccgagtgaagatgcagggggtgactccttggtggaaaagtctcagaaagccactgccccaaacaagccacctgcattatcaaacacagagaagaggaatcattccgccttttggggaccagagagtcaaatcattcctgtgatgccagatagtagttcctcagggaagaacagaaaagaggaaagttatatatttgagtcaaagggtgatggaggaggaggggaacacccagccccagaaacaggtgcagtgctacccctggcgctgggtttggctatcactgctctgctgcttctcatggttgcatgccgactacgactggtgaaacagaaactgaaaaaagctcgtcccattacatctgaggaatcggactacctcataaatgggatgtatctatagtaatgtaatttcaataccttggggcagggacatgttttgtttataatttatacatctattaagttctggatatttacagcttcttttgtttttaattgggccagaagattctgcaaatcccaaatctttctttattatttattgtaaaaaaagtttccttagaagtcataaaatattttgaaatttagagaggaattcatgattaaagattcctaaaaatataattctgatttatgtaagctgtccctgaaaatagaaatgtgtacttagctgagagaaaattcagcatctcaggaggtggtattaggatgactgtgttaacccattaccttttagaagccaactgttggccccttaccatgctggactgctataggcccagcttccccttgttctgtggcccttttcttcctccttgaagctcccagtattctttttcttttcccctctaaacctgtttctgagagtggatctcaagcaagttcatgccttcaatcagatgttacttagggtgggtatacctaaattataaaccttatgtacaagtcagtaagccttagggaaggtgagtgtgggtccttcctaatccctctgacgtcatgtcatataggtggctgcctccttagactgacctttgggagaaaaaaaccccagactttgaattagtaacagctctaagatggtcatgcagtgagataggaaatcaagatggaagcagagaatctggcatgccaaaaactaacagaaacttagttgaaggcaaagagagcaaggagaacgtttaatacttcattacatcaaatcaacactgctccatggtgagagcacagcaactcatttatatatatatatataggctttgttgatgaaaaacgacaattgaagagaggacgttgagtggattcctgggtacagcttttgtaaaaatgtcaccatggctttcatccaatggaatgagtcgatgttttttaatgctataaaatgttagaatgtgccatcagctaatgccaggcttacgtatttctagaccataaagcagtttttcacaaattcatctttacagaaaaccagcatctagcttagcatctttccccttttaatttacattctagaaatgattctgagaggagtgtatagtatggtgcctatctacactcacatgatattcttattcacgttttttttaaccataagtggcaaatattttaaaatatttgaaaaacactccagaatctagtacgctttatttttagactgaacctaaagtaggttgttcttttaacaaagggtttaattcgggtggggaatataacatatcaaaatacatgaacaaatggaaagttacttctagaaaagcaaagaaattgggtatcatttttgtttcttgggaagctaattttgttgaatgtttagaattgagcaaagatgtaaatttttgaagggcagtttagaaaaattaactttgtgaatgaacttaagatgtctgtactctatatgtgatgctgtgcagtttgtttttatatggaaagatgtcaactatagccataaccaataaaataaaaactgatgaggcatgcagctttcagcacatcttttatacatgaagaaattaattttgtgttgctatggtgttgaaatatccaagatgttctgtatctatgtaaacatgattcctttaataaattgtattttattatta

SEQ ID NO: 379732 - DNA, 3425 bp, Homo sapiens
acacctggtgctgatcaacgccgaggccgactcgtcgccacccagcgcgccgcaggccggggcggagaggcgcagggcgctgggcagtctccggcgagggcaaggagcggtgcccggctgggccggctatgtctcccgctactgcggttcccgccggcgcccgcgacctcgggggagcagccgggttcgggggcgccgcgctgtgaggccggggcctagagccagccgcggccgcgcaggaggggcccagggcccgcgctcgcccgcgtccccgccttcctcccgcgctcagccccgcctcggctcgctgcccttggctctcgtcgccatggcctccgtcgcccaggagagcgcgggctcgcagcgccggctaccgccgcgtcacggggcgctgcgcgggctgctactgctctgcctgtggctgccaagcggccgtgcggccttgccgcccgcggcgccgctgtccgaactgcacgcgcagctgtcgggcgtggagcagctgctggaggagttccgccggcaactgcagcaggagcggcctcaggaggagctggagctggagctgcgcgcgggcggcggcccccaggaggactgcccgggccggggcagcggcggctacagcgcaatgcctgacgccatcatccgcaccaaggactccctggcggcgggtgccagcttcctgcgggcgccggcggccgtgcggggctggcggcaatgcgtggcggcctgctgctccgagccgcgctgctccgtggccgtggtggagctgccccggcgccccgcgcccccggcagccgtgctcggctgctacctcttcaactgcacggcgcgcggccgcaacgtctgcaagttcgcgctgcacagcggctacagcagctacagcctcagccgcgcgccggacggcgccgccctggccaccgcgcgcgcctcgccccggcagggtgcctcaatcaggaaccctgaagctgtcccacctacaggagggaacctacaccttccagctgaccgtgacggacactgccgggcagagaagctctgacaacgtgtcagtgacagtgcttcgcgcagcctactccacaggaggatgtttgcacacttgctcacgctaccacttcttctgtgacgatggctgctgcattgacatcacgctcgcctgcgatggagtgcagcagtgtcctgatgggtctgatgaagacttctgccagaatctgggcctggaccgcaagatggtaacccacacggcagctagtcctgccctgccaagaaccacagggccgagtgaagatgcagggggtgactccttggtggaaaagtctcagaaagccactgccccaaacaagccacctgcattatcaaacacagagaagaggaatcattccgccttttggggaccagagagtcaaatcattcctgtgatgccagatagtagttcctcagggaagaacagaaaagaggaaagttatatatttgagtcaaagggtgatggaggaggaggggaacacccagccccagaaacaggtgcagtgctacccctggcgctgggtttggctatcactgctctgctgcttctcatggttgcatgccgactacgactggtgaaacagaaactgaaaaaagctcgtcccattacatctgaggaatcggactacctcataaatgggatgtatctatagtaatgtaatttcaataccttggggcagggacatgttttgtttataatttatacatctattaagttctggatatttacagcttcttttgtttttaattgggccagaagattctgcaaatcccaaatctttctttattatttattgtaaaaaaagtttccttagaagtcataaaatattttgaaatttagagaggaattcatgattaaagattcctaaaaatataattctgatttatgtaagctgtccctgaaaatagaaatgtgtacttagctgagagaaaattcagcatctcaggaggtggtattaggatgactgtgttaacccattaccttttagaagccaactgttggccccttaccatgctggactgctataggcccagcttccccttgttctgtggcccttttcttcctccttgaagctcccagtattctttttcttttcccctctaaacctgtttctgagagtggatctcaagcaagttcatgccttcaatcagatgttacttagggtgggtatacctaaattataaaccttatgtacaagtcagtaagccttagggaaggtgagtgtgggtccttcctaatccctctgacgtcatgtcatataggtggctgcctccttagactgacctttgggagaaaaaaaccccagactttgaattagtaacagctctaagatggtcatgcagtgagataggaaatcaagatggaagcagagaatctggcatgccaaaaactaacagaaacttagttgaaggcaaagagagcaaggagaacgtttaatacttcattacatcaaatcaacactgctccatggtgagagcacagcaactcatttatatatatatatataggctttgttgatgaaaaacgacaattgaagagaggacgttgagtggattcctgggtacagcttttgtaaaaatgtcaccatggctttcatccaatggaatgagtcgatgttttttaatgctataaaatgttagaatgtgccatcagctaatgccaggcttacgtatttctagaccataaagcagtttttcacaaattcatctttacagaaaaccagcatctagcttagcatctttccccttttaatttgtaggcttttaaaggcaaatcattcccaccatcacttaacgccgggattatacacattctagaaatgattctgagaggagtgtatagtatggtgcctatctacactcacatgatattcttattcacgttttttttaaccataagtggcaaatattttaaaatatttgaaaaacactccagaatctagtacgctttatttttagactgaacctaaagtaggttgttcttttaacaaagggtttaattcgggtggggaatataacatatcaaaatacatgaacaaatggaaagttacttctagaaaagcaaagaaattgggtatcatttttgtttcttgggaagctaattttgttgaatgtttagaattgagcaaagatgtaaatttttgaagggcagtttagaaaaattaactttgtgaatgaacttaagatgtctgtactctatatgtgatgctgtgcagtttgtttttatatggaaagatgtcaactatagccataaccaataaaataaaaactgatgaggcatgcagctttcagcacatcttttatacatgaagaaattaattttgtgttgctatggtgttgaaatatccaagatgttctgtatctatgtaaacatgattcctttaataaattgtattttattatta

SEQ ID NO: 379733 - DNA, 1925 bp, Homo sapiens
acacctggtgctgatcaacgccgaggccgactcgtcgccacccagcgcgccgcaggccggggcggagaggcgcagggcgctgggcagtctccggcgagggcaaggagcggtgcccggctgggccggctatgtctcccgctactgcggttcccgccggcgcccgcgacctcgggggagcagccgggttcgggggcgccgcgctgtgaggccggggcctagagccagccgcggccgcgcaggaggggcccagggcccgcgctcgcccgcgtccccgccttcctcccgcgctcagccccgcctcggctcgctgcccttggctctcgtcgccatggcctccgtcgcccaggagagcgcgggctcgcagcgccggctaccgccgcgtcacggggcgctgcgcgggctgctactgctctgcctgtggctgccaagcggccgtgcggccttgccgcccgcggcgccgctgtccgaactgcacgcgcagctgtcgggcgtggagcagctgctggaggagttccgccggcaactgcagcaggagcggcctcaggaggagctggagctggagctgcgcgcgggcggcggcccccaggaggactgcccgggccggggcagcggcggctacagcgcaatgcctgacgccatcatccgcaccaaggactccctggcggcgggtgccagcttcctgcgggcgccggcggccgtgcggggctggcggcaatgcgtggcggcctgctgctccgagccgcgctgctccgtggccgtggtggagctgccccggcgccccgcgcccccggcagccgtgctcggctgctacctcttcaactgcacggcgcgcggccgcaacgtctgcaagttcgcgctgcacagcggctacagcagctacagcctcagccgcgcgccggacggcgccgccctggccaccgcgcgcgcctcgccccggcaggaaaaggatgcgcctccacttagcaaggctgggcaggatgtggttctgcatctgcccacagacggggtggttctagacggccgcgagagcacagatgaccacgccatcgtccagtatgagtgggcactgctgcagggggacccgtcagtggacatgaaggtgcctcaatcaggaaccctgaagctgtcccacctacaggagggaacctacaccttccagctgaccgtgacggacactgccgggcagagaagctctgacaacgtgtcagtgacagtgcttcgcgcagcctactccacaggaggatgtttgcacacttgctcacgctaccacttcttctgtgacgatggctgctgcattgacatcacgctcgcctgcgatggagtgcagcagtgtcctgatgggtctgatgaagacttctgccagaatctgggcctggaccgcaagatggtaacccacacggcagctagtcctgccctgccaagaaccacagggccgagtgaagatgcagggggtgactccttggtggaaaagtctcagaaagccactgccccaaacaagccacctgcattatcaaacacagagaagaggaatcattccgccttttggggaccagagagtcaaatcattcctgtgatgccagatagtagttcctcagggaagaacagaaaagaggaaagttatatatttgagtcaaagggtgatggaggaggaggggaacacccagccccagaaacaggtaaatgtccaccttggaaaccctttgcagactgtagtcttctcagaactgcatgccctctggctgaggatattccctgaggccatgagagctcaggacaggaggagtccgtcagtggaccgaaagaactgtctcctcgttgcttgtattgcactgcgtcttggggctcctgatagtaaccttccatctttggacctcagctgccttttctatacacccttccaggtgtgacacctgtggaaaatgtca

SEQ ID NO: 379734 - DNA, 441 bp, Homo sapiens
tggtctcgaactcctgacctcaggtaatccaccgcctcatcctcccaaaatgcattatctcttcccaaaatgcattatctatttcattaagaaaaaggagaaagcaaccatgctaagcttcaaataaaagcatgtgagcacacctgatgacgctagacccactggaatctcgcataactcatcctgaacgtgttgggaatcaagtctctcaggattagccctggtaatctgaaagtcaccagtcatcaagaagtggcatctctaccatgtggtgcaatcatagccctgaactcaaatttctgtctgatatatttgatgtgatccctccttttatacccttttaacttctgcttggagagacccactgaccttgtagctgactgtcagaacttttccttgccaggccagcaataaatttggcattgttttggacattgattt

SEQ ID NO: 379735 - DNA, 552 bp, Homo sapiens
cttcatttctgatgctgttctcgccttaaaaccaggtcctagcagagctgtgcatcgcccacaggcggtggccctgctactagcgttaaaggtgagtcacgtttgcctgatcctgggcccctctgtctcagtagtccattcctggtatttattcccctggatcccataactagtggagaaggacaaggactcctatgtagatatgaggtgatttcagaacttccttcaacctactactaaggtacagtagtccatggtttcactttctgccatttcagttacccttggtcaactatagtctgaaaataggcaagtatagtacaataaggtattttaagagagaccacattcacataacttttattacagtatattgttataactgttctatttttattgttcatttcttattgtgtctaattcttaaattaaactggccaggggcagtggcttatgtctgtaatcccagcactttgggagggttgctagaggccaggacttccacaccagcctgggcaacaaagcaagaccctgtcgctacaaaaaaaaaga

SEQ ID NO: 379736 - DNA, 930 bp, Homo sapiens
atgttcagtcctgcagataacatctttataatcctaataactggagaattcatactaggaatattggggaatggatacattgcactagtcaactggattgactggattaagaagaaaaagatttccacagttgactacatccttaccaatttagttatcgccagaatttgtttgatcagtgtaatggttgtaaatggcattgtaatagtactgaacccagatgtttatacaaaaaataaacaacagatagtcatttttaccttctggacatttgccaactacttaaatatgtggattaccacctgccttaatgtcttctattttctgaagatagccagttcctctcatccactttttctctggctgaagtggaaaattgatatggtggtgcactggatcctgctgggatgctttgccatttccttgttggtcagccttatagcagcaatagtactgagttgtgattataggtttcatgcaattgccaaacataaaagaaacattactgaaatgttccatgtgagtaaaataccatactttgaacccttgactctctttaacctgtttgcaattgtcccatttattgtgtcactgatatcatttttccttttagtaagatctttatggagacataccaagcaaataaaactctatgctaccggcagtagagaccccagcacagaagttcatgtgagagccattaaaactatgacttcatttatcttcttttttttcctatactatatttcttctattttgatgacctttagctatcttatgacaaaatacaagttagctgtggagtttggagagattgcagcaattctctaccccttgggtcactcacttattttaattgttttaaataataaactgaggcagacatttgtcagaatgctgacatgtagaaaaattgcctgcatgatatga

SEQ ID NO: 379737 - DNA, 384 bp, Homo sapiens
ttgagtgttctcttatttacaactgaagttgataagatggtattaaaagtgagattcctagtaagtaaacttaaaggcctgaaggaccagtgattaatgggaagtgctaataagtcatatttgaggttatccaacccgagattctgatttaattggtttaaggatactatcaccttgtgggttagatttgaaaaataataattgctttaaggaaggaacctgttggtatttaaacaaaaaactttccttcctgattcttacatgccgtcacttagacaaatctctggtctacatggctggatctctttctgctagttaaattctgtgctaccctgtgaaaaagaactgagattaataaaacggtagtgagaacacagggaaaga

SEQ ID NO: 379738 - DNA, 564 bp, Homo sapiens
tacaatagcatgttaatatttatgctctaatattacttaaaaaccagaatattaggctgggtgtggtggctcatgcctgtaatcccagcactttgagaggctgaggcaggtggattgtctgaggtcaggagtttgaaaccagcctggccaaaatggtgaaaccctgtctcttctaaaaatacaaaaattagccagctgtggtggcaggtgcttgtaatcacagctactcaggaggctgaggcaggagaattgcttgaacctgggaggtggaggttgcaatgagatgagatccagccactgcactgcagcctgggcaacagagtgagactccatctcaaaaaaaaaatcagaatattaaattacatgtattgaaatatatgtaatcacagcacatataggaaaattaatggaaggaaagactccattatatattccattgcactatttttttcctgtgcatactaatagcatcaattagtacagtggtttttcgcaaaatttccagatggtgattatatgaaaaatttaaaaaatttactcgtattcatcctcaaacttaaaaaa

SEQ ID NO: 379739 - DNA, 460 bp, Homo sapiens
taagcaaagtttatgtacttctgaaataccacccaggttcattccagggaatgtagtttggttgcgattctacttggaactgtagacacacatgtcccatcaaacaaccttctcaaacaagtgagagcctaactcagactccggcgtgggctgccggggcccacggatgcaccaaagaaacatgcagctgggcatagccatgtcctctaaagagtctttcttgactttaaaacaccatcatagagacctgccctctcccacggccatgccagagctctgccctagtccaaacaatccagccagagctctatcagctccaaaatgggcaattcagacccaagtcataaacctctgtaaacagacttttcagtggaattgctgcccttttaactcttgcttctctgcatatattttattttatttatttattttgcgacagtctcactctgttgtccaggca

SEQ ID NO: 379740 - DNA, 152 bp, Homo sapiens
gtcacctggctctcccatgctccgctgtggctattttaaacccttccaatccttcacaccctctgaccttccttccggcatactcatccccagcagatgattttgcctcctgctttacagggaaaacagaagctgccaagaaactccctcag

SEQ ID NO: 379741 - DNA, 444 bp, Homo sapiens
gaatgagagtcaaagtgtttcatggtttttaaatgtttatatctagtaatcaatcttctaggaatctatcctaaggaaacaatcgcagagaaagaaaagcaaaactatccacagagatattcattgtcaggttatttagaatattgaaaaactggaaactatctggccaggcgcagtggctcacgcctgtgatcccagaactttggaaggctgaggtgggtggatcacaaggtcaggagttcaagaccagcctgaccaatatggtgaaaccctgtctctactaaaaatgcaaaaattagacgggcatggtggcacgtgcctgtagtcccagctactcaggaggctgagggaggagaatcgcttgaacctgggaggtggaggttgcagtgaaccaagatcacaccactgcactccagcctgggcgacagagccagactccatctc

SEQ ID NO: 379742 - DNA, 987 bp, Homo sapiens
  misc_feature (14)..(15): n is a, c, g, or t
gtctcgctgcaggnntggccttcacttttctgcgtcctcttactcctagaggcccagcctctgtggcgctgtgatctggttatcgggagattcacagctaagacgccaggatcccccggaagcctagaaatgggaccactgacatttatggatgtggccatagagttctctttggaggagtggcagtgcctggacactgcacagcggaatgtatataggcatgtgatgttagagaactacagaaacctggttttcttggccagacctgattacctgtctggaacaaggaaaagagccctggaatatgaagagacatgagatggtggtagcccactctgtgttctcgttttgcccaagacctttggctagagcagcatgttctttccacaaaagtgacactgagcagatatggaaaatatggacatacgacttacagctataagacaaggctgtacacagtgtggatgagtgtcacggcaacaccaaggcaggttataatggcacttaaccaatgtccgacacttaccacaagcaaccactatttcaactgtcaactcacctatgtaaacagtcatgcactaactttccacaacttctcaaatagacacacagcatccagacatactgactacatcacaccctcccagcatgctcaccgacctgtgacgaaatcactttgcatgctttcacgcctaactcagccctcgcagccattcatactcgacagacatactaccaatgtgacagagtgaagtaaaacacctttcaaattggttcacaaaaacacttccctaaaccctacgaaaatttacattacttaccctacactaacccctaccaaaatgttgaccgatataccttcacataccatttaaacctattctctatcaatcccttcacactatacacgtaacaatatcgacacttgccccacaaaacccccactacacctccctcacctgcacaaacaccattcaacacttattc

SEQ ID NO: 379743 - DNA, 913 bp, Homo sapiens
  misc_feature (14)..(15): n is a, c, g, or t
gtctcgctgcaggnntggccttcacttttctgcgtcctcttactcctagaggcccagcctctgtggcgctgtgatctggttatcgggagattcacagctaagacgccaggatcccccggaagcctagaaatgggaccactgacatttatggatgtggccatagagttctctttggaggagtggcagtgcctggacactgcacagcggaatgtatataggcatgtgatgttagagaactacagaaacctggttttcttggctctgtgttctcgttttgcccaagacctttggctagagcagcatgttctttccacaaaagtgacactgagcagatatggaaaatatggacatacgacttacagctataagacaaggctgtacacagtgtggatgagtgtcacggcaacaccaaggcaggttataatggcacttaaccaatgtccgacacttaccacaagcaaccactatttcaactgtcaactcacctatgtaaacagtcatgcactaactttccacaacttctcaaatagacacacagcatccagacatactgactacatcacaccctcccagcatgctcaccgacctgtgacgaaatcactttgcatgctttcacgcctaactcagccctcgcagccattcatactcgacagacatactaccaatgtgacagagtgaagtaaaacacctttcaaattggttcacaaaaacacttccctaaaccctacgaaaatttacattacttaccctacactaacccctaccaaaatgttgaccgatataccttcacataccatttaaacctattctctatcaatcccttcacactatacacgtaacaatatcgacacttgccccacaaaacccccactacacctccctcacctgcacaaacaccattcaacacttattc

SEQ ID NO: 379744 - DNA, 540 bp, Homo sapiens
gagacagggtcttgctccatcacccaggccagagtgcagtggcacaatcacagctcactgtggacccaatctcctggactcaagggatcttcctgcctcagcctcctgagtagctgggactataggtgtgcaccaccatgcccagctagtttttgtatttttaataaagatgaggtttcaccatgttgcccaggctgttctcaaattcctggactccagtaatcctcttgtctcagcctcctaaaatgctgcgattataggaatgagccaccatgcctcgccattgtagtgttattcttaatgatgttaaaatgttcctatctttgaccactgaaagcctctctaagttagctcctgggtcctcctaatatgaccttgggtgtcttcactatcttctttgttatgtgtatgacaagatattccaagcttatcttgtgcattttttctctgtagcactggaatcaaccaagatagagtatgagagaaggatcaagggtaagttgtgttctcagggcactgccaagtttcatttaaagcaaa

SEQ ID NO: 379745 - DNA, 376 bp, Homo sapiens
agaaatgacttcggcagttatttcttaagagttaaaaatctataatttttacctgtcatctaggtaggccagttgaagggttgaatgatgaagatagaagagaagtgatagatgcataaaatggttggaagtggcagtttccctccttgaaagaaggcagatattaattcttttatgaacctagctttctttatgcactaactcttggactgtctcttggcaccaaaccttcccgaggtaatgaaacagcatgctggcggacccagggcaccagagcaaggtcagggctgtgaccactttcaaaagattttccaggaaattattctattgaataatgtttaagtttccacagaagctataagcagagtgtgctgca

SEQ ID NO: 379746 - DNA, 273 bp, Homo sapiens
ttagttgtaataaaacatttgttatactacggggatgagaacactaataggaggactcaggaagtttatgaccttgagcgatactgtattttctttaaaagaaacctcactccccatgggctgctaagcagactcgtgtagctaaacaaggcctatttatagaatgcttttagacgtggatgtactaaccgatgttgcttttctgtcctagcatttttgttttaattcctttgagttacttccttatgcatattttactttaacaggaagagg

SEQ ID NO: 379747 - DNA, 3853 bp, Homo sapiens
  misc_feature (2107)..(2107): n is a, c, g, or t
  misc_feature (2394)..(2394): n is a, c, g, or t
  misc_feature (2761)..(2761): n is a, c, g, or t
  misc_feature (2999)..(2999): n is a, c, g, or t
gtggatctaccattctggggtctggaggaccatggtcctcttctcagagctcccctagggagtgccccagtggggactctgtgtggcggcttatatctcacatttcccctttgcactgccctagcagaggttctccatgagagcttcgcccctgcagcagacttctgcctggatatccaggtgtttctgtacatcctctgaaatctaggcagaggtttccaaacctcaactcttgacttttgtgcactggtaggcccaacaccatgtgtaagccaccaaggcttgcaccctctgaggcaatggtctgaactgtaccttggccccttttagccacaactggtactggaacagctgggacacagggcaccaagtcccagtgatggcagctgcagcccatctggagcagctgctgcaaagatgctggctgcagttgggaaggcacagccggacctgcttgctctgcagagccagcgggacccaggaacaggcaggagcccttctcccttccgagttggtgcggagggagccccatgctcctgggtgcaattgcagccacccagctgtggactagggcattcctatgctctcgggggcccaggatgcctctcttcccccacatgctcagaagtgcctgctcctactgcttggcctctccccattcccagtgcccactctgactttggagaaaagctgtggccaagcccgggcactgacatgacctggccaggtgtgtgtgtgcttgaggagatgctgacacaccagccccctgccacctcagctccctctggactttgggcgctgatgaacgtgggagggaggccaagggcagggctgagggtgactcaacgtggtactgcaggcgtccctcagctaaaacagtctgggcaccatgaacagcagtgggagggagacaggctcctgggaggaaagggacaggtccctgctgaaaccccaccttcaagccagggatagcctgaagcctagggtccaggctgccagttccactgactggagtgaaaacttacagtgaattttccaggcccacccatggccacccatgggccaatcagcacacacttcctcccctctgaagcccataaaaaccgcaaactcagccagactctggcagatgataggacgacctgcctgcaggtaagagctacccacttgggtctcctctccactgaggactgcacactcgacaaaatgacctgcctgcagagaggaggtacccactccgggtctcttctctgctgagagctgcagttgtcgggaggaactgcctgcagaaagcagctacccatgacaggtctcctgagagctactcttttgctcaataaagcaccttgttcaccctccagttgtccatgtagctcattcttcctggacacagtacaggaactctggacctgccaaatggcaggaccaaacaagctgtaacacaaactgtgtcaaatacaccctgctgctcgccatgttgtgggtgacgatgaggagacaagagaggagagaagagctgcagcccttcagggagcctggacttaggagctccccaagccagggctgtgacatcctctttgtggctctgcagttgccggcatctccaagtttctgggtgccaccatgttccacagtgcttgtagtgggagccacttgtggtacacctgttccagccacagcaaggagccggcgcccatactggcacctggacctgcctgccccgccacagccaccatgcctggctgtgcacactgtaccccgcgctcgctcactcatgcaccccttgctgctctgcacctggcttgccgttggcagccgtgggatctgggccagtagtgaaaaccaagcacagcctgctgggtcaagtgggcagaacaagcccagtgggcctgagcaaaacttgggcaaaggcaacacttgccacagaggtttctggctggtgaagcgacaccctaaggatcctgtgataccgaggctgcacacagcagcagggccctgggcccactccactaaaacatttttctctcctaggcctccaggcctgtgatggggctctcttcattaatgcacctgtttggccctgccaaacggagggactgctgccaanatctctgacatgtcctggagacattttacccatagtcttggcaattaacatttgagtcttttttacttaagcaaatttctgcagctagcttgaatccctccccagaaaataggtttttcctttctactccatggtaaggctgcaaattttccaaacttttacgctccgcttcatctctctcaagttcaaagcttcacaaatctctaggacaggggcaaaacactgccagtctctttgctaaagcatagcaagagtcaccttcactccagtttccgacaagttcctcntctccatctgagaccaccttggcctgcacttctttgtccataccactagcagaattttggtcaaaaccattcaacaagtctctaggaagttccaaactttcccacatcttcctgtcttcttctgagccctccaaactgttccaatctctgcctgttattcagttccaaagtcacttccacattgttgggtatctttacagcagtgcccactaccttggtaccaattctctgtgttagtcccttttcacagtgttataaagaaatacccaagagtggctaatttataaagaaaagagatttaattgactcacagttctgcatggctggagaggcctcaggaaacttacaaatatggcaggaagggaancaagcacgttttacatggcagcaggcgagagggagtaagaacagagaatactgccttataaaaccatcagatattgggagaattcactatcacgaaaacagcatgggggaaaccactcccacgatccaatcacctcccaccaggtctctccctcaacacctggggattacaattcaagatgagatttgggtgtggacacaaagcctaaccataacagaatattaaaagaatgtagggnaccctttaaaaaggtgtataagcaccactacaactgctctcaatactacagcctttcattattttaagtgagaagcatttagactcatcacaactaaaaaagtttgatgacctcataccagtttccccatcatttctctacgtagttttttccatgtatcccagacttcatatctatgaatcctatagtcagcatccctgcaattttaaagacagcccaacttcaaagtacttataaccttgtacaatcatttcagctactagaaatacacagaaaattaaaattgacttaactaaatgtaatgaaattttaaaatgtatgctaacctattctccctaaagtgacaccaagtgcttcaataatctctgacaatttaactgcattagagccaactggttttatcattgtcagtgggtgtttcgatgcagtctctttgctgcatcactcaaatatgtgatgaagagccatatcacctcccaactgttcacagatttggaaataagataactaaacctcacaattcacatcaaagaatacagaatattcacatcctatctcatttcacaaagggtttggcacctaattcaaaagaaaatcttgtccgggatatccaaaataggttcttacattccattttatgtataaatatggtcagttcaggtttacttgtcactgggggaggatctaaaatcatttccattttcttgtacataaagcagtgtcttgaatctgactttttaatcacaatggacataaagtatttcttacccaagagaaaatttagttcatctgtcattgagggagaaacaaactgattaagtgtgatgtggcggctccctcaattaagcagttcc

SEQ ID NO: 379748 - DNA, 814 bp, Homo sapiens
atctttctactccagtttgcctatcaggcttctcatttttcacttcacttagtttaacttcagtgctatccaaagtgtccagtccacaaactaactgctcagtccatgacagaaaaggaatttgtaccatagtgtgccttaactgtggcattaagcccagtttagtttagtttacacttttttcctagcaattattattatatgatttatgtttgccgccagctccttatctcgttatgaataggtaacaagcagttcacagtctggcaccatacttcaagtagcactggcttaaatggaaccctctctgggcaaaactaaggagttagtcagatgttctgtgctccataacacctcttttatttttcagtatattttagaatttatcacattgtactttaagtatttctggctgtcttattaaagaggccaaactttttttgcaggcggtgggagatactcctccttgaggagcacagctaccccataggcagtgtgctcagaatagcctgaactaccatctctgagagtccagaaattcagaaattttgtcttgttcttctttataccttagtagacatttgaggtgtgttcgtttgtttgttttgttttttcatgtaataggttctgaaccaacatttgttgaaaaaatgaatggaagcctgaaatataaataaggcttttagtaaaaaaaaaaaaaaaaaaaaaaacttataattatttcattatatgtactcaagctcgtcatacattctttaatgtgttctaaagatttgcctttaaactttaaatgtaagtatttttaaatgtattt

SEQ ID NO: 379749 - DNA, 282 bp, Homo sapiens
agctgctttttaattcttctcacttcacagagaaaagaaatgctaaggcaggagctccctcaacttcctgtcctcatcattatgccctagaatttctctacagacttcccatccttactgtcctcctgtctgtcttagggaaggagatgcacgttcatgtcaagctcaagctacccatcccctaaggggttgtgttccttctaccacttcctccttcctataccttcaacttttccattcatcagggatctggataacttctcaatggatccagctactccc

SEQ ID NO: 379750 - DNA, 184 bp, Homo sapiens
taccaactacatatcttctttgaggaagtgttaagatacaattatttgggcttctagttcaacatacaaatagtgtagccctcaaaaaattcagtttcagatcttaaagatttcattttctttttacttggtctcagtggaaactctcaatttctgtctgttccatctattacgtaagattttt

SEQ ID NO: 379751 - DNA, 339 bp, Homo sapiens
ggaccacaaggcgacagtccccgtatctctgctatcatgaagactggagtcacagcccagtttttcactgaggggggtgcttcatcagtgcacacctgatgaagttggaaggaaagttctatgccagggcatttgcctcctccaagtttcatcatcattcaccaaataagcataattgctccgtgtttaagaggtgctgggaacagaggcactgctggtaattgcctaatgggccagtgaaatgaggtgtgaggcacatcggtgtgaaaaaagcaatagccacaagtttattaacattgaaaattaaaataagctcggccccagccaggcagtccttgc

SEQ ID NO: 379752 - DNA, 396 bp, Homo sapiens
atgaatgaatggaatgaatgggtctgtgggatttagtgatctaaaaccactcggggatcacaagtgcaatgttagcagaattaagggaggaccacagtgggctggagagtgagcaggagagggagagagggaaggcaagacagcgtgtagggaaaaaagagatcagactgttactgtgtctatgtagaaaggaaagacataaaagactccattttgaaaaagacctgtactttgaacaattgctttgctgagatgttgttaatttgtagctttgccccagccactttgccccaaccttgagctcacaaaaacatgtgttgtatgaaatcaaggtctaagggatctagggctgtgcaggatgtgtcttgttaacaaaatgtttacaggcagtgtgct

SEQ ID NO: 379753 - DNA, 179 bp, Homo sapiens
cccaggctagagcacagtggtgcaatcacagctcactgtagccttaaactcctgggctcaagcgatcctcccacctcagcctactgagtagctgagaccataggcataagccactgtgcctggcttgaaactggcattacaaatgtaattaaacctgctctgtagccttacccactact

SEQ ID NO: 379754 - DNA, 393 bp, Homo sapiens
aggaattgaccggtagtttggaaataaccctgcagtgtattaagtttttaaaagctgagggcaagaagaggttatcaaaatagcccaggcctaaattagaaattttattttaaaggatattatactgtaagaatccacagaatttagcaatttctaatccttataatataaaaatatatatctttcattcaggataaaagtcagtggttggctgtgtgggactaagacaagggggacttatcaacatgcatgaccaatagtcaaaagaaccccaggagttgctaagtagaggttcattattagttatgaggggttctctacactctactaaacagatatcatctggtggatgaaacacaacagccaaggtctcaaggcactttgtaccacgag

SEQ ID NO: 379755 - DNA, 478 bp, Homo sapiens
ttgagatggagtctcgctcagtggcctaggctggagtgtagcggtgcgatctcggctcactgcaagctccgcctcccgggttcacgcccattcttctgcctcagcctcccgagtagctgggactataggtgcccaccaccacacctggctaatttttttttgaatttttagtagagacggggtttcactgtgttagccaggatggatggtctggatctcctgacctcgtgatccgcccgcctctgcctcccagagttctgggattagaggcgtgagcccctgcgcctgtccagaattcatattttttaaaggacttgaataatctgttattgctttgggctctcccagggtccccgtcctttttcatgctgttatttttgccttacggttttggtttttgactgtcttactgaatgtttttggctattctgttctccttttacaaatcagaagagaaccacagggaataaggacagtt

SEQ ID NO: 379756 - DNA, 2756 bp, Homo sapiens
  misc_feature (585)..(585): n is a, c, g, or t
cccagcgccccggaagtgatctgtggcggctgctgcagagccgccaggaggagggtggatctccccagagcaaagcgtcggagtcctcctcctccttctcctcctcctcctcctcctcctccagccgcccaggctcccccgccacccgtcagactcctccttcgaccgctcccggcgcggggccttccaggcgacaaggaccgagtaccctccggccggagccacgcagccgcggcttccggagccctcggggcggcggactggctcgcggtgcaggtaaagctccagatggctctggaacttatgaggaaagagttggaggacgccttgactcaggaggccaacgtggggaaaaagactgtcatttggaaggagaaagtggaaatgcagaggcagcgcttcagattggagtttgagaagcatcgtggctttctggcccaggaggagcaacggcagctgaggcggctggaggcggaggagcgagcgacgctgcagagactgcgggagagcaagagccggctggtccagcagagcaaggccctgaaggagctggcggatgagctgcaggagaggtgccagcgcccngccctgggtctgctggagggtgtgagaggagtcctgagcagaagtaaggctgtcacaaggctggaagcagagaacatccccatggaactgaagacagcatgctgcatccctgggaggagggagctcttaaggaagttccaagtggatgtaaagctggatcccgccacggcgcacccgagtctgctcttgaccgccgacctgcgcagtgtgcaggatggagaaccatggagggatgtccccaacaaccctgagcgatttgacacatggccctgcatcctgggtttgcagagcttctcatcagggaggcattactgggaggttctggtgggagaaggagcagagtggggtttaggggtctgtcaagacacactgccaagaaagggggaaaccacgccatctcctgagaatggggtctgggccctgtggctgctgaaagggaatgagtacatggtccttgcctccccatcagtgcctcttctccaactggaaagtcctcgctgcattgggattttcttggactatgaagccggtgaaatttcattctacaatgtcacagatggatcttatatctacacattcaaccaactcttctctggtcttcttcggccttactttttcatctgtgatgcaactcctcttatcttgccacccacgacaatagcagggtcaggaaattgggcatccagggatcatttagatcctgcttctgatgtaagagatgatcatctctaaaattctgttcccaagatgcagtcctagcgtagcgaacgttcctggagtggggtgaaggatatcaatatactaagttttaacagataccccatttaggtcagcacttgattcgttgttgctgtgaaatatgtccatgggacaaaagagggaatatgaaatatttgcatatgggaagattatagagcataataattttgtaaatggagcaatctcaacctctatttctagatcacattttcttgatgtcttccttcaaattaatgaccttggattacataaggatttctatgcattcattataatttgttattcctttcaatatccttgtatttcaaatcttccatataagaattagacatggcaattcttaaattgattcagaatggtctgatactattccagtatcacctccttaattctgtttctcctcgttttcctgattttccttctcattctctccttccccgctctgtctctctctccctgtcactctctctctctcgttccttattttttgtttcttacctcttactgtttaacctgttgcttccttctggattaatacatttagagccattcctttatatggtcacatttcctatgactttactcaattacttttaaaatcctttctattctgagactaatttttaagaattacaaagctcattcttctgaatctaatatcactaactcctagactttttccgttttctttggatacactttaagtaggaatttatcagaattttcattcaactcgttctttaatgcagatatttactagttataagaccttaaggctgggtgcaagtgtcacgcctgtaatcccagcactttgggaggctgaggcgggtggatcacaagctcaggagttcaagaccagcctggccaacatggtgaaaccctgtctctactaaaaaaaaaaaaaaaatagaaaaattagctgggcatggtggcaggagcctgtaatcccagctattctggaggtggagacaggagaattgcttgaaccctggaggcggaggttgcagtgagccaatatctcaccactgtactccagcccagtgcgagactccatctcaaaaaagaaaaaagacctcaaacaacacttctctctctcttttagctgcttgttatggttcctatacatggaacaattatactggcctcactgtgttatggtaaatatttaaggtcatatttgatattgctggtttgaattcagcttttccatttaaatacattataatgatgatgatgaaatcatgataatatttaacttatttttaaagtatattctgtacctttccaacaaaaaggttaaaagtcattgaaggctaaccttactggccttcttttggataaacgtggttttaaaaaataaataataaattttcggggggcacccaggggtgctcccgcctgtggaaaccccc

SEQ ID NO: 379757 - DNA, 581 bp, Homo sapiens
tccaccacattctttccgcagtggatgtaaagctggatcccgccacggcgcacccgagtctgctcttgaccgccgacctgcgcagtgtgcaggatggagaaccatggagggatgtccccaacaaccctgagcgatttgacacatggccctgcatcctgggtttgcagagcttctcatcagggaggcattactgggaggttctggtgggagaaggagcagagtggggtttaggggtctgtcaagacacactgccaagaaagggggaaaccacgccatctcctgagaatggggtctgggccctgtggctgctgaaagggaatgagtacatggtccttgcctccccatcagtgcctcttctccaactggaaagtcctcgctgcattgggattttcttggactatgaagccggtgaaatttcattctacaatgtcacagatggatcttatatctacacattcaaccaactcttctctggtcttcttcggccttactttttcatctgtgatgcaactcctcttatcttgccacccacgacaatagcagggtcaggaaattgggcatccagggatcatttagatcct

SEQ ID NO: 379758 - DNA, 1170 bp, Homo sapiens
ggaagcagactccagagggcctccctgttgtccagggccgttggctccctgagctctcctgtctcctttgggatgcgacttagggctagagtgttcttttcttcacacgttagccattccttacggctcttcacgttccacgcctagatgtgaagtgggacatagtcttccattgctggctgtccctgaggaaacagacatgagtcttggaggttctgaatgattttattgctaattatcacagtgacatagactagaacagaaattagaagcatagtaagattgccaaaatcagagaatcttgcaaagttctgtaattctaagtgttgttctagatttcctctagagaaggttattagaatctccattgcgtttctctttctccttctctttcccttgaggttaggaaacaggttaaaactcagagaactccaataataatggtttaaaaacatcaggggcttcctgtatctcctgtcaggaagccgaggaataagcaggctggggctggtgggcgtcaacatcccagttttgttctatctttctgtcccacctgcactgggatgtggcttctacactcgaatttgcttcttggtttcaagacagtggtgttctttccatagctgagcagattattttgagaggtgggtgatatgtgagagagaaatctggaaccttcttctgggtagatacaggataagatagatacagggtaaaatgttgagcactttgtacatgctttgagagcataatctttgtcatctgtttttttcccctagacaatatcaggttaccgtcaacattaatccatttaaaaggacatggactgttgccattaatacttttggattccatataacccttaacacaataacttctagaaaatgtgtgtgccgtagacacaaagaagggaacaatagacaccagggtatacttgagggtggagggtggcaggagggtgaagattgaaaagctgcctattgcgtgttatgctggtttcctgggtgacaaaattacctgtacaccacacccctgtgacacacaacttactcatgtaacaaacctgtgcatgtaccccttgaacctgaaataaaaattggaaagtaaaaaaaagtgtgtaaatatatttagttgaatcaaataataaagatgaatcattatgaattcaca

SEQ ID NO: 379759 - DNA, 1106 bp, Homo sapiens
ggaagcagactccagagggcctccctgttgtccagggccgttggctccctgagctctcctgtctcctttgggatgcgacttagggctagagtgttcttttcttcacacgttagccattccttacggctcttcacgttccacgcctagatgtgaagtgggacatagtcttccattgctggctgtccctgaggaaacagacatgagtcttggaggttctgaatgattttattgctaattatcacagtgacatagactagaacagaaattagaagcatagtaagattgccaaaatcagagaatcttgcaaagttctgtaattctaagtgttgttctagatttcctctagagaaggttattagaatctccattgcgtttctctttctccttctctttcccttgaggttaggaaacaggttaaaactcagagaactccaataataatggtttaaaaacatcaggggcttcctgtatctcctgtcaggaagccgaggaataagcaggctggggctggtgggcgtcaacatcccagttttgttctatctttctgtcccacctgcactgggatgtggcttctacactcgaatttgcttcttggtttcaagacagtggtgttctttccatagctgagcagattattttgagaggtgggtgatatgtgagagagaaatctggaaccttcttctgggtagatacaggataagatagatacagggtaaaatgttgagcactttgtacatgctttgagagcataatctttgtcatctgtttttttcccctagacaatatcaggttaccgtcaacattaatccatttaaaaggacatggactgttgccattaatacttttggattccatataacccttaacacaataacttctagaaaatgtgtgtgccgtagacacaaagaagggaacaatagacaccagggtatacttgagggtggagggtggcaggagggtgaagattgaaaagctgcctattgcgtgttatgctggtttcctgggtgacaaaattacctgtacaccacacccctgtgacacacaacttactcatgtaacaaacctgtgcatgtaccccttgaacctgaaataaaaattggaaagta

SEQ ID NO: 379760 - DNA, 4502 bp, Homo sapiens
ctgaggcagccgccctcgcgctgtgcaatttctggtctttcgttgcttctggtccaggctaataaagtttttctttctttaattttttttcttctagttttaacgggagaaattaactccccggggccgccgggttgactgcgctgcctgggccggaggtcttctccggccagggagcgctgtgggaaggggctcgagcggccagggccaggcgaggccgggggggcggggggttaggggaccgcggggctactcttgggagcgcccctgtccggctggctgcgcgccggttttaaatagcatctttcggacttgtcttcgcggccccagtccccgacctcggcgctgcctgggctcctgcagcctctccctaagtcttctccaaacgaccacctcacggattccttatggatcgcagctccaagaggaggcaggtgaagcctttggcagcttctctgctggaagctcttgattatgatagttcagatgacagtgattttaaagttggagatgcctcagattctgaagggagtggtaatggaagtgaagatgcttcaaaggacagtggagaaggttcctgtagtgattctgaagaaaatattttagaagaagaactgaatgaagatattaaagtaaaagaagaacaacttaaaaattctgcagaggaagaagtactatcatcagaaaaacaattaattaaaatggaaaagaaggaagaagaagaaaatggagaaagacctagaaagaaaagggagaaagagaaggaaaaagaaaaggaaaaggagaaagagaaggaaagagagaaggaaaaagaaaaagcaacagtatctgagaatgtggctgcttctgctgctgccaccacaccagccacaagtcctcctgctgttaacacatccccttctgttcccactacgacaaccgctacagaggaacaagtcagcgagccaaaaaaatggaaccttcgacgaaaccgaccacttctggattttgtgtccatggaagagctgaatgacatggatgactatgacagtgaggatgacaatgattggcgacctactgtagtaaagagaaaagggagatctgcatctcagaaagagggaagtgatggagacaatgaggatgatgaagatgagggaagcgggagtgatgaagacgagaatgatgaaggcaatgatgaagatcatagtagccctgccagtgaagggggttgcaagaagaagaagagtaaagttcttagcagaaacagtgctgatgatgaggaactgaccaatgatagcctgaccctatctcaaagcaagagtaatgaggactcgctgattcttgagaagagtcaaaactggagctctcaaaaaatggaccatattctgatttgctgtgtttgtctgggagataatagtgaggacgctgatgaaataattcagtgtgacaattgtggcattacagtccatgaaggttgttatggagttgatggagagagtgactctattatgagttcagcttctgaaaactccactgaaccttggttttgtgatgcctgtaaatgtggtgtttctcctagctgtgaactgtgtcctaatcaggatggaattttcaaggagacagatgctggaagatgggttcatattgtttgtgccctgtatgttcctggagtagcctttggagatattgacaaattacgaccagtaacactaacggaaatgaactattccaaatatggtgccaaggagtgtagcttttgtgaagaccctcgctttgctagaactggggtttgcattagctgtgatgcagggatgtgcagagcctatttccatgtgacctgtgctcaaaaggaaggtctgctttcagaggcagcggcggaagaggatatagcagatccattctttgcttattgtaagcaacatgcagataggttagacagaaagtggaagagaaaaaactacttggctctacagtcctattgtaaaatgtctttgcaagagagagagaagcaactatcaccagaagcacaggcaaggatcaatgcccggcttcagcagtatcgtgccaaagcagaactagctcgatctaccagaccccaggcctgggttccaagggaaaaattgcccagaccactcaccagcagtgcttcagctattcgtaaacttatgcggaaagcagaactcatggggatcagtacagatatctttccagtggacaattcagatactagttctagtgtggatggaaggagaaaacataagcaaccagctctcactgcagattttgtgaattattattttgagagaaatatgcgcatgattcaaattcaggaaaatatggctgaacaaaagaatataaaagataaattagagaatgaacaagaaaagcttcatgtagaatataataagctatgtgaatctttagaagaactacaaaacctgaatggaaaacttcgaagtgaaggacaaggaatatgggctttactaggcagaatcacagggcagaagttgaatataccggcaattttgcgagcacccaaggagagaaaaccaagtaaaaaagaaggaggcacacaaaagacatctactcttcctgcagtactttatagttgtgggatttgtaagaagaaccatgatcagcatcttcttttattgtgtgatacctgtaaactacattaccatcttggatgtctggatcctcctcttacaaggatgccaagaaagaccaaaaacagttattggcagtgctcggaatgtgaccaggcagggagcagtgacatggaagcagatatggccatggaaaccctaccagatggaaccaaacgatcaaggaggcagattaaggaaccagtgaaatttgttccacaggatgtgccaccagaacccaagaagattccgataagaaacacgagaaccagaggacgaaaacgaagcttcgttcctgaggaagaaaaacatgaggaaagagttcctagagagagaagacaaagacagtctgtgttgcaaaagaagcccaaggctgaagatttaagaactgaatgtgcaacttgcaagggaactggagacaatgaaaatcttgtcagatacccttcatgagacccaactctgccacagctcatcctcggaggcaatcccggaaacctcttttataagtgtgattttaaaaatgtggattaaactctcgatagagtacataaagtaaaggagaacagctatattgtcctttctataagcttgtcactgcaaaaagttgccttttgcttgtcaggtttggatagaatataattgattggtttgttacttggactaacaaggcagtagatttgcctgtgtggaattttttttcctatttttcttctttttgctttttttgcacttatcagaaatatttgatgtgtgcattgttgaaaaatactggatacatgtcttgtcagaattgtcgtattaagtaatgtctttccctcttgcttctttggcaaatgttgatacacagtgtttggacttactgaagagttactgaagcctgtgggacttaataaatacaatatgctactccctgttgtgattgaacaatacaaataacaaacaagaaagacaatgcattccattagtctgctattctgtttccttcaacttcatacatagattcatatatgaagtactgcattgtaaaacaactatagactcatattaaatgttatttctatttataatattcagcaaaagtgaaagacttgtgaagcatatgacattctatttttgacttattagtcctagtgtgaaagcattaatattattagcatgaaatttttacttcagattttaagctcatgaataaagatatatctgtgttgatctctagatatttttagtaatacccaaatatattcagtccttattgttttaatataagctttctgtgttcagtataattttatttttctcaaccttaaatatgaacttaggaaataaggagggaagtacaaagattattgactatacaacctaccagctgaaagaaagatcttcatcaacatctgtatctttccagaggtatacagaattaaaatttgatcttcaagctttaatgatccagttttaagtcaacggcagaagtatgttgaatatttcatcactcaatcttgaactgatttagaagagactctttgctgaaattgaattgcacttatacatgtaaattgtcaacatgtaatttggaattttctgattaataaatgtggttttggacatcttttcgggtatagtgacaatggaaaatagtttaaactttaggaatagagtaggtaatgttatagataatcaaaagcaattgtaattgtaaagctgctgtaatctagtgatctctagttacagtgaggaacgctatgattggatgagatgtttgataaaagtaaaatgtgtatgaaattacatataaacagattattagcttattgaaagatctcataacattggaggaaaaatattcataatctttagcaaaactagtagacttttgtttaa

SEQ ID NO: 379761 - DNA, 553 bp, Homo sapiens
gtaaatcctcatatccacagatataaaattataccgtgtccataatcggtccagctactataagcgagaaaactggactgtgtgctttaagaaacatatgtactaacatgattcatattatcacagatctacataagaaacccatggcacatcaggtaaatgatagttgtttatcacacagtagggaaaggaagaaacatgaaattgaattgcacttatacatgtaaattgtcaacatgtaatttggaattttctgattaataaatgtggttttggacatcttttcgggtatagtgacaatggaaaatagtttaaactttaggaatagagtaggtaatgttatagataatcaaaagcaattgtaattgtaaagctgctgtaatctagtgatctctagttacagtgaggaacgctatgattggatgagatgtttgataaaagtaaaatgtgtatgaaattacatataaacagattattagcttattgaaagatctcataacattggaggaaaaatattcataatctttagcaaaactagtagacttttgtttaa

SEQ ID NO: 379762 - DNA, 3380 bp, Homo sapiens
ctgaggcagccgccctcgcgctgtgcaatttctggtctttcgttgcttctggtccaggctaataaagtttttctttctttaattttttttcttctagttttaacgggagaaattaactccccggggccgccgggttgactgcgctgcctgggccggaggtcttctccggccagggagcgctgtgggaaggggctcgagcggccagggccaggcgaggccgggggggcggggggttaggggaccgcggggctactcttgggagcgcccctgtccggctggctgcgcgccggttttaaatagcatctttcggacttgtcttcgcggccccagtccccgacctcggcgctgcctgggctcctgcagcctctccctaagtcttctccaaacgaccacctcacggattccttatggatcgcagctccaagaggaggcaggtgaagcctttggcagcttctctgctggaagctcttgattatgatagttcagatgacagtgattttaaagttggagatgcctcagattctgaagggagtggtaatggaagtgaagatgcttcaaaggacagtggagaaggttcctgtagtgattctgaagaaaatattttagaagaagaactgaatgaagatattaaagtaaaagaagaacaacttaaaaattctgcagaggaagaagtactatcatcagaaaaacaattaattaaaatggaaaagaaggaagaagaagaaaatggagaaagacctagaaagaaaagggagaaagagaaggaaaaagaaaaggaaaaggagaaagagaaggaaagagagaaggaaaaagaaaaagcaacagtatctgagaatgtggctgcttctgctgctgccaccacaccagccacaagtcctcctgctgttaacacatccccttctgttcccactacgacaaccgctacagaggaacaagtcagcgagccaaaaaaatggaaccttcgacgaaaccgaccacttctggattttgtgtccatggaagagctgaatgacatggatgactatgacagtgaggatgacaatgattggcgacctactgtagtaaagagaaaagggagatctgcatctcagaaagagggaagtgatggagacaatgaggatgatgaagatgagggaagcgggagtgatgaagacgagaatgatgaaggcaatgatgaagatcatagtagccctgccagtgaagggggttgcaagaagaagaagagtaaagttcttagcagaaacagtgctgatgatgaggaactgaccaatgatagcctgaccctatctcaaagcaagagtaatgaggactcgctgattcttgagaagagtcaaaactggagctctcaaaaaatggaccatattctgatttgctgtgtttgtctgggagataatagtgaggacgctgatgaaataattcagtgtgacaattgtggcattacagtccatgaagatgggttcatattgtttgtgccctgtatgttcctggagtagcctttggagatattgacaaattacgaccagtaacactaacggaaatgaactattccaaatatggtgccaaggagtgtagcttttgtgaagaccctcgctttgctagaactggggtttgcattagctgtgatgcagggatgtgcagagcctatttccatgtgacctgtgctcaaaaggaaggtctgctttcagaggcagcggcggaagaggatatagcagatccattctttgcttattgtaagcaacatgcagataggttagacagaaagtggaagagaaaaaactacttggctctacagtcctattgtaaaatgtctttgcaagagagagagaagcaactatcaccagaagcacaggcaaggatcaatgcccggcttcagcagtatcgtgccaaagcagaactagctcgatctaccagaccccaggcctgggttccaagggaaaaattgcccagaccactcaccagcagtgcttcagctattcgtaaacttatgcggaaagcagaactcatggggatcagtacagatatctttccagtggacaattcagatactagttctagtgtggatggaaggagaaaacataagcaaccagctctcactgcagattttgtgaattattattttgagagaaatatgcgcatgattcaaattcaggaaaatatggctgaacaaaagaatataaaagataaattagagaatgaacaagaaaagcttcatgtagaatataataagctatgtgaatctttagaagaactacaaaacctgaatggaaaacttcgaagtgaaggacaaggaatatgggctttactaggcagaatcacagggcagaagttgaatataccggcaattttgcgagcacccaaggagagaaaaccaagtaaaaaagaaggaggcacacaaaagacatctactcttcctgcagtactttatagttgtgggatttgtaagaagaaccatgatcagcatcttcttttattgtgtgatacctgtaaactacattaccatcttggatgtctggatcctcctcttacaaggatgccaagaaagaccaaaaacagttattggcagtgctcggaatgtgaccaggcagggagcagtgacatggaagcagatatggccatggaaaccctaccagatggaaccaaacgatcaaggaggcagattaaggaaccagtgaaatttgttccacaggatgtgccaccagaacccaagaagattccgataagaaacacggaaagagttcctagagagagaagacaaagacagtctgtgttgcaaaagaagcccaaggctgaagatttaagaactgaatgtgcaacttgcaagggaactggagacaatgaaaatcttgtcaggtgtgatgaatgcagactctgctaccattttggctgtttggatcctcctttgaaaaagtctcctaaacagacaggctacggatggatatgtcaggaatgtgattcttcatcttccaaggaagatgaaaatgaagctgaaagaaaaaatatatctcaggagctcaacatggaacagaaaaatccaaagaaataaaagattttctgtagtgtttttgaaaagtttgcagcttatgtaatagcagataaaatttctaattgtaaaatgttaaattgtaaaatctaatttgcaaaatgttctcaataaagtcattcaaaatgaaataggagcttgtatttggaattcgtatattttagagtaatttcgacttttttattcaaaagctggacctttaaaagtttttaaaaggagaaaaattcttaactcaaatttgagaacagagacagaatgttattttttttgtaacctaactgttaacacatttaaatgacctaaaaaaaaaacctctgaaagtcttttttcttcttactag

SEQ ID NO: 379763 - DNA, 2431 bp, Homo sapiens
tggtgctggggtgactctccggatcttaggcgttgtagtgaagggggttgcaagaagaagaagagtaaagttcttagcagaaacagtgctgatgatgaggaactgaccaatgatagcctgaccctatctcaaagcaagagtaatgaggactcgctgattcttgagaagagtcaaaactggagctctcaaaaaatggaccatattctgatttgctgtgtttgtctgggagataatagtgaggacgctgatgaaataattcagtgtgacaattgtggcattacagtccatgaaggttgttatggagttgatggagagagtgactctattatgagttcagcttctgaaaactccactgaaccttggttttgtgatgcctgtaaatgtggtgtttctcctagctgtgaactgtgtcctaatcaggatggaattttcaaggagacagatgctggaagatgggttcatattgtttgtgccctgtatgttcctggagtagcctttggagatattgacaaattacgaccagtaacactaacggaaatgaactattccaaatatggtgccaaggagtgtagcttttgtgaagaccctcgctttgctagaactggggtttgcattagctgtgatgcagggatgtgcagagcctatttccatgtgacctgtgctcaaaaggaaggtctgctttcagaggcagcggcggaagaggatatagcagatccattctttgcttattgtaagcaacatgcagataggttagacagaaagtggaagagaaaaaactacttggctctacagtcctattgtaaaatgtctttgcaagagagagagaagcaactatcaccagaagcacaggcaaggatcaatgcccggcttcagcagtatcgtgccaaagcagaactagctcgatctaccagaccccaggcctgggttccaagggaaaaattgcccagaccactcaccagcagtgcttcagctattcgtaaacttatgcggaaagcagaactcatggggatcagtacagatatctttccagtggacaattcagatactagttctagtgtggatggaaggagaaaacataagcaaccagctctcactgcagattttgtgaattattattttgagagaaatatgcgcatgattcaaattcaggaaaatatggctgaacaaaagaatataaaagataaattagagaatgaacaagaaaagcttcatgtagaatataataagctatgtgaatctttagaagaactacaaaacctgaatggaaaacttcgaagtgaaggacaaggaatatgggctttactaggcagaatcacagggcagaagttgaatataccggcaattttgcgagcacccaaggagagaaaaccaagtaaaaaagaaggaggcacacaaaagacatctactcttcctgcagtactttatagttgtgggatttgtaagaagaaccatgatcagcatcttcttttattgtgtgatacctgtaaactacattaccatcttggatgtctggatcctcctcttacaaggatgccaagaaagaccaaaaacagttattggcagtgctcggaatgtgaccaggcagggagcagtgacatggaagcagatatggccatggaaaccctaccagatggaaccaaacgatcaaggaggcagattaaggaaccagtgaaatttgttccacaggatgtgccaccagaacccaagaagattccgataagaaacacgagaaccagaggacgaaaacgaagcttcgttcctgaggaagaaaaacatgaggaaagagttcctagagagagaagacaaagacagtctgtgttgcaaaagaagcccaaggctgaagatttaagaactgaatgtgcaacttgcaagggaactggagacaatgaaaatcttgtcaggtgtgatgaatgcagactctgctaccattttggctgtttggatcctcctttgaaaaagtctcctaaacagacaggctacggatggatatgtcaggaatgtgattcttcatcttccaaggaagatgaaaatgaagctgaaagaaaaaatatatctcaggagctcaacatggaacagaaaaatccaaagaaataaaagattttctgtagtgtttttgaaaagtttgcagcttatgtaatagcagataaaatttctaattgtaaaatgttaaattgtaaaatctaatttgcaaaatgttctcaataaagtcattcaaaatgaaataggagcttgtatttggaattcgtatattttagagtaatttcgacttttttattcaaaagctggacctttaaaagtttttaaaaggagaaaaattcttaactcaaatttgagaacagagacagaatgttattttttttgtaacctaactgttaacacatttaaatgacctaaaaaaaaaacctctgaaagtcttttttcttcttactag

SEQ ID NO: 379764 - DNA, 3248 bp, Homo sapiens
ctgaggcagccgccctcgcgctgtgcaatttctggtctttcgttgcttctggtccaggctaataaagtttttctttctttaattttttttcttctagttttaacgggagaaattaactccccggggccgccgggttgactgcgctgcctgggccggaggtcttctccggccagggagcgctgtgggaaggggctcgagcggccagggccaggcgaggccgggggggcggggggttaggggaccgcggggctactcttgggagcgcccctgtccggctggctgcgcgccggttttaaatagcatctttcggacttgtcttcgcggccccagtccccgacctcggcgctgcctgggctcctgcagcctctccctaagtcttctccaaacgaccacctcacggattccttatggatcgcagctccaagaggaggcaggtgaagcctttggcagcttctctgctggaagctcttgattatgatagttcagatgacagtgattttaaagttggagatgcctcagattctgaagggagtggtaatggaagtgaagatgcttcaaaggacagtggagaaggttcctgtagtgattctgaagaaaatattttagaagaagaactgaatgaagatattaaagtaaaagaagaacaacttaaaaattctgcagaggaagaagtactatcatcagaaaaacaattaattaaaatggaaaagaaggaagaagaagaaaatggagaaagacctagaaagaaaagggagaaagagaaggaaaaagaaaaggaaaaggagaaagagaaggaaagagagaaggaaaaagaaaaagcaacagtatctgagaatgtggctgcttctgctgctgccaccacaccagccacaagtcctcctgctgttaacacatccccttctgttcccactacgacaaccgctacagaggaacaagtcagcgagccaaaaaaatggaaccttcgacgaaaccgaccacttctggattttgtgtccatggaagagctgaatgacatggatgactatgacagtgaggatgacaatgattggcgacctactgtagtaaagagaaaagggagatctgcatctcagaaagagggaagtgatggagacaatgaggatgatgaagatgagggaagcgggagtgatgaagacgagaatgatgaaggcaatgatgaagatcatagtagccctgccagtgaagggggttgcaagaagaagaagagtaaagttcttagcagaaacagtgctgatgatgaggaactgaccaatgatagcctgaccctatctcaaagcaagagtaatgaggactcgctgattcttgagaagagtcaaaactggagctctcaaaaaatggaccatattctgatttgctgtgtttgtctgggagataatagtgaggacgctgatgaaataattcagtgtgacaattgtggcattacagtccatgaagatgggttcatattgtttgtgccctgtatgttcctggagtagcctttggagatattgacaaattacgaccagtaacactaacggaaatgaactattccaaatatggtgccaaggagtgtagcttttgtgaagaccctcgctttgctagaactggggtttgcattagctgtgatgcagggatgtgcagagcctatttccatgtgacctgtgctcaaaaggaaggtctgctttcagaggcagcggcggaagaggatatagcagatccattctttgcttattgtaagcaacatgcagataggttagacagaaagtggaagagaaaaaactacttggctctacagtcctattgtaaaatgtctttgcaagagagagagaagcaactatcaccagaagcacaggcaaggatcaatgcccggcttcagcagtatcgtgccaaagcagaactagctcgatctaccagaccccaggcctgggttccaagggaaaaattgcccagaccactcaccagcagtgcttcagctattcgtaaacttatgcggaaagcagaactcatggggatcagtacagatatctttccagtggacaattcagatactagttctagtgtggatggaaggagaaaacataagcaaccagctctcactgcagattttgtgaattattattttgagagaaatatgcgcatgattcaaattcaggaaaatatggctgaacaaaagaatataaaagataaattagagaatgaacaagaaaagcttcatgtagaatataataagctatgtgaatctttagaagaactacaaaacctgaatggaaaacttcgaagtgaaggacaaggaatatgggctttactaggcagaatcacagggcagaagttgaatataccggcaattttgcgagcacccaaggagagaaaaccaagtaaaaaagaaggaggcacacaaaagacatctactcttcctgcagtactttatagttgtgggatttgtaagaagaaccatgatcagcatcttcttttattgtgtgatacctgtaaactacattaccatcttggatgtctggatcctcctcttacaaggatgccaagaaagaccaaaaacagttattggcagtgctcggaatgtgaccaggcagggagcagtgacatggaagcagatatggccatggaaaccctaccagatggaaccaaacgatcaaggaggcagattaaggaaccagtgaaatttgttccacaggatgtgccaccagaacccaagaagattccgataagaaacacgagaaccagaggacgaaaacgaagcttcgttcctgaggaagaaaaacatgaggaaagagttcctagagagagaagacaaagacagtctgtgttgcaaaagaagcccaaggctgaagatttaagaactgaatgtgcaacttgcaagggaactggagacaatgaaaatcttgtcaggtgtgatgaatgcagactctgctaccattttggctgtttggatcctcctttgaaaaagtctcctaaacagacaggctacggatggatatgtcaggaatgtgattcttcatcttccaaggaagatgaaaatgaagctgaaagaaaaaatatatctcaggagctcaacatggaacagaaaaatccaaagaaataaaagattttctgtagtgtttttgaaaagtttgcagcttatgtaatagcagataaaatttctaattgtaaaatgttaaattgtaaaatctaatttgcaaaatgttctcaataaagtcagtggcctcgttggcctcagcggtggagctctgcagccg

SEQ ID NO: 379765 - DNA, 3265 bp, Homo sapiens
  misc_feature (3212)..(3212): n is a, c, g, or t
  misc_feature (3231)..(3231): n is a, c, g, or t
ctgaggcagccgccctcgcgctgtgcaatttctggtctttcgttgcttctggtccaggctaataaagtttttctttctttaattttttttcttctagttttaacgggagaaattaactccccggggccgccgggttgactgcgctgcctgggccggaggtcttctccggccagggagcgctgtgggaaggggctcgagcggccagggccaggcgaggccgggggggcggggggttaggggaccgcggggctactcttgggagcgcccctgtccggctggctgcgcgccggttttaaatagcatctttcggacttgtcttcgcggccccagtccccgacctcggcgctgcctgggctcctgcagcctctccctaagtcttctccaaacgaccacctcacggattccttatggatcgcagctccaagaggaggcaggtgaagcctttggcagcttctctgctggaagctcttgattatgatagttcagatgacagtgattttaaagttggagatgcctcagattctgaagggagtggtaatggaagtgaagatgcttcaaaggacagtggagaaggttcctgtagtgattctgaagaaaatattttagaagaagaactgaatgaagatattaaagtaaaagaagaacaacttaaaaattctgcagaggaagaagtactatcatcagaaaaacaattaattaaaatggaaaagaaggaagaagaagaaaatggagaaagacctagaaagaaaagggagaaagagaaggaaaaagaaaaggaaaaggagaaagagaaggaaagagagaaggaaaaagaaaaagcaacagtatctgagaatgtggctgcttctgctgctgccaccacaccagccacaagtcctcctgctgttaacacatccccttctgttcccactacgacaaccgctacagaggaacaagtcagcgagccaaaaaaatggaaccttcgacgaaaccgaccacttctggattttgtgtccatggaagagctgaatgacatggatgactatgacagtgaggatgacaatgattggcgacctactgtagtaaagagaaaagggagatctgcatctcagaaagagggaagtgatggagacaatgaggatgatgaagatgagggaagcgggagtgatgaagacgagaatgatgaaggcaatgatgaagatcatagtagccctgccagtgaagggggttgcaagaagaagaagagtaaagttcttagcagaaacagtgctgatgatgaggaactgaccaatgatagcctgaccctatctcaaagcaagagtaatgaggactcgctgattcttgagaagagtcaaaactggagctctcaaaaaatggaccatattctgatttgctgtgtttgtctgggagataatagtgaggacgctgatgaaataattcagtgtgacaattgtggcattacagtccatgaagatgggttcatattgtttgtgccctgtatgttcctggagtagcctttggagatattgacaaattacgaccagtaacactaacggaaatgaactattccaaatatggtgccaaggagtgtagcttttgtgaagaccctcgctttgctagaactggggtttgcattagctgtgatgcagggatgtgcagagcctatttccatgtgacctgtgctcaaaaggaaggtctgctttcagaggcagcggcggaagaggatatagcagatccattctttgcttattgtaagcaacatgcagataggttagacagaaagtggaagagaaaaaactacttggctctacagtcctattgtaaaatgtctttgcaagagagagagaagcaactatcaccagaagcacaggcaaggatcaatgcccggcttcagcagtatcgtgccaaagcagaactagctcgatctaccagaccccaggcctgggttccaagggaaaaattgcccagaccactcaccagcagtgcttcagctattcgtaaacttatgcggaaagcagaactcatggggatcagtacagatatctttccagtggacaattcagatactagttctagtgtggatggaaggagaaaacataagcaaccagctctcactgcagattttgtgaattattattttgagagaaatatgcgcatgattcaaattcaggaaaatatggctgaacaaaagaatataaaagataaattagagaatgaacaagaaaagcttcatgtagaatataataagctatgtgaatctttagaagaactacaaaacctgaatggaaaacttcgaagtgaaggacaaggaatatgggctttactaggcagaatcacagggcagaagttgaatataccggcaattttgcgagcacccaaggagagaaaaccaagtaaaaaagaaggaggcacacaaaagacatctactcttcctgcagtactttatagttgtgggatttgtaagaagaaccatgatcagcatcttcttttattgtgtgatacctgtaaactacattaccatcttggatgtctggatcctcctcttacaaggatgccaagaaagaccaaaaacagttattggcagtgctcggaatgtgaccaggcagggagcagtgacatggaagcagatatggccatggaaaccctaccagatggaaccaaacgatcaaggaggcagattaaggaaccagtgaaatttgttccacaggatgtgccaccagaacccaagaagattccgataagaaacacgagaaccagaggacgaaaacgaagcttcgttcctgaggaagaaaaacatgaggaaagagttcctagagagagaagacaaagacagtctgtgttgcaaaagaagcccaaggctgaagatttaagaactgaatgtgcaacttgcaagggaactggagacaatgaaaatcttgtcaggtgtgatgaatgcagactctgctaccattttggctgtttggatcctcctttgaaaaagtctcctaaacagacaggctacggatggatatgtcaggaatgtgattcttcatcttccaaggaagatgaaaatgaagctgaaagaaaaaatatatctcaggagctcaacatggaacagaaaaatccaaagaaataaaagattttctgtagtgtttttgaaaagtttgcagcttatgtaatagcagataaaatttctaattgtaaaatgttaaattgtaaaatctaatttgcaaaatgttctcaataaagtcacnagaggcggccgaaattttnttttcccttcttttgacaccgccccccccccccc

SEQ ID NO: 379766 - DNA, 3262 bp, Homo sapiens
ctgaggcagccgccctcgcgctgtgcaatttctggtctttcgttgcttctggtccaggctaataaagtttttctttctttaattttttttcttctagttttaacgggagaaattaactccccggggccgccgggttgactgcgctgcctgggccggaggtcttctccggccagggagcgctgtgggaaggggctcgagcggccagggccaggcgaggccgggggggcggggggttaggggaccgcggggctactcttgggagcgcccctgtccggctggctgcgcgccggttttaaatagcatctttcggacttgtcttcgcggccccagtccccgacctcggcgctgcctgggctcctgcagcctctccctaagtcttctccaaacgaccacctcacggattccttatggatcgcagctccaagaggaggcaggtgaagcctttggcagcttctctgctggaagctcttgattatgatagttcagatgacagtgattttaaagttggagatgcctcagattctgaagggagtggtaatggaagtgaagatgcttcaaaggacagtggagaaggttcctgtagtgattctgaagaaaatattttagaagaagaactgaatgaagatattaaagtaaaagaagaacaacttaaaaattctgcagaggaagaagtactatcatcagaaaaacaattaattaaaatggaaaagaaggaagaagaagaaaatggagaaagacctagaaagaaaagggagaaagagaaggaaaaagaaaaggaaaaggagaaagagaaggaaagagagaaggaaaaagaaaaagcaacagtatctgagaatgtggctgcttctgctgctgccaccacaccagccacaagtcctcctgctgttaacacatccccttctgttcccactacgacaaccgctacagaggaacaagtcagcgagccaaaaaaatggaaccttcgacgaaaccgaccacttctggattttgtgtccatggaagagctgaatgacatggatgactatgacagtgaggatgacaatgattggcgacctactgtagtaaagagaaaagggagatctgcatctcagaaagagggaagtgatggagacaatgaggatgatgaagatgagggaagcgggagtgatgaagacgagaatgatgaaggcaatgatgaagatcatagtagccctgccagtgaagggggttgcaagaagaagaagagtaaagttcttagcagaaacagtgctgatgatgaggaactgaccaatgatagcctgaccctatctcaaagcaagagtaatgaggactcgctgattcttgagaagagtcaaaactggagctctcaaaaaatggaccatattctgatttgctgtgtttgtctgggagataatagtgaggacgctgatgaaataattcagtgtgacaattgtggcattacagtccatgaagatgggttcatattgtttgtgccctgtatgttcctggagtagcctttggagatattgacaaattacgaccagtaacactaacggaaatgaactattccaaatatggtgccaaggagtgtagcttttgtgaagaccctcgctttgctagaactggggtttgcattagctgtgatgcagggatgtgcagagcctatttccatgtgacctgtgctcaaaaggaaggtctgctttcagaggcagcggcggaagaggatatagcagatccattctttgcttattgtaagcaacatgcagataggttagacagaaagtggaagagaaaaaactacttggctctacagtcctattgtaaaatgtctttgcaagagagagagaagcaactatcaccagaagcacaggcaaggatcaatgcccggcttcagcagtatcgtgccaaagcagaactagctcgatctaccagaccccaggcctgggttccaagggaaaaattgcccagaccactcaccagcagtgcttcagctattcgtaaacttatgcggaaagcagaactcatggggatcagtacagatatctttccagtggacaattcagatactagttctagtgtggatggaaggagaaaacataagcaaccagctctcactgcagattttgtgaattattattttgagagaaatatgcgcatgattcaaattcaggaaaatatggctgaacaaaagaatataaaagataaattagagaatgaacaagaaaagcttcatgtagaatataataagctatgtgaatctttagaagaactacaaaacctgaatggaaaacttcgaagtgaaggacaaggaatatgggctttactaggcagaatcacagggcagaagttgaatataccggcaattttgcgagcacccaaggagagaaaaccaagtaaaaaagaaggaggcacacaaaagacatctactcttcctgcagtactttatagttgtgggatttgtaagaagaaccatgatcagcatcttcttttattgtgtgatacctgtaaactacattaccatcttggatgtctggatcctcctcttacaaggatgccaagaaagaccaaaaacagttattggcagtgctcggaatgtgaccaggcagggagcagtgacatggaagcagatatggccatggaaaccctaccagatggaaccaaacgatcaaggaggcagattaaggaaccagtgaaatttgttccacaggatgtgccaccagaacccaagaagattccgataagaaacacgagaaccagaggacgaaaacgaagcttcgttcctgaggaagaaaaacatgaggaaagagttcctagagagagaagacaaagacagtctgtgttgcaaaagaagcccaaggctgaagatttaagaactgaatgtgcaacttgcaagggaactggagacaatgaaaatcttgtcaggtgtgatgaatgcagactctgctaccattttggctgtttggatcctcctttgaaaaagtctcctaaacagacaggctacggatggatatgtcaggaatgtgattcttcatcttccaaggaagatgaaaatgaagctgaaagaaaaaatatatctcaggagctcaacatggaacagaaaaatccaaagaaataaaagattttctgtagtgtttttgaaaagtttgcagcttatgtaatagcagataaaatttctaattgtaaaatgttaaattgtaaaatctaatttgcaaaatgttctcaataaagtcatcctgatgcggccgaaccccgcgcaacccccacccctctcccaaacccaatc

SEQ ID NO: 379767 - DNA, 760 bp, Homo sapiens
ctagggagcataactttcgcatctcagtccttctccatttcctgaggcttcttcaggctctggtgtgtggtccaccctggagaatgtctcgctctcctctcgagaggaacgtggctgcggctctgcgtggaccgtttggcagaggctcatatgctggatccactggttggttcacggggttcattcctgtctgttgatcttctacctagtggctccatcactcattcaaggtgtgatgaatgcagactctgctaccattttggctgtttggatcctcctttgaaaaagtctcctaaacagacaggctacggatggatatgtcaggaatgtgattcttcatcttccaaggaagatgaaaatgaagctgaaagaaaaaatatatctcaggagctcaacatggaacagaaaaatccaaagaaataaaagattttctgtagtgtttttgaaaagtttgcagcttatgtaatagcagataaaatttctaattgtaaaatgttaaattgtaaaatctaatttgcaaaatgttctcaataaagtcattcaaaatgaaataggagcttgtatttggaattcgtatattttagagtaatttcgacttttttattcaaaagctggacctttaaaagtttttaaaaggagaaaaattcttaactcaaatttgagaacagagacagaatgttattttttttgtaacctaactgttaacacatttaaatgacctaaaaaaaaaacctctgaaagtcttttttcttcttactag

SEQ ID NO: 379768 - DNA, 4288 bp, Homo sapiens
ctgaggcagccgccctcgcgctgtgcaatttctggtctttcgttgcttctggtccaggctaataaagtttttctttctttaattttttttcttctagttttaacgggagaaattaactccccggggccgccgggttgactgcgctgcctgggccggaggtcttctccggccagggagcgctgtgggaaggggctcgagcggccagggccaggcgaggccgggggggcggggggttaggggaccgcggggctactcttgggagcgcccctgtccggctggctgcgcgccggttttaaatagcatctttcggacttgtcttcgcggccccagtccccgacctcggcgctgcctgggctcctgcagcctctccctaagtcttctccaaacgaccacctcacggattccttatggatcgcagctccaagaggaggcaggtgaagcctttggcagcttctctgctggaagctcttgattatgatagttcagatgacagtgattttaaagttggagatgcctcagattctgaagggagtggtaatggaagtgaagatgcttcaaaggacagtggagaaggttcctgtagtgattctgaagaaaatattttagaagaagaactgaatgaagatattaaagtaaaagaagaacaacttaaaaattctgcagaggaagaagtactatcatcagaaaaacaattaattaaaatggaaaagaaggaagaagaagaaaatggagaaagacctagaaagaaaagggagaaagagaaggaaaaagaaaaggaaaaggagaaagagaaggaaagagagaaggaaaaagaaaaagcaacagtatctgagaatgtggctgcttctgctgctgccaccacaccagccacaagtcctcctgctgttaacacatccccttctgttcccactacgacaaccgctacagaggaacaagtcagcgagccaaaaaaatggaaccttcgacgaaaccgaccacttctggattttgtgtccatggaagagctgaatgacatggatgactatgacagtgaggatgacaatgattggcgacctactgtagtaaagagaaaagggagatctgcatctcagaaagagggaagtgatggagacaatgaggatgatgaagatgagggaagcgggagtgatgaagacgagaatgatgaaggcaatgatgaagatcatagtagccctgccagtgaagggggttgcaagaagaagaagagtaaagttcttagcagaaacagtgctgatgatgaggaactgaccaatgatagcctgaccctatctcaaagcaagagtaatgaggactcgctgattcttgagaagagtcaaaactggagctctcaaaaaatggaccatattctgatttgctgtgtttgtctgggagataatagtgaggacgctgatgaaataattcagtgtgacaattgtggcattacagtccatgaagatgggttcatattgtttgtgccctgtatgttcctggagtagcctttggagatattgacaaattacgaccagtaacactaacggaaatgaactattccaaatatggtgccaaggagtgtagcttttgtgaagaccctcgctttgctagaactggggtttgcattagctgtgatgcagggatgtgcagagcctatttccatgtgacctgtgctcaaaaggaaggtctgctttcagaggcagcggcggaagaggatatagcagatccattctttgcttattgtaagcaacatgcagataggttagacagaaagtggaagagaaaaaactacttggctctacagtcctattgtaaaatgtctttgcaagagagagagaagcaactatcaccagaagcacaggcaaggatcaatgcccggcttcagcagtatcgtgccaaagcagaactagctcgatctaccagaccccaggcctgggttccaagggaaaaattgcccagaccactcaccagcagtgcttcagctattcgtaaacttatgcggaaagcagaactcatggggatcagtacagatatctttccagtggacaattcagatactagttctagtgtggatggaaggagaaaacataagcaaccagctctcactgcagattttgtgaattattattttgagagaaatatgcgcatgattcaaattcaggaaaatatggctgaacaaaagaatataaaagataaattagagaatgaacaagaaaagcttcatgtagaatataataagctatgtgaatctttagaagaactacaaaacctgaatggaaaacttcgaagtgaaggacaaggaatatgggctttactaggcagaatcacagggcagaagttgaatataccggcaattttgcgagcacccaaggagagaaaaccaagtaaaaaagaaggaggcacacaaaagacatctactcttcctgcagtactttatagttgtgggatttgtaagaagaaccatgatcagcatcttcttttattgtgtgatacctgtaaactacattaccatcttggatgtctggatcctcctcttacaaggatgccaagaaagaccaaaaacagttattggcagtgctcggaatgtgaccaggcagggagcagtgacatggaagcagatatggccatggaaaccctaccagatggaaccaaacgatcaaggaggcagattaaggaaccagtgaaatttgttccacaggatgtgccaccagaacccaagaagattccgataagaaacacgagaaccagaggacgaaaacgaagcttcgttcctgaggaagaaaaacatgaggaaagagttcctagagagagaagacaaagacagtctgtgttgcaaaagaagcccaaggctgaagatttaagaactgaatgtgcaacttgcaagggaactggagacaatgaaaatcttgtcagatacccttcatgagacccaactctgccacagctcatcctcggaggcaatcccggaaacctcttttataagtgtgattttaaaaatgtggattaaactctcgatagagtacataaagtaaaggagaacagctatattgtcctttctataagcttgtcactgcaaattggactaacaaggcagtagatttgcctgtgtggaattttttttcctatttttcttctttttgctttttttgcacttatcagaaatatttgatgtgtgcattgttgaaaaatactggatacatgtcttgtcagaattgtcgtattaagtaatgtctttccctcttgcttctttggcaaatgttgatacacagtgtttggacttactgaagagttactgaagcctgtgggacttaataaatacaatatgctactccctgttgtgattgaacaatacaaataacaaacaagaaagacaatgcattccattagtctgctattctgtttccttcaacttcatacatagattcatatatgaagtactgcattgtaaaacaactatagactcatattaaatgttatttctatttataatattcagcaaaagtgaaagacttgtgaagcatatgacattctatttttgacttattagtcctagtgtgaaagcattaatattattagcatgaaatttttacttcagattttaagctcatgaataaagatatatctgtgttgatctctagatatttttagtaatacccaaatatattcagtccttattgttttaatataagctttctgtgttcagtataattttatttttctcaaccttaaatatgaacttaggaaataaggagggaagtacaaagattattgactatacaacctaccagctgaaagaaagatcttcatcaacatctgtatctttccagaggtatacagaattaaaatttgatcttcaagctttaatgatccagttttaagtcaacggcagaagtatgttgaatatttcatcactcaatcttgaactgatttagaagagactctttgctgaaattgaattgcacttatacatgtaaattgtcaacatgtaatttggaattttctgattaataaatgtggttttggacatcttttcgggtatagtgacaatggaaaatagtttaaactttaggaatagagtaggtaatgttatagataatcaaaagcaattgtaattgtaaagctgctgtaatctagtgatctctagttacagtgaggaacgctatgattggatgagatgtttgataaaagtaaaatgtgtatgaaattacatataaacagattattagcttattgaaagatctcataacattggaggaaaaatattcataatctttagcaaaactagtagacttttgtttaa

SEQ ID NO: 379769 - DNA, 3230 bp, Homo sapiens
ctgaggcagccgccctcgcgctgtgcaatttctggtctttcgttgcttctggtccaggctaataaagtttttctttctttaattttttttcttctagttttaacgggagaaattaactccccggggccgccgggttgactgcgctgcctgggccggaggtcttctccggccagggagcgctgtgggaaggggctcgagcggccagggccaggcgaggccgggggggcggggggttaggggaccgcggggctactcttgggagcgcccctgtccggctggctgcgcgccggttttaaatagcatctttcggacttgtcttcgcggccccagtccccgacctcggcgctgcctgggctcctgcagcctctccctaagtcttctccaaacgaccacctcacggattccttatggatcgcagctccaagaggaggcaggtgaagcctttggcagcttctctgctggaagctcttgattatgatagttcagatgacagtgattttaaagttggagatgcctcagattctgaagggagtggtaatggaagtgaagatgcttcaaaggacagtggagaaggttcctgtagtgattctgaagaaaatattttagaagaagaactgaatgaagatattaaagtaaaagaagaacaacttaaaaattctgcagaggaagaagtactatcatcagaaaaacaattaattaaaatggaaaagaaggaagaagaagaaaatggagaaagacctagaaagaaaagggagaaagagaaggaaaaagaaaaggaaaaggagaaagagaaggaaagagagaaggaaaaagaaaaagcaacagtatctgagaatgtggctgcttctgctgctgccaccacaccagccacaagtcctcctgctgttaacacatccccttctgttcccactacgacaaccgctacagaggaacaagtcagcgagccaaaaaaatggaaccttcgacgaaaccgaccacttctggattttgtgtccatggaagagctgaatgacatggatgactatgacagtgaggatgacaatgattggcgacctactgtagtaaagagaaaagggagatctgcatctcagaaagagggaagtgatggagacaatgaggatgatgaagatgagggaagcgggagtgatgaagacgagaatgatgaaggcaatgatgaagatcatagtagccctgccagtgaagggggttgcaagaagaagaagagtaaagttcttagcagaaacagtgctgatgatgaggaactgaccaatgatagcctgaccctatctcaaagcaagagtaatgaggactcgctgattcttgagaagagtcaaaactggagctctcaaaaaatggaccatattctgatttgctgtgtttgtctgggagataatagtgaggacgctgatgaaataattcagtgtgacaattgtggcattacagtccatgaagatgggttcatattgtttgtgccctgtatgttcctggagtagcctttggagatattgacaaattacgaccagtaacactaacggaaatgaactattccaaatatggtgccaaggagtgtagcttttgtgaagaccctcgctttgctagaactggggtttgcattagctgtgatgcagggatgtgcagagcctatttccatgtgacctgtgctcaaaaggaaggtctgctttcagaggcagcggcggaagaggatatagcagatccattctttgcttattgtaagcaacatgcagataggttagacagaaagtggaagagaaaaaactacttggctctacagtcctattgtaaaatgtctttgcaagagagagagaagcaactatcaccagaagcacaggcaaggatcaatgcccggcttcagcagtatcgtgccaaagcagaactagctcgatctaccagaccccaggcctgggttccaagggaaaaattgcccagaccactcaccagcagtgcttcagctattcgtaaacttatgcggaaagcagaactcatggggatcagtacagatatctttccagtggacaattcagatactagttctagtgtggatggaaggagaaaacataagcaaccagctctcactgcagattttgtgaattattattttgagagaaatatgcgcatgattcaaattcaggaaaatatggctgaacaaaagaatataaaagataaattagagaatgaacaagaaaagcttcatgtagaatataataagctatgtgaatctttagaagaactacaaaacctgaatggaaaacttcgaagtgaaggacaaggaatatgggctttactaggcagaatcacagggcagaagttgaatataccggcaattttgcgagcacccaaggagagaaaaccaagtaaaaaagaaggaggcacacaaaagacatctactcttcctgcagtactttatagttgtgggatttgtaagaagaaccatgatcagcatcttcttttattgtgtgatacctgtaaactacattaccatcttggatgtctggatcctcctcttacaaggatgccaagaaagaccaaaaacagttattggcagtgctcggaatgtgaccaggcagggagcagtgacatggaagcagatatggccatggaaaccctaccagatggaaccaaacgatcaaggaggcagattaaggaaccagtgaaatttgttccacaggatgtgccaccagaacccaagaagattccgataagaaacacgagaaccagaggacgaaaacgaagcttcgttcctgaggaagaaaaacatgaggaaagagttcctagagagagaagacaaagacagtctgtgttgcaaaagaagcccaaggctgaagatttaagaactgaatgtgcaacttgcaagggaactggagacaatgaaaatcttgtcagacataatgctaatcagaaatcttagctgatgctgcacattggcttttcccaacggtccagaggctgctaattttagcggaaatgaagacattgatcaaagctctggtgagatgggggagtgagtgtgtgaacaaaaagagagctaatttaaaagaggcatcagactttcaaaggacagtgtcacaaaagttcttacagttcttacagggactttgtaagggaatccattcttatttctttaaaaaattgtcttctggtaaagccctgttaaattaactgaggacacagaaattaaacatttcaaaaagaataaacatattgataaaaca

SEQ ID NO: 379770 - DNA, 3326 bp, Homo sapiens
ctgaggcagccgccctcgcgctgtgcaatttctggtctttcgttgcttctggtccaggctaataaagtttttctttctttaattttttttcttctagttttaacgggagaaattaactccccggggccgccgggttgactgcgctgcctgggccggaggtcttctccggccagggagcgctgtgggaaggggctcgagcggccagggccaggcgaggccgggggggcggggggttaggggaccgcggggctactcttgggagcgcccctgtccggctggctgcgcgccggttttaaatagcatctttcggacttgtcttcgcggccccagtccccgacctcggcgctgcctgggctcctgcagcctctccctaagtcttctccaaacgaccacctcacggattccttatggatcgcagctccaagaggaggcaggtgaagcctttggcagcttctctgctggaagctcttgattatgatagttcagatgacagtgattttaaagttggagatgcctcagattctgaagggagtggtaatggaagtgaagatgcttcaaaggacagtggagaaggttcctgtagtgattctgaagaaaatattttagaagaagaactgaatgaagatattaaagtaaaagaagaacaacttaaaaattctgcagaggaagaagtactatcatcagaaaaacaattaattaaaatggaaaagaaggaagaagaagaaaatggagaaagacctagaaagaaaagggagaaagagaaggaaaaagaaaaggaaaaggagaaagagaaggaaagagagaaggaaaaagaaaaagcaacagtatctgagaatgtggctgcttctgctgctgccaccacaccagccacaagtcctcctgctgttaacacatccccttctgttcccactacgacaaccgctacagaggaacaagtcagcgagccaaaaaaatggaaccttcgacgaaaccgaccacttctggattttgtgtccatggaagagctgaatgacatggatgactatgacagtgaggatgacaatgattggcgacctactgtagtaaagagaaaagggagatctgcatctcagaaagagggaagtgatggagacaatgaggatgatgaagatgagggaagcgggagtgatgaagacgagaatgatgaaggcaatgatgaagatcatagtagccctgccagtgaagggggttgcaagaagaagaagagtaaagttcttagcagaaacagtgctgatgatgaggaactgaccaatgatagcctgaccctatctcaaagcaagagtaatgaggactcgctgattcttgagaagagtcaaaactggagctctcaaaaaatggaccatattctgatttgctgtgtttgtctgggagataatagtgaggacgctgatgaaataattcagtgtgacaattgtggcattacagtccatgaagatgggttcatattgtttgtgccctgtatgttcctggagtagcctttggagatattgacaaattacgaccagtaacactaacggaaatgaactattccaaatatggtgccaaggagtgtagcttttgtgaagaccctcgctttgctagaactggggtttgcattagctgtgatgcagggatgtgcagagcctatttccatgtgacctgtgctcaaaaggaaggtctgctttcagaggcagcggcggaagaggatatagcagatccattctttgcttattgtaagcaacatgcagataggttagacagaaagtggaagagaaaaaactacttggctctacagtcctattgtaaaatgtctttgcaagagagagagaagcaactatcaccagaagcacaggcaaggatcaatgcccggcttcagcagtatcgtgccaaagcagaactagctcgatctaccagaccccaggcctgggttccaagggaaaaattgcccagaccactcaccagcagtgcttcagctattcgtaaacttatgcggaaagcagaactcatggggatcagtacagatatctttccagtggacaattcagatactagttctagtgtggatggaaggagaaaacataagcaaccagctctcactgcagattttgtgaattattattttgagagaaatatgcgcatgattcaaattcaggaaaatatggctgaacaaaagaatataaaagataaattagagaatgaacaagaaaagcttcatgtagaatataataagctatgtgaatctttagaagaactacaaaacctgaatggaaaacttcgaagtgaaggacaaggaatatgggctttactaggcagaatcacagggcagaagttgaatataccggcaattttgcgagcacccaaggagagaaaaccaagtaaaaaagaaggaggcacacaaaagacatctactcttcctgcagtactttatagttgtgggatttgtaagaagaaccatgatcagcatcttcttttattgtgtgatacctgtaaactacattaccatcttggatgtctggatcctcctcttacaaggatgccaagaaagaccaaaaacagttattggcagtgctcggaatgtgaccaggcagggagcagtgacatggaagcagatatggccatggaaaccctaccagatggaaccaaacgatcaaggaggcagattaaggaaccagtgaaatttgttccacaggatgtgccaccagaacccaagaagattccgataagaaacacgagaaccagaggacgaaaacgaagcttcgttcctgaggaagaaaaacatgaggaaagagttcctagagagagaagacaaagacagtctgtgttgcaaaagaagcccaaggctgaagatttaagaactgaatgtgcaacttgcaagggaactggagacaatgaaaatcttgtcaggtgtgatgaatgcagactctgctaccattttggctgtttggatcctcctttgaaaaagtctcctaaacagacaggctacggatggatatgtcaggaatgtgattcttcatcttccaagtgactaggtctcattgtgttgtccaggctgatctcaagcccctggggtcaagtgattcttccgcctctgcctccgaaaatgctaggattataggcatgagccaccatgcccagccaattttttttatattgttccttatctatgatttatttaataaggaattaagtgacagatcacttcaagaaataatacatttttgactgtattattttgttttcattttggaaataatacatgtttattacagattatttggaaaatgcagaaaaataaaagataaagaaaataaaagtcatgacctaccttc

SEQ ID NO: 379771 - DNA, 1925 bp, Homo sapiens
ctgaggcagccgccctcgcgctgtgcaatttctggtctttcgttgcttctggtccaggctaataaagtttttctttctttaattttttttcttctagttttaacgggagaaattaactccccggggccgccgggttgactgcgctgcctgggccggaggtcttctccggccagggagcgctgtgggaaggggctcgagcggccagggccaggcgaggccgggggggcggggggttaggggaccgcggggctactcttgggagcgcccctgtccggctggctgcgcgccggttttaaatagcatctttcggacttgtcttcgcggccccagtccccgacctcggcgctgcctgggctcctgcagcctctccctaagtcttctccaaacgaccacctcacggattccttatggatcgcagctccaagaggaggcaggtgaagcctttggcagcttctctgctggaagctcttgattatgatagttcagatgacagtgattttaaagttggagatgcctcagattctgaagggagtggtaatggaagtgaagatgcttcaaaggacagtggagaaggttcctgtagtgattctgaagaaaatattttagaagaagaactgaatgaagatattaaagtaaaagaagaacaacttaaaaattctgcagaggaagaagtactatcatcagaaaaacaattaattaaaatggaaaagaaggaagaagaagaaaatggagaaagacctagaaagaaaagggagaaagagaaggaaaaagaaaaggaaaaggagaaagagaaggaaagagagaaggaaaaagaaaaagcaacagtatctgagaatgtggctgcttctgctgctgccaccacaccagccacaagtcctcctgctgttaacacatccccttctgttcccactacgacaaccgctacagaggaacaagtcagcgagccaaaaaaatggaaccttcgacgaaaccgaccacttctggattttgtgtccatggaagagctgaatgacatggatgactatgacagtgaggatgacaatgattggcgacctactgtagtaaagagaaaagggagatctgcatctcagaaagagggaagtgatggagacaatgaggatgatgaagatgagggaagcgggagtgatgaagacgagaatgatgaaggcaatgatgaagatcatagtagccctgccagtgaagggggttgcaagaagaagaagagtaaagttcttagcagaaacagtgctgatgatgaggaactgaccaatgatagcctgaccctatctcaaagcaagagtaatgaggactcgctgattcttgagaagagtcaaaactggagctctcaaaaaatggaccatattctgatttgctgtgtttgtctgggagataatagtgaggacgctgatgaaataattcagtgtgacaattgtggcattacagtccatgaaggttgttatggagttgatggagagagtgactctattatgagttcagcttctgaaaactccactgaaccttggttttgtgatgcctgtaaatgtggtgtttctcctagctgtgaactgtgtcctaatcaggatggaattttcaaggagacagatgctggaaggagactaccatctagggttggtgactaaaattaagagtaattttcaaccttttgtatttcgtggagatcacgctctgcctcttcctctccaatataagagggggggtgggtacttaaatttttattttgtcacataaggatgttttagtattttattaaacatgctttatattaaaaacaagattaacagcaaagcaacctatataaattatcaccatcatttcccatattttaacataaaaactagggtatattatgtcctaaaataaaggataggcttttaaatttaataaattttactttagtaaagtaa

SEQ ID NO: 379772 - DNA, 467 bp, Homo sapiens
  misc_feature (37)..(37): n is a, c, g, or t
tcttaaatatttatcccatcacactcgttattctgtngcatatttcgcgttctttgaagatgaaaatgaagctgaaagaaaaaatatatctcaggagctcaacatggaacagaaaaatccaaagaaataaaagattttctgtagtgtttttgaaaagtttgcagcttatgtaatagcagataaaatttctaattgtaaaatgttaaattgtaaaatctaatttgcaaaatgttctcaataaagtcattcaaaatgaaataggagcttgtatttggaattcgtatattttagagtaatttcgacttttttattcaaaagctggacctttaaaagtttttaaaaggagaaaaattcttaactcaaatttgagaacagagacagaatgttattttttttgtaacctaactgttaacacatttaaatgacctaaaaaaaaaacctctgaaagtcttttttcttcttactag

SEQ ID NO: 379773 - DNA, 465 bp, Homo sapiens
  misc_feature (1)..(1): n is a, c, g, or t
  misc_feature (17)..(17): n is a, c, g, or t
  misc_feature (22)..(22): n is a, c, g, or t
  misc_feature (27)..(27): n is a, c, g, or t
  misc_feature (41)..(41): n is a, c, g, or t
  misc_feature (44)..(44): n is a, c, g, or t
  misc_feature (47)..(47): n is a, c, g, or t
  misc_feature (51)..(51): n is a, c, g, or t
ncccttttctccccccntcccnccccncacccccccccccnccnttnaggngtgaagatgaaaatgaagctgaaagaaaaaatatatctcaggagctcaacatggaacagaaaaatccaaagaaataaaagattttctgtagtgtttttgaaaagtttgcagcttatgtaatagcagataaaatttctaattgtaaaatgttaaattgtaaaatctaatttgcaaaatgttctcaataaagtcattcaaaatgaaataggagcttgtatttggaattcgtatattttagagtaatttcgacttttttattcaaaagctggacctttaaaagtttttaaaaggagaaaaattcttaactcaaatttgagaacagagacagaatgttattttttttgtaacctaactgttaacacatttaaatgacctaaaaaaaaaacctctgaaagtcttttttcttcttactag

SEQ ID NO: 379774 - DNA, 556 bp, Homo sapiens
tacaggtaagaaaactgagaatgaggggtcatatgcctttcacagagtcaaaccaatagttaagtgccaaagcaggattcaaaataagatttgtctgacaccaaagcctgtgcattttctgctgtgctcatgtagatgttttaggaagatgaaaatgaagctgaaagaaaaaatatatctcaggagctcaacatggaacagaaaaatccaaagaaataaaagattttctgtagtgtttttgaaaagtttgcagcttatgtaatagcagataaaatttctaattgtaaaatgttaaattgtaaaatctaatttgcaaaatgttctcaataaagtcattcaaaatgaaataggagcttgtatttggaattcgtatattttagagtaatttcgacttttttattcaaaagctggacctttaaaagtttttaaaaggagaaaaattcttaactcaaatttgagaacagagacagaatgttattttttttgtaacctaactgttaacacatttaaatgacctaaaaaaaaaacctctgaaagtcttttttcttcttactag

SEQ ID NO: 379775 - DNA, 467 bp, Homo sapiens
ttctcgacatctatctattttatttctacagatccccaaccccctcccttcagcagaagatgaaaatgaagctgaaagaaaaaatatatctcaggagctcaacatggaacagaaaaatccaaagaaataaaagattttctgtagtgtttttgaaaagtttgcagcttatgtaatagcagataaaatttctaattgtaaaatgttaaattgtaaaatctaatttgcaaaatgttctcaataaagtcattcaaaatgaaataggagcttgtatttggaattcgtatattttagagtaatttcgacttttttattcaaaagctggacctttaaaagtttttaaaaggagaaaaattcttaactcaaatttgagaacagagacagaatgttattttttttgtaacctaactgttaacacatttaaatgacctaaaaaaaaaacctctgaaagtcttttttcttcttactag

SEQ ID NO: 379776 - DNA, 457 bp, Homo sapiens
gtttatctcttctaagcattatattctatacccaacacaaacttatggagtaacaaatgaggctgctaaaaaaatatatctcaggagctcaacatggaacagaaaaatccaaagaaataaaagattttctgtagtgtttttgaaaagtttgcagcttatgtaatagcagataaaatttctaattgtaaaatgttaaattgtaaaatctaatttgcaaaatgttctcaataaagtcattcaaaatgaaataggagcttgtatttggaattcgtatattttagagtaatttcgacttttttattcaaaagctggacctttaaaagtttttaaaaggagaaaaattcttaactcaaatttgagaacagagacagaatgttattttttttgtaacctaactgttaacacatttaaatgacctaaaaaaaaaacctctgaaagtcttttttcttcttactag

SEQ ID NO: 379777 - DNA, 462 bp, Homo sapiens
acacccctatctccttttatatctaacagtcccaacacccaccgcggcctatgtggtaaccaatgaagctgctaaaaaatatatctcaggagctcaacatggaacagaaaaatccaaagaaataaaagattttctgtagtgtttttgaaaagtttgcagcttatgtaatagcagataaaatttctaattgtaaaatgttaaattgtaaaatctaatttgcaaaatgttctcaataaagtcattcaaaatgaaataggagcttgtatttggaattcgtatattttagagtaatttcgacttttttattcaaaagctggacctttaaaagtttttaaaaggagaaaaattcttaactcaaatttgagaacagagacagaatgttattttttttgtaacctaactgttaacacatttaaatgacctaaaaaaaaaacctctgaaagtcttttttcttcttactag

SEQ ID NO: 379778 - DNA, 239 bp, Homo sapiens
gagattaccgctgcttgcatattggtgtatgtttttctagcttttctttttaccattatttaacaaatatctactaagcatcttgtaagtgtaacacccactaatagtacaggggaatactctggtattcttgcaggtcataacctttatcctcttgatgtttatggcctataaaatgtatctagacaagtgacatgaaaactggaagaaaaacccaaggtgctcttaaaacaggtacc

SEQ ID NO: 379779 - DNA, 409 bp, Homo sapiens
gggggttgcaagaagaagaagagtaaagttcttagcagaaacagtgctgatgatgaggaactgaccaatgatagcctgaccctatctcaaagcaagagtaatgaggtagatcaacccaatttttatatctgtctgtctggggaaaagggaattcttctctaaatcactctacacattgtattaagtggcttccttgaaatcctatttatagacggctgtgggatgaatgagcaccctaactgtaacattttttcatttggccaacagacttttattaaatatctactatttgtcaccgttctcaaggagctcacaatctctgtcctcaaggagaaatatttagagaaatatttttatatccatagacttgggaaatgacaaagttttccattctcctttttatcccttt

SEQ ID NO: 379780 - DNA, 625 bp, Homo sapiens
gcgagattttaacatttgattacagaattctcttggtagtattttgagatggcaagcgttttatatgtttgttttgtgtgtgggaattttattaaaagatttgatagcaaaatcatatcttctcttcttagatgggttcatattgtttgtgccctgtatgttcctggagtagcctttggagatattgacaaattacgaccagtaacactaacggaaatgaactattccaaatatggtgccaaggtgagacacaaagcatttttgattgcttgaaagagaaaggttttacttgttagtttacctggctttttatttgtattatgttgactgcagaaatgcttactaggaatcattctatttagcactaaatcatttattattgatagtagttttcctagaaagccaataatgcataaattcttctatacattcttaatttagagtaacgtatgaggtaaaatgataattggtactactaccatttccctggcagtgttcacaatgcctaatacatagaccaaaaccttatttacaattagatggatcaaatataagcctaatttctgactttacttttgaagtggaatttgtcaaaattatgaaaaagaatattagaagtgatctt

SEQ ID NO: 379781 - DNA, 442 bp, Homo sapiens
atatgctataataatttgtaaataaaatatataaacttcatttagcataaatgttttctatcaataaccatgaaacattatttttattttttgtagtgactaggtctcattgtgttgtccaggctgatctcaagcccctggggtcaagtgattcttccgcctctgcctccgaaaatgctaggattataggcatgagccaccatgcccagccaattttttttatattgttccttatctatgatttatttaataaggaattaagtgacagatcacttcaagaaataatacatttttgactgtattattttgttttcattttggaaataatacatgtttattacagattatttggaaaatgcagaaaaataaaagataaagaaaataaaagtcatgacctaccttcgagagattaccgctgcttgcatattggtgtatgtttttc

SEQ ID NO: 379782 - DNA, 349 bp, Homo sapiens
tgacaagaacttaattagcactttcttattgcttatcaaaacaaatgtgttaaatgcttctcccttacgaaataaagaaaggtgaaaagatggcctaggttgattttattttttgttttgtctttgtttctttgtttcgttttggtactttatttttttttaatcagacataatgctaatcagaaatcttagctgatgctgcacattggcttttcccaacggtccagaggctgctaattttagcggaaatgaagacattgatcaaagctctggtgagatgggggagtgagtgtgtgaacaaaaagagagctaatttaaaagaggcatcagactttcaaaggacagtgtc

SEQ ID NO: 379783 - DNA, 3431 bp, Homo sapiens
ctgaggcagccgccctcgcgctgtgcaatttctggtctttcgttgcttctggtccaggctaataaagtttttctttctttaattttttttcttctagttttaacgggagaaattaactccccggggccgccgggttgactgcgctgcctgggccggaggtcttctccggccagggagcgctgtgggaaggggctcgagcggccagggccaggcgaggccgggggggcggggggttaggggaccgcggggctactcttgggagcgcccctgtccggctggctgcgcgccggttttaaatagcatctttcggacttgtcttcgcggccccagtccccgacctcggcgctgcctgggctcctgcagcctctccctaagtcttctccaaacgaccacctcacggattccttatggatcgcagctccaagaggaggcaggtgaagcctttggcagcttctctgctggaagctcttgattatgatagttcagatgacagtgattttaaagttggagatgcctcagattctgaagggagtggtaatggaagtgaagatgcttcaaaggacagtggagaaggttcctgtagtgattctgaagaaaatattttagaagaagaactgaatgaagatattaaagtaaaagaagaacaacttaaaaattctgcagaggaagaagtactatcatcagaaaaacaattaattaaaatggaaaagaaggaagaagaagaaaatggagaaagacctagaaagaaaagggagaaagagaaggaaaaagaaaaggaaaaggagaaagagaaggaaagagagaaggaaaaagaaaaagcaacagtatctgagaatgtggctgcttctgctgctgccaccacaccagccacaagtcctcctgctgttaacacatccccttctgttcccactacgacaaccgctacagaggaacaagtcagcgagccaaaaaaatggaaccttcgacgaaaccgaccacttctggattttgtgtccatggaagagctgaatgacatggatgactatgacagtgaggatgacaatgattggcgacctactgtagtaaagagaaaagggagatctgcatctcagaaagagggaagtgatggagacaatgaggatgatgaagatgagggaagcgggagtgatgaagacgagaatgatgaaggcaatgatgaagatcatagtagccctgccagtgaagggggttgcaagaagaagaagagtaaagttcttagcagaaacagtgctgatgatgaggaactgaccaatgatagcctgaccctatctcaaagcaagagtaatgaggactcgctgattcttgagaagagtcaaaactggagctctcaaaaaatggaccatattctgatttgctgtgtttgtctgggagataatagtgaggacgctgatgaaataattcagtgtgacaattgtggcattacagtccatgaagatgggttcatattgtttgtgccctgtatgttcctggagtagcctttggagatattgacaaattacgaccagtaacactaacggaaatgaactattccaaatatggtgccaaggagtgtagcttttgtgaagaccctcgctttgctagaactggggtttgcattagctgtgatgcagggatgtgcagagcctatttccatgtgacctgtgctcaaaaggaaggtctgctttcagaggcagcggcggaagaggatatagcagatccattctttgcttattgtaagcaacatgcagataggttagacagaaagtggaagagaaaaaactacttggctctacagtcctattgtaaaatgtctttgcaagagagagagaagcaactatcaccagaagcacaggcaaggatcaatgcccggcttcagcagtatcgtgccaaagcagaactagctcgatctaccagaccccaggcctgggttccaagggaaaaattgcccagaccactcaccagcagtgcttcagctattcgtaaacttatgcggaaagcagaactcatggggatcagtacagatatctttccagtggacaattcagatactagttctagtgtggatggaaggagaaaacataagcaaccagctctcactgcagattttgtgaattattattttgagagaaatatgcgcatgattcaaattcaggaaaatatggctgaacaaaagaatataaaagataaattagagaatgaacaagaaaagcttcatgtagaatataataagctatgtgaatctttagaagaactacaaaacctgaatggaaaacttcgaagtgaaggacaaggaatatgggctttactaggcagaatcacagggcagaagttgaatataccggcaattttgcgagcacccaaggagagaaaaccaagtaaaaaagaaggaggcacacaaaagacatctactcttcctgcagtactttatagttgtgggatttgtaagaagaaccatgatcagcatcttcttttattgtgtgatacctgtaaactacattaccatcttggatgtctggatcctcctcttacaaggatgccaagaaagaccaaaaacagttattggcagtgctcggaatgtgaccaggcagggagcagtgacatggaagcagatatggccatggaaaccctaccagatggaaccaaacgatcaaggaggcagattaaggaaccagtgaaatttgttccacaggatgtgccaccagaacccaagaagattccgataagaaacacgagaaccagaggacgaaaacgaagcttcgttcctgaggaagaaaaacatgaggaaagagttcctagagagagaagacaaagacagtctgtgttgcaaaagaagcccaaggctgaagatttaagaactgaatgtgcaacttgcaagggaactggagacaatgaaaatcttgtcaggtgtgatgaatgcagactctgctaccattttggctgtttggatcctcctttgaaaaagtctcctaaacagacaggctacggatggatatgtcaggaatgtgattcttcatcttccaaggaagatgaaaatgaagctgaaagaaaaaatatatctcaggagctcaacatggaacagaaaaatccaaagaaataaaagattttctgtagtgtttttgaaaagtttgcagcttatgtaatagcagataaaatttctaattgtaaaatgttaaattgtaaaatctaatttgcaaaatgttctcaataaagtcattcaaaatgaaataggagcttgtatttggaattcgtatattttagagtaatttcgacttttttattcaaaagctggacctttaaaagtttttaaaaggagaaaaattcttaactcaaatttgagaacagagacagaatgttattttttttgtaacctaactgttaacacatttaaatgacctaaaaaaaaaacctctgaaagtcttttttcttcttactag

SEQ ID NO: 379784 - DNA, 2803 bp, Homo sapiens
ctgaggcagccgccctcgcgctgtgcaatttctggtctttcgttgcttctggtccaggctaataaagtttttctttctttaattttttttcttctagttttaacgggagaaattaactccccggggccgccgggttgactgcgctgcctgggccggaggtcttctccggccagggagcgctgtgggaaggggctcgagcggccagggccaggcgaggccgggggggcggggggttaggggaccgcggggctactcttgggagcgcccctgtccggctggctgcgcgccggttttaaatagcatctttcggacttgtcttcgcggccccagtccccgacctcggcgctgcctgggctcctgcagcctctccctaagtcttctccaaacgaccacctcacggattccttatggatcgcagctccaagaggaggcaggtgaagcctttggcagcttctctgctggaagctcttgattatgatagttcagatgacagtgattttaaagttggagatgcctcaggactcgctgattcttgagaagagtcaaaactggagctctcaaaaaatggaccatattctgatttgctgtgtttgtctgggagataatagtgaggacgctgatgaaataattcagtgtgacaattgtggcattacagtccatgaaggttgttatggagttgatggagagagtgactctattatgagttcagcttctgaaaactccactgaaccttggttttgtgatgcctgtaaatgtggtgtttctcctagctgtgaactgtgtcctaatcaggatggaattttcaaggagacagatgctggaagatgggttcatattgtttgtgccctgtatgttcctggagtagcctttggagatattgacaaattacgaccagtaacactaacggaaatgaactattccaaatatggtgccaaggagtgtagcttttgtgaagaccctcgctttgctagaactggggtttgcattagctgtgatgcagggatgtgcagagcctatttccatgtgacctgtgctcaaaaggaaggtctgctttcagaggcagcggcggaagaggatatagcagatccattctttgcttattgtaagcaacatgcagataggttagacagaaagtggaagagaaaaaactacttggctctacagtcctattgtaaaatgtctttgcaagagagagagaagcaactatcaccagaagcacaggcaaggatcaatgcccggcttcagcagtatcgtgccaaagcagaactagctcgatctaccagaccccaggcctgggttccaagggaaaaattgcccagaccactcaccagcagtgcttcagctattcgtaaacttatgcggaaagcagaactcatggggatcagtacagatatctttccagtggacaattcagatactagttctagtgtggatggaaggagaaaacataagcaaccagctctcactgcagattttgtgaattattattttgagagaaatatgcgcatgattcaaattcaggaaaatatggctgaacaaaagaatataaaagataaattagagaatgaacaagaaaagcttcatgtagaatataataagctatgtgaatctttagaagaactacaaaacctgaatggaaaacttcgaagtgaaggacaaggaatatgggctttactaggcagaatcacagggcagaagttgaatataccggcaattttgcgagcacccaaggagagaaaaccaagtaaaaaagaaggaggcacacaaaagacatctactcttcctgcagtactttatagttgtgggatttgtaagaagaaccatgatcagcatcttcttttattgtgtgatacctgtaaactacattaccatcttggatgtctggatcctcctcttacaaggatgccaagaaagaccaaaaacagttattggcagtgctcggaatgtgaccaggcagggagcagtgacatggaagcagatatggccatggaaaccctaccagatggaaccaaacgatcaaggaggcagattaaggaaccagtgaaatttgttccacaggatgtgccaccagaacccaagaagattccgataagaaacacgagaaccagaggacgaaaacgaagcttcgttcctgaggaagaaaaacatgaggaaagagttcctagagagagaagacaaagacagtctgtgttgcaaaagaagcccaaggctgaagatttaagaactgaatgtgcaacttgcaagggaactggagacaatgaaaatcttgtcaggtgtgatgaatgcagactctgctaccattttggctgtttggatcctcctttgaaaaagtctcctaaacagacaggctacggatggatatgtcaggaatgtgattcttcatcttccaaggaagatgaaaatgaagctgaaagaaaaaatatatctcaggagctcaacatggaacagaaaaatccaaagaaataaaagattttctgtagtgtttttgaaaagtttgcagcttatgtaatagcagataaaatttctaattgtaaaatgttaaattgtaaaatctaatttgcaaaatgttctcaataaagtcattcaaaatgaaataggagcttgtatttggaattcgtatattttagagtaatttcgacttttttattcaaaagctggacctttaaaagtttttaaaaggagaaaaattcttaactcaaatttgagaacagagacagaatgttattttttttgtaacctaactgttaacacatttaaatgacctaaaaaaaaaacctctgaaagtcttttttcttcttactag

SEQ ID NO: 379785 - DNA, 3264 bp, Homo sapiens
ctgaggcagccgccctcgcgctgtgcaatttctggtctttcgttgcttctggtccaggctaataaagtttttctttctttaattttttttcttctagttttaacgggagaaattaactccccggggccgccgggttgactgcgctgcctgggccggaggtcttctccggccagggagcgctgtgggaaggggctcgagcggccagggccaggcgaggccgggggggcggggggttaggggaccgcggggctactcttgggagcgcccctgtccggctggctgcgcgccggttttaaatagcatctttcggacttgtcttcgcggccccagtccccgacctcggcgctgcctgggctcctgcagcctctccctaagtcttctccaaacgaccacctcacggattccttatggatcgcagctccaagaggaggcaggtgaagcctttggcagcttctctgctggaagctcttgattatgatagttcagatgacagtgattttaaagttggagatgcctcagattctgaagggagtggtaatggaagtgaagatgcttcaaaggacagtggagaaggttcctgtagtgattctgaagaaaatattttagaagaagaactgaatgaagatattaaagtaaaagaagaacaacttaaaaattctgcagaggaagaagtactatcatcagaaaaacaattaattaaaatggaaaagaaggaagaagaagaaaatggagaaagacctagaaagaaaagggagaaagagaaggaaaaagaaaaggaaaaggagaaagagaaggaaagagagaaggaaaaagaaaaagcaacagtatctgagaatgtggctgcttctgctgctgccaccacaccagccacaagtcctcctgctgttaacacatccccttctgttcccactacgacaaccgctacagaggaacaagtcagcgagccaaaaaaatggaaccttcgacgaaaccgaccacttctggattttgtgtccatggaagagctgaatgacatggatgactatgacagtgaggatgacaatgattggcgacctactgtagtaaagagaaaagggagatctgcatctcagaaagagggaagtgatggagacaatgaggatgatgaagatgagggaagcgggagtgatgaagacgagaatgatgaaggcaatgatgaagatcatagtagccctgccagtgaagggggttgcaagaagaagaagagtaaagttcttagcagaaacagtgctgatgatgaggaactgaccaatgatagcctgaccctatctcaaagcaagagtaatgaggactcgctgattcttgagaagagtcaaaactggagctctcaaaaaatggaccatattctgatttgctgtgtttgtctgggagataatagtgaggacgctgatgaaataattcagtgtgacaattgtggcattacagtccatgaagatgggttcatattgtttgtgccctgtatgttcctggagtagcctttggagatattgacaaattacgaccagtaacactaacggaaatgaactattccaaatatggtgccaaggagtgtagcttttgtgaagaccctcgctttgctagaactggggtttgcattagctgtgatgcagggatgtgcagagcctatttccatgtgacctgtgctcaaaaggaaggtctgctttcagaggcagcggcggaagaggatatagcagatccattctttgcttattgtaagcaacatgcagataggttagacagaaagtggaagagaaaaaactacttggctctacagtcctattgtaaaatgtctttgcaagagagagagaagcaactatcaccagaagcacaggcaaggatcaatgcccggcttcagcagtatcgtgccaaagcagaactagctcgatctaccagaccccaggcctgggttccaagggaaaaattgcccagaccactcaccagcagtgcttcagctattcgtaaacttatgcggaaagcagaactcatggggatcagtacagatatctttccagtggacaattcagatactagttctagtgtggatggaaggagaaaacataagcaaccagctctcactgcagattttgtgaattattattttgagagaaatatgcgcatgattcaaattcaggaaaatatggctgaacaaaagaatataaaagataaattagagaatgaacaagaaaagcttcatgtagaatataataagctatgtgaatctttagaagaactacaaaacctgaatggaaaacttcgaagtgaaggacaaggaatatgggctttactaggcagaatcacagggcagaagttgaatataccggcaattttgcgagcacccaaggagagaaaaccaagtaaaaaagaaggaggcacacaaaagacatctactcttcctgcagtactttatagttgtgggatttgtaagaagaaccatgatcagcatcttcttttattgtgtgatacctgtaaactacattaccatcttggatgtctggatcctcctcttacaaggatgccaagaaagaccaaaaacagttattggcagtgctcggaatgtgaccaggcagggagcagtgacatggaagcagatatggccatggaaaccctaccagatggaaccaaacgatcaaggaggcagattaaggaaccagtgaaatttgttccacaggatgtgccaccagaacccaagaagattccgataagaaacacgagaaccagaggacgaaaacgaagcttcgttcctgaggaagaaaaacatgaggaaagagttcctagagagagaagacaaagacagtctgtgttgcaaaagaagcccaaggctgaagatttaagaactgaatgtgcaacttgcaagggaactggagacaatgaaaatcttgtcaggtgtgatgaatgcagactctgctaccattttggctgtttggatcctcctttgaaaaagtctcctaaacagacaggctacggatggatatgtcaggaatgtgattcttcatcttccaaggaagatgaaaatgaagctgaaagaaaaaatatatctcaggagctcaacatggaacagaaaaatccaaagaaataaaagattttctgtagtgtttttgaaaagtttgcagcttatgtaatagcagataaaatttctaattgtaaaatgttaaattgtaaaatctaatttgcaaaatgttctcaataaagtcaccagatgcggcagatactgtgttgggaatggtatcatgatgaatttatacattt

SEQ ID NO: 379786 - DNA, 3265 bp, Homo sapiens
ctgaggcagccgccctcgcgctgtgcaatttctggtctttcgttgcttctggtccaggctaataaagtttttctttctttaattttttttcttctagttttaacgggagaaattaactccccggggccgccgggttgactgcgctgcctgggccggaggtcttctccggccagggagcgctgtgggaaggggctcgagcggccagggccaggcgaggccgggggggcggggggttaggggaccgcggggctactcttgggagcgcccctgtccggctggctgcgcgccggttttaaatagcatctttcggacttgtcttcgcggccccagtccccgacctcggcgctgcctgggctcctgcagcctctccctaagtcttctccaaacgaccacctcacggattccttatggatcgcagctccaagaggaggcaggtgaagcctttggcagcttctctgctggaagctcttgattatgatagttcagatgacagtgattttaaagttggagatgcctcagattctgaagggagtggtaatggaagtgaagatgcttcaaaggacagtggagaaggttcctgtagtgattctgaagaaaatattttagaagaagaactgaatgaagatattaaagtaaaagaagaacaacttaaaaattctgcagaggaagaagtactatcatcagaaaaacaattaattaaaatggaaaagaaggaagaagaagaaaatggagaaagacctagaaagaaaagggagaaagagaaggaaaaagaaaaggaaaaggagaaagagaaggaaagagagaaggaaaaagaaaaagcaacagtatctgagaatgtggctgcttctgctgctgccaccacaccagccacaagtcctcctgctgttaacacatccccttctgttcccactacgacaaccgctacagaggaacaagtcagcgagccaaaaaaatggaaccttcgacgaaaccgaccacttctggattttgtgtccatggaagagctgaatgacatggatgactatgacagtgaggatgacaatgattggcgacctactgtagtaaagagaaaagggagatctgcatctcagaaagagggaagtgatggagacaatgaggatgatgaagatgagggaagcgggagtgatgaagacgagaatgatgaaggcaatgatgaagatcatagtagccctgccagtgaagggggttgcaagaagaagaagagtaaagttcttagcagaaacagtgctgatgatgaggaactgaccaatgatagcctgaccctatctcaaagcaagagtaatgaggactcgctgattcttgagaagagtcaaaactggagctctcaaaaaatggaccatattctgatttgctgtgtttgtctgggagataatagtgaggacgctgatgaaataattcagtgtgacaattgtggcattacagtccatgaagatgggttcatattgtttgtgccctgtatgttcctggagtagcctttggagatattgacaaattacgaccagtaacactaacggaaatgaactattccaaatatggtgccaaggagtgtagcttttgtgaagaccctcgctttgctagaactggggtttgcattagctgtgatgcagggatgtgcagagcctatttccatgtgacctgtgctcaaaaggaaggtctgctttcagaggcagcggcggaagaggatatagcagatccattctttgcttattgtaagcaacatgcagataggttagacagaaagtggaagagaaaaaactacttggctctacagtcctattgtaaaatgtctttgcaagagagagagaagcaactatcaccagaagcacaggcaaggatcaatgcccggcttcagcagtatcgtgccaaagcagaactagctcgatctaccagaccccaggcctgggttccaagggaaaaattgcccagaccactcaccagcagtgcttcagctattcgtaaacttatgcggaaagcagaactcatggggatcagtacagatatctttccagtggacaattcagatactagttctagtgtggatggaaggagaaaacataagcaaccagctctcactgcagattttgtgaattattattttgagagaaatatgcgcatgattcaaattcaggaaaatatggctgaacaaaagaatataaaagataaattagagaatgaacaagaaaagcttcatgtagaatataataagctatgtgaatctttagaagaactacaaaacctgaatggaaaacttcgaagtgaaggacaaggaatatgggctttactaggcagaatcacagggcagaagttgaatataccggcaattttgcgagcacccaaggagagaaaaccaagtaaaaaagaaggaggcacacaaaagacatctactcttcctgcagtactttatagttgtgggatttgtaagaagaaccatgatcagcatcttcttttattgtgtgatacctgtaaactacattaccatcttggatgtctggatcctcctcttacaaggatgccaagaaagaccaaaaacagttattggcagtgctcggaatgtgaccaggcagggagcagtgacatggaagcagatatggccatggaaaccctaccagatggaaccaaacgatcaaggaggcagattaaggaaccagtgaaatttgttccacaggatgtgccaccagaacccaagaagattccgataagaaacacgagaaccagaggacgaaaacgaagcttcgttcctgaggaagaaaaacatgaggaaagagttcctagagagagaagacaaagacagtctgtgttgcaaaagaagcccaaggctgaagatttaagaactgaatgtgcaacttgcaagggaactggagacaatgaaaatcttgtcaggtgtgatgaatgcagactctgctaccattttggctgtttggatcctcctttgaaaaagtctcctaaacagacaggctacggatggatatgtcaggaatgtgattcttcatcttccaaggaagatgaaaatgaagctgaaagaaaaaatatatctcaggagctcaacatggaacagaaaaatccaaagaaataaaagattttctgtagtgtttttgaaaagtttgcagcttatgtaatagcagataaaatttctaattgtaaaatgttaaattgtaaaatctaatttgcaaaatgttctcaataaagtcaaccgggtcgcccgaaaccgcccctcccctcaaatggataattacataaaaaaaac

SEQ ID NO: 379787 - DNA, 955 bp, Homo sapiens
cgacacactctgatgggaaccggaacaccaacatctggagctgaccccctcctacaaggtgccagaaagaccaaacagttattgcagtgctcggaatgtgaccaggcagggagcagtgacatggaagcagatatggccatggaaaccctaccagatggaaccaaacgatcaaggaggcagattaaggaaccagtgaaatttgttccacaggatgtgccaccagaacccaagaagattccgataagaaacacgagaaccagaggacgaaaacgaagcttcgttcctgaggaagaaaaacatgaggaaagagttcctagagagagaagacaaagacagtctgtgttgcaaaagaagcccaaggctgaagatttaagaactgaatgtgcaacttgcaagggaactggagacaatgaaaatcttgtcaggtgtgatgaatgcagactctgctaccattttggctgtttggatcctcctttgaaaaagtctcctaaacagacaggctacggatggatatgtcaggaatgtgattcttcatcttccaaggaagatgaaaatgaagctgaaagaaaaaatatatctcaggagctcaacatggaacagaaaaatccaaagaaataaaagattttctgtagtgtttttgaaaagtttgcagcttatgtaatagcagataaaatttctaattgtaaaatgttaaattgtaaaatctaatttgcaaaatgttctcaataaagtcattcaaaatgaaataggagcttgtatttggaattcgtatattttagagtaatttcgacttttttattcaaaagctggacctttaaaagtttttaaaaggagaaaaattcttaactcaaatttgagaacagagacagaatgttattttttttgtaacctaactgttaacacatttaaatgacctaaaaaaaaaacctctgaaagtcttttttcttcttactag

SEQ ID NO: 379788 - DNA, 3460 bp, Homo sapiens
ctgaggcagccgccctcgcgctgtgcaatttctggtctttcgttgcttctggtccaggctaataaagtttttctttctttaattttttttcttctagttttaacgggagaaattaactccccggggccgccgggttgactgcgctgcctgggccggaggtcttctccggccagggagcgctgtgggaaggggctcgagcggccagggccaggcgaggccgggggggcggggggttaggggaccgcggggctactcttgggagcgcccctgtccggctggctgcgcgccggttttaaatagcatctttcggacttgtcttcgcggccccagtccccgacctcggcgctgcctgggctcctgcagcctctccctaagtcttctccaaacgaccacctcacggattccttatggatcgcagctccaagaggaggcaggtgaagcctttggcagcttctctgctggaagctcttgattatgatagttcagatgacagtgattttaaagttggagatgcctcagattctgaagggagtggtaatggaagtgaagatgcttcaaaggacagtggagaaggttcctgtagtgattctgaagaaaatattttagaagaagaactgaatgaagatattaaagtaaaagaagaacaacttaaaaattctgcagaggaagaagtactatcatcagaaaaacaattaattaaaatggaaaagaaggaagaagaagaaaatggagaaagacctagaaagaaaagggagaaagagaaggaaaaagaaaaggaaaaggagaaagagaaggaaagagagaaggaaaaagaaaaagcaacagtatctgagaatgtggctgcttctgctgctgccaccacaccagccacaagtcctcctgctgttaacacatccccttctgttcccactacgacaaccgctacagaggaacaagtcagcgagccaaaaaaatggaaccttcgacgaaaccgaccacttctggattttgtgtccatggaagagctgaatgacatggatgactatgacagtgaggatgacaatgattggcgacctactgtagtaaagagaaaagggagatctgcatctcagaaagagggaagtgatggagacaatgaggatgatgaagatgagggaagcgggagtgatgaagacgagaatgatgaaggcaatgatgaagatcatagtagccctgccagtgaagggggttgcaagaagaagaagagtaaagttcttagcagaaacagtgctgatgatgaggaactgaccaatgatagcctgaccctatctcaaagcaagagtaatgaggactcgctgattcttgagaagagtcaaaactggagctctcaaaaaatggaccatattctgatttgctgtgtttgtctgggagataatagtgaggacgctgatgaaataattcagtgtgacaattgtggcattacagtccatgaagatgggttcatattgtttgtgccctgtatgttcctggagtagcctttggagatattgacaaattacgaccagtaacactaacggaaatgaactattccaaatatggtgccaaggagtgtagcttttgtgaagaccctcgctttgctagaactggggtttgcattagctgtgatgcagggatgtgcagagcctatttccatgtgacctgtgctcaaaaggaaggtctgctttcagaggcagcggcggaagaggatatagcagatccattctttgcttattgtaagcaacatgcagataggttagacagaaagtggaagagaaaaaactacttggctctacagtcctattgtaaaatgtctttgcaagagagagagaagcaactatcaccagaagcacaggcaaggatcaatgcccggcttcagcagtatcgtgccaaagcagaactagctcgatctaccagaccccaggcctgggttccaagggaaaaattgcccagaccactcaccagcagtgcttcagctattcgtaaacttatgcggaaagcagaactcatggggatcagtacagatatctttccagtggacaattcagatactagttctagtgtggatggaaggagaaaacataagcaaccagctctcactgcagattttgtgaattattattttgagagaaatatgcgcatgattcaaattcaggaaaatatggctgaacaaaagaatataaaagataaattagagaatgaacaagaaaagcttcatgtagaatataataagctatgtgaatctttagaagaactacaaaacctgaatggaaaacttcgaagtgaaggacaaggaatatgggctttactaggcagaatcacagggcagaagttgaatataccggcaattttgcgagcacccaaggagagaaaaccaagtaaaaaagaaggaggcacacaaaagacatctactcttcctgcagtactttatagttgtgggatttgtaagaagaaccatgatcagcatcttcttttattgtgtgatacctgtaaactacattaccatcttggatgtctggatcctcctcttacaaggatgccaagaaagaccaaaaacagttattggcagtgctcggaatgtgaccaggcagggagcagtgacatggaagcagatatggccatggaaaccctaccagatggaaccaaacgatcaaggaggcagattaaggaaccagtgaaatttgttccacaggatgtgccaccagaacccaagaagattccgataagaaacacgagaaccagaggacgaaaacgaagcttcgttcctgaggaagaaaaacatgaggaaagagttcctagagagagaagacaaagacagtctgtgttgcaaaagaagcccaaggctgaagatttaagaactgaatgtgcaacttgcaagggaactggagacaatgaaaatcttgtcaggaaataaggagggaagtacaaagattattgactatacaacctaccagctgaaagaaagatcttcatcaacatctgtatctttccagaggtatacagaattaaaatttgatcttcaagctttaatgatccagttttaagtcaacggcagaagtatgttgaatatttcatcactcaatcttgaactgatttagaagagactctttgctgaaattgaattgcacttatacatgtaaattgtcaacatgtaatttggaattttctgattaataaatgtggttttggacatcttttcgggtatagtgacaatggaaaatagtttaaactttaggaatagagtaggtaatgttatagataatcaaaagcaattgtaattgtaaagctgctgtaatctagtgatctctagttacagtgaggaacgctatgattggatgagatgtttgataaaagtaaaatgtgtatgaaattacatataaacagattattagcttattgaaagatctcataacattggaggaaaaatattcataatctttagcaaaactagtagacttttgtttaa

SEQ ID NO: 379789 - DNA, 1998 bp, Homo sapiens
ctgaggcagccgccctcgcgctgtgcaatttctggtctttcgttgcttctggtccaggctaataaagtttttctttctttaattttttttcttctagttttaacgggagaaattaactccccggggccgccgggttgactgcgctgcctgggccggaggtcttctccggccagggagcgctgtgggaaggggctcgagcggccagggccaggcgaggccgggggggcggggggttaggggaccgcggggctactcttgggagcgcccctgtccggctggctgcgcgccggttttaaatagcatctttcggacttgtcttcgcggccccagtccccgacctcggcgctgcctgggctcctgcagcctctccctaagtcttctccaaacgaccacctcacggattccttatggatcgcagctccaagaggaggcaggtgaagcctttggcagcttctctgctggaagctcttgattatgatagttcagatgacagtgattttaaagttggagatgcctcagattctgaagggagtggtaatggaagtgaagatgcttcaaaggacagtggagaaggttcctgtagtgattctgaagaaaatattttagaagaagaactgaatgaagatattaaagtaaaagaagaacaacttaaaaattctgcagaggaagaagtactatcatcagaaaaacaattaattaaaatggaaaagaaggaagaagaagaaaatggagaaagacctagaaagaaaagggagaaagagaaggaaaaagaaaaggaaaaggagaaagagaaggaaagagagaaggaaaaagaaaaagcaacagtatctgagaatgtggctgcttctgctgctgccaccacaccagccacaagtcctcctgctgttaacacatccccttctgttcccactacgacaaccgctacagaggaacaagtcagcgagccaaaaaaatggaaccttcgacgaaaccgaccacttctggattttgtgtccatggaagagctgaatgacatggatgactatgacagtgaggatgacaatgattggcgacctactgtagtaaagagaaaagggagatctgcatctcagaaagagggaagtgatggagacaatgaggatgatgaagatgagggaagcgggagtgatgaagacgagaatgatgaaggcaatgatgaagatcatagtagccctgccagtgaagggggttgcaagaagaagaagagtaaagttcttagcagaaacagtgctgatgatgaggaactgaccaatgatagcctgaccctatctcaaagcaagagtaatgaggactcgctgattcttgagaagagtcaaaactggagctctcaaaaaatggaccatattctgatttgctgtgtttgtctgggagataatagtgaggacgctgatgaaataattcagtgtgacaattgtggcattacagtccatgaagatgggttcatattgtttgtgccctgtatgttcctggagtagcctttggagatattgacaaattacgaccagtaacactaacggaaatgaactattccaaatatggtgccaaggagtgtagcttttgtgaagaccctcgctttgctagaactggggtttgcattagctgtgatgcagggatgtgcagagcctatttccatgtgacctgtgctcaaaaggaaggtctgctttcagaggcagcggcggaagaggtaggtttatttaaacccatagttggtgaacatgttcacaagatatcttttgactctatgtcctataataagtgtaaataataaaagaaattttaacatttattcttaaagttcttgccaagatcactgttctaaaactttaagagtaaatgcctatgagttttgtcagttttaaagctagtcagacgttcagaaaacataatttttatagtgagatctgacagataaaatgaaagataatccaagttgtcttaaagcattaaaatgtcggcatttcagccccatgaattatagtt

SEQ ID NO: 379790 - DNA, 1724 bp, Homo sapiens
ctttcacaaaaggtgaaatgagctctttgtagtgtttcccgcccaggctgcattttagaatcacagaggaggtggcccgaggcagccgggatgacagctctccccaggaatcctgctgcctgctgagaaacatggtcagcaagtcccgctggaagctcctggccatgttggctctggtcctggtcgtcatggtgtggtattccatctcccgggaagacaggtacatcgagcttttttattttcccatcccagagaagaaggagccgtgcctccagggtgaggcagagagcaaggcctctaagctctttggcaactactcccgggatcagcccatcttcctgcggcttgaggattatttctgggtcaagacgccatctgcttacgagctgccctatgggaccaaggggagtgaggatctgctcctccgggtgctagccatcaccagctcctccatccccaagaacatccagagcctcaggtgccgccgctgtgtggtcgtggggaacgggcaccggctgcggaacagctcactgggagatgccatcaacaagtacgatgtggtcatcagattgaacaatgccccagtggctggctatgagggtgacgtgggctccaagaccaccatgcgtctcttctaccctgaatctgcccacttcgaccccaaagtagaaaacaacccagacacactcctcgtcctggtagctttcaaggcaatggacttccactggattgagaccatcctgagtgataagaagcgggtgcgaaagggtttctggaaacagcctcccctcatctgggatgtcaatcctaaacagattcggattctcaaccccttcttcatggagattgcagctgacaaactgctgagcctgccaatgcaacagccacggaagattaagcagaagcccaccacgggcctgttggccatcacgctggccctccacctctgtgacttggtgcacattgccggctttggctacccagacgcctacaacaagaagcagaccattcactactatgagcagatcacgctcaagtccatggcggggtcaggccataatgtctcccaagaggccctggccattaagcggatgctggagatgggagctatcaagaacctcacgtccttctgacctgggcaagagctgtagcctgtcggttgcctactctgctgtctgggtgacccccatgcgtggctgtgggggtggctggtgccagtatgacccacttggactcaccccctcttggggagggagttctgggcctggccaggtctgagatgaggccatgcccctggctgctcttatggagccgagatccagtcagggtgggggcgctggagccgtgggagcccggccagggcagggggctcgttgctgtggcaccccctctctgccagcaccaagagattatttaatgggctatttaattaaggggtaggaaggtgctgtgggctggtcccacacatccaggaaagaggccagtagagaattctgcccactttttataaaaacttacagcgatggccccaccaaggcctagacacggcactggcctcccaggagggcaggggcattgggaatgggtgggtgccctccagagaggggctgctacctcccagcaggcatgggaagagcactggtgtgggggttccaccgagaaggggacctcatctagaaaagaggttacaaacctaccattaaactatttttcctaaaacggaa

SEQ ID NO: 379791 - DNA, 637 bp, Homo sapiens
gcctcccctgcaggcggactcgcccgctcccaggccggacccgcgcccgggacagggacccggccgagtcgagccgtcgcgccagcgctgcgccgccggtcggtgcgcctagcggatcggagctgcgcgcggaaccgtgctgccccgccccgctccacccgtgagggtggcccgaggcagccgggatgacagctctccccaggaatcctgctgcctgctgagaaacatggtcagcaagtcccgctggaagctcctggccatgttggctctggtcctggtcgtcatggtgtggtattccatctcccgggaagacaggtacatcgagcttttttattttcccatcccagagaagaaggagccgtgcctccagggtgaggcagagagcaaggcctctaagctctttggcaactactcccgggatcagcccatcttcctgcggcttgaggattatttctgggtcaagacgccatctgcttacgagctgccctatgggaccaaggggagtggtaagttcctacccggctcgtgggaaccatgggctcaccctgaccacgttgcttcctattctctgccgtccacggccccagtgcccaagttctgagcctgactcgggtaccagggtcaggggaagaagaag

SEQ ID NO: 379792 - DNA, 428 bp, Homo sapiens
atttctaattctttttaatttttattttcgtgggtccatagtaggtataagtatttataaagtacattaaatattttgatacaggcataccatgtgtaataatgacatcagggtaaatgtgatatgcaacacctcaagtatgtattcttttctttttgttatacacaatctaattataatcttttagttattttaaagtgtaaaataaattattgttgactatactcaccctcttgtgctatcaaatactagatcttacttatttcatctaactatacttttgtacccattaactatgccttctcactagacacctacctcccagcaggcatgggaagagcactggtgtgggggttccaccgagaaggggacctcatctagaaaagaggttacaaacctaccattaaactatttttcctaaaacggaa

SEQ ID NO: 379793 - DNA, 2123 bp, Homo sapiens
gcctcccctgcaggcggactcgcccgctcccaggccggacccgcgcccgggacagggacccggccgagtcgagccgtcgcgccagcgctgcgccgccggtcggtgcgcctagcggatcggagctgcgcgcggaaccgtgctgccccgccccgctccacccgtgagggtggcccgaggcagccgggatgacagctctccccaggaatcctgctgcctgctgagaaacatggtcagcaagtcccgctggaagctcctggccatgttggctctggtcctggtcgtcatggtgtggtattccatctcccgggaagacaggtacatcgagcttttttattttcccatcccagagaagaaggagccgtgcctccagggtgaggcagagagcaaggcctctaagctctttggcaactactcccgggatcagcccatcttcctgcggcttgaggattatttctgggtcaagacgccatctgcttacgagctgccctatgggaccaaggggagtgaggatctgctcctccgggtgctagccatcaccagctcctccatccccaagaacatccagagcctcaggtgccgccgctgtgtggtcgtggggaacgggcaccggctgcggaacagctcactgggagatgccatcaacaagtacgatgtggtcatcagattgaacaatgccccagtggctggctatgagggtgacgtgggctccaagaccaccatgcgtctcttctaccctgaatctgcccacttcgaccccaaagtagaaaacaacccagacacactcctcgtcctggtagctttcaaggcaatggacttccactggattgagaccatcctgagtgataagaagcgggtgcgaaagggtttctggaaacagcctcccctcatctgggatgtcaatcctaaacagattcggattctcaaccccttcttcatggagattgcagctgacaaactgctgagcctgccaatgcaacagccacggaagattaagcagaagcccaccacgggcctgttggccatcacgctggccctccacctctgtgacttggtgcacattgccggctttggctacccagacgcctacaacaagaagcagaccattcactactatgagcagatcacgctcaagtccatggcggggtcaggccataatgtctcccaagaggccctggccattaagcggatgctggagatgggagctatcaagaacctcacgtccttctgacctgggcaagagctgtagcctgtcggttgcctactctgctgtctgggtgacccccatgcgtggctgtgggggtggctggtgccagtatgacccacttggactcaccccctcttggggagggagttctgggcctggccaggtctgagatgaggccatgcccctggctgctcttatggagccgagatccagtcagggtgggggcgctggagccgtgggagcccggccagggcagggggctcgttgctgtggcaccccctctctgccagcaccaagagattatttaatgggctatttaattaaggggtaggaaggtgctgtgggctggtcccacacatccaggaaagaggccagtagagaattctgcccactttttataaaaacttacagcgatggccccaccaaggcctagacacggcactggcctcccaggagggcaggggcattgggaatgggtgggtgccctccagagaggggctgctacctcccagcaggcatgggaagagcactggtgtgggggttccaccgagaaggggacctcatctagaaaagaggttacaaacctaccattaaactatttttcctaaaacggaacaaaaaaaaaaaaaacgacacgtagcaacaaaactgtgttgggcgaggctgtggccctgaaaaagttttataacacaatcggtgtgggagcacggggcccccagtaggtatggggaacatggggccatacacgtggtccccaagagaaaccgtgggcacgggaacatgaggcgtggggagtttcccccagtaagaaaacggcccggggcggacaccgaggtgttcggggaaacaccccaaagggctccagaggggccaagagcagaccaacacagggggatccaaggagcccagataattagcc

SEQ ID NO: 379794 - DNA, 1766 bp, Homo sapiens
gtttggctggattgatgatggagaggcaggcagtgaccagaccaagagacgccttggatggtggagaataggtgaccctctgttgggtaaaagaggactcaagccctcacacagtggcccgaggcagccgggatgacagctctccccaggaatcctgctgcctgctgagaaacatggtcagcaagtcccgctggaagctcctggccatgttggctctggtcctggtcgtcatggtgtggtattccatctcccgggaagacaggtacatcgagcttttttattttcccatcccagagaagaaggagccgtgcctccagggtgaggcagagagcaaggcctctaagctctttggcaactactcccgggatcagcccatcttcctgcggcttgaggattatttctgggtcaagacgccatctgcttacgagctgccctatgggaccaaggggagtgaggatctgctcctccgggtgctagccatcaccagctcctccatccccaagaacatccagagcctcaggtgccgccgctgtgtggtcgtggggaacgggcaccggctgcggaacagctcactgggagatgccatcaacaagtacgatgtggtcatcagattgaacaatgccccagtggctggctatgagggtgacgtgggctccaagaccaccatgcgtctcttctaccctgaatctgcccacttcgaccccaaagtagaaaacaacccagacacactcctcgtcctggtagctttcaaggcaatggacttccactggattgagaccatcctgagtgataagaagcgggtgcgaaagggtttctggaaacagcctcccctcatctgggatgtcaatcctaaacagattcggattctcaaccccttcttcatggagattgcagctgacaaactgctgagcctgccaatgcaacagccacggaagattaagcagaagcccaccacgggcctgttggccatcacgctggccctccacctctgtgacttggtgcacattgccggctttggctacccagacgcctacaacaagaagcagaccattcactactatgagcagatcacgctcaagtccatggcggggtcaggccataatgtctcccaagaggccctggccattaagcggatgctggagatgggagctatcaagaacctcacgtccttctgacctgggcaagagctgtagcctgtcggttgcctactctgctgtctgggtgacccccatgcgtggctgtgggggtggctggtgccagtatgacccacttggactcaccccctcttggggagggagttctgggcctggccaggtctgagatgaggccatgcccctggctgctcttatggagccgagatccagtcagggtgggggcgctggagccgtgggagcccggccagggcagggggctcgttgctgtggcaccccctctctgccagcaccaagagattatttaatgggctatttaattaaggggtaggaaggtgctgtgggctggtcccacacatccaggaaagaggccagtagagaattctgcccactttttataaaaacttacagcgatggccccaccaaggcctagacacggcactggcctcccaggagggcaggggcattgggaatgggtgggtgccctccagagaggggctgctacctcccagcaggcatgggaagagcactggtgtgggggttccaccgagaaggggacctcatctagaaaagaggttacaaacctaccattaaactatttttcctaaaacggaa

SEQ ID NO: 379795 - DNA, 1729 bp, Homo sapiens
aaggctcaggtgaaccagtttcatctgacctgcttgctaactcaaacatggctgcccaactgcgtgggctggcaaggtggcccgaggcagccgggatgacagctctccccaggaatcctgctgcctgctgagaaacatggtcagcaagtcccgctggaagctcctggccatgttggctctggtcctggtcgtcatggtgtggtattccatctcccgggaagacaggtacatcgagcttttttattttcccatcccagagaagaaggagccgtgcctccagggtgaggcagagagcaaggcctctaagctctttggcaactactcccgggatcagcccatcttcctgcggcttgaggattatttctgggtcaagacgccatctgcttacgagctgccctatgggaccaaggggagtgaggatctgctcctccgggtgctagccatcaccagctcctccatccccaagaacatccagagcctcaggtgccgccgctgtgtggtcgtggggaacgggcaccggctgcggaacagctcactgggagatgccatcaacaagtacgatgtggtcatcagattgaacaatgccccagtggctggctatgagggtgacgtgggctccaagaccaccatgcgtctcttctaccctgaatctgcccacttcgaccccaaagtagaaaacaacccagacacactcctcgtcctggtagctttcaaggcaatggacttccactggattgagaccatcctgagtgataagaagcgggtgcgaaagggtttctggaaacagcctcccctcatctgggatgtcaatcctaaacagattcggattctcaaccccttcttcatggagattgcagctgacaaactgctgagcctgccaatgcaacagccacggaagattaagcagaagcccaccacgggcctgttggccatcacgctggccctccacctctgtgacttggtgcacattgccggctttggctacccagacgcctacaacaagaagcagaccattcactactatgagcagatcacgctcaagtccatggcggggtcaggccataatgtctcccaagaggccctggccattaagcggatgctggagatgggagctatcaagaacctcacgtccttctgacctgggcaagagctgtagcctgtcggttgcctactctgctgtctgggtgacccccatgcgtggctgtgggggtggctggtgccagtatgacccacttggactcaccccctcttggggagggagttctgggcctggccaggtctgagatgaggccatgcccctggctgctcttatggagccgagatccagtcagggtgggggcgctggagccgtgggagcccggccagggcagggggctcgttgctgtggcaccccctctctgccagcaccaagagattatttaatgggctatttaattaaggggtaggaaggtgctgtgggctggtcccacacatccaggaaagaggccagtagagaattctgcccactttttataaaaacttacagcgatggccccaccaaggcctagacacggcactggcctcccaggagggcaggggcattgggaatgggtgggtgccctccagagaggggctgctacctcccagcaggcatgggaagagcactggtgtgggggttccaccgagaaggggacctcatctagaaaagaggttacaaacctaccattaaactatttttcctaaaacggaa

SEQ ID NO: 379796 - DNA, 1784 bp, Homo sapiens
gtttggctggattgatgatggagaggcaggcagtgaccagaccaagagacgccttggatggtggagaataggtgaccctctgttgggtaaaagaggactcaagccctcacacagtggcccgaggcagccgggatgacagctctccccaggaatcctgctgcctgctgagaaacatggtcagcaagtcccgctggaagctcctggccatgttggctctggtcctggtcgtcatggtgtggtattccatctcccgggaagacaggtacatcgagcttttttattttcccatcccagagaagaaggagccgtgcctccagggtgaggcagagagcaaggcctctaagctctttggcaagctttcacctctgtgcagctactcccgggatcagcccatcttcctgcggcttgaggattatttctgggtcaagacgccatctgcttacgagctgccctatgggaccaaggggagtgaggatctgctcctccgggtgctagccatcaccagctcctccatccccaagaacatccagagcctcaggtgccgccgctgtgtggtcgtggggaacgggcaccggctgcggaacagctcactgggagatgccatcaacaagtacgatgtggtcatcagattgaacaatgccccagtggctggctatgagggtgacgtgggctccaagaccaccatgcgtctcttctaccctgaatctgcccacttcgaccccaaagtagaaaacaacccagacacactcctcgtcctggtagctttcaaggcaatggacttccactggattgagaccatcctgagtgataagaagcgggtgcgaaagggtttctggaaacagcctcccctcatctgggatgtcaatcctaaacagattcggattctcaaccccttcttcatggagattgcagctgacaaactgctgagcctgccaatgcaacagccacggaagattaagcagaagcccaccacgggcctgttggccatcacgctggccctccacctctgtgacttggtgcacattgccggctttggctacccagacgcctacaacaagaagcagaccattcactactatgagcagatcacgctcaagtccatggcggggtcaggccataatgtctcccaagaggccctggccattaagcggatgctggagatgggagctatcaagaacctcacgtccttctgacctgggcaagagctgtagcctgtcggttgcctactctgctgtctgggtgacccccatgcgtggctgtgggggtggctggtgccagtatgacccacttggactcaccccctcttggggagggagttctgggcctggccaggtctgagatgaggccatgcccctggctgctcttatggagccgagatccagtcagggtgggggcgctggagccgtgggagcccggccagggcagggggctcgttgctgtggcaccccctctctgccagcaccaagagattatttaatgggctatttaattaaggggtaggaaggtgctgtgggctggtcccacacatccaggaaagaggccagtagagaattctgcccactttttataaaaacttacagcgatggccccaccaaggcctagacacggcactggcctcccaggagggcaggggcattgggaatgggtgggtgccctccagagaggggctgctacctcccagcaggcatgggaagagcactggtgtgggggttccaccgagaaggggacctcatctagaaaagaggttacaaacctaccattaaactatttttcctaaaacggaa

SEQ ID NO: 379797 - DNA, 1723 bp, Homo sapiens
gcctcccctgcaggcggactcgcccgctcccaggccggacccgcgcccgggacagggacccggccgagtcgagccgtcgcgccagcgctgcgccgccggtcggtgcgcctagcggatcggagctgcgcgcggaaccgtgctgccccgccccgctccacccgtgagggtggcccgaggcagccgggatgacagctctccccaggaatcctgctgcctgctgagaaacatggtcagcaagtcccgctggaagctcctggccatgttggctctggtcctggtcgtcatggtgtggtattccatctcccgggaagacaggtacatcgagcttttttattttcccatcccagagaagaaggagccgtgcctccagggtgaggcagagagcaaggcctctaagctctttggcaactactcccgggatcagcccatcttcctgcggcttgaggattatttctgggtcaagacgccatctgcttacgagctgccctatgggaccaaggggagtgaggatctgctcctccgggtgctagccatcaccagctcctccatccccaagaacatccagagattgaacaatgccccagtggctggctatgagggtgacgtgggctccaagaccaccatgcgtctcttctaccctgaatctgcccacttcgaccccaaagtagaaaacaacccagacacactcctcgtcctggtagctttcaaggcaatggacttccactggattgagaccatcctgagtgataagaagcgggtgcgaaagggtttctggaaacagcctcccctcatctgggatgtcaatcctaaacagattcggattctcaaccccttcttcatggagattgcagctgacaaactgctgagcctgccaatgcaacagccacggaagattaagcagaagcccaccacgggcctgttggccatcacgctggccctccacctctgtgacttggtgcacattgccggctttggctacccagacgcctacaacaagaagcagaccattcactactatgagcagatcacgctcaagtccatggcggggtcaggccataatgtctcccaagaggccctggccattaagcggatgctggagatgggagctatcaagaacctcacgtccttctgacctgggcaagagctgtagcctgtcggttgcctactctgctgtctgggtgacccccatgcgtggctgtgggggtggctggtgccagtatgacccacttggactcaccccctcttggggagggagttctgggcctggccaggtctgagatgaggccatgcccctggctgctcttatggagccgagatccagtcagggtgggggcgctggagccgtgggagcccggccagggcagggggctcgttgctgtggcaccccctctctgccagcaccaagagattatttaatgggctatttaattaaggggtaggaaggtgctgtgggctggtcccacacatccaggaaagaggccagtagagaattctgcccactttttataaaaacttacagcgatggccccaccaaggcctagacacggcactggcctcccaggagggcaggggcattgggaatgggtgggtgccctccagagaggggctgctacctcccagcaggcatgggaagagcactggtgtgggggttccaccgagaaggggacctcatctagaaaagaggttacaaacctaccattaaactatttttcctaaaacggaa

SEQ ID NO: 379798 - DNA, 1789 bp, Homo sapiens
tgctgtcctgctttaaaggagagggcagccaccatggctcacgcctgtaatcccagcgctttgggaggcagaggtgggtggatcgcttgagcccaggagttcgagatcagcctgggcaacgtggtgaaaccccatctctttaaaaaaatagagcgccacccccataaagggtcacacagttagtgcatgtcagagcacccaggtcttctgaatgaggtcaggttctccaaggaggagggcagaacacttcctttcctttgaatgagttgcttaacgcttttgtaagccttggttttctcatctgtaaaatggggctgatgataatagctacctccaagtgtttttgtgagactagatgagataatgttttatagtaggtaggtaaaatactaaacatagtgtctggcacatagtgtttaaaaagtaactgatatgatgatggctgtcattctgattgttagtcttatctctacaggccccaggcctcccccagatgtgtggagctgtaccatccagaatggtagccgctaggcacatgtggctatttacttatttatatttgtttatttttagagatgggggggtctcactatgttgcccaggctggagtgcagcagctcttcacaggtgcattcttagcgcacgacagcccaggagtcctgggctcaagcagtcctctgacctcggcctcctgagttgctggaactatgggcatatgcactactgcacccagcacatgtggcgatttaaatttacaatttaattaattaaaatttaataaaataaattcagttcctcagctgcactggccccatttgcgtgctcgttagctcgtggcttgtcttgttggacagcgcagatggagaacgtttccgtgactgcaggaagttccactgcagagcgctggcagagatgatggtgggaggagcagggctcccactaacaccctcctgcccctgttcctcagaagcccaccacgggcctgttggccatcacgctggccctccacctctgtgacttggtgcacattgccggctttggctacccagacgcctacaacaagaagcagaccattcactactatgagcagatcacgctcaagtccatggcggggtcaggccataatgtctcccaagaggccctggccattaagcggatgctggagatgggagctatcaagaacctcacgtccttctgacctgggcaagagctgtagcctgtcggttgcctactctgctgtctgggtgacccccatgcgtggctgtgggggtggctggtgccagtatgacccacttggactcaccccctcttggggagggagttctgggcctggccaggtctgagatgaggccatgcccctggctgctcttatggagccgagatccagtcagggtgggggcgctggagccgtgggagcccggccagggcagggggctcgttgctgtggcaccccctctctgccagcaccaagagattatttaatgggctatttaattaaggggtaggaaggtgctgtgggctggtcccacacatccaggaaagaggccagtagagaattctgcccactttttataaaaacttacagcgatggccccaccaaggcctagacacggcactggcctcccaggagggcaggggcattgggaatgggtgggtgccctccagagaggggctgctacctcccagcaggcatgggaagagcactggtgtgggggttccaccgagaaggggacctcatctagaaaagaggttacaaacctaccattaaactatttttcctaaaacggaa

SEQ ID NO: 379799 - DNA, 1573 bp, Homo sapiens
gcctcccctgcaggcggactcgcccgctcccaggccggacccgcgcccgggacagggacccggccgagtcgagccgtcgcgccagcgctgcgccgccggtcggtgcgcctagcggatcggagctgcgcgcggaaccgtgctgccccgccccgctccacccgtgagggtggcccgaggcagccgggatgacagctctccccaggaatcctgctgcctgctgagaaacatggtcagcaagtcccgctggaagctcctggccatgttggctctggtcctggtcgtcatggtgtggtattccatctcccgggaagacaggtacatcgagcttttttattttcccatcccagagaagaaggagccgtgcctccagggtgaggcagagagcaaggcctctaagctctttggcaactactcccgggatcagcccatcttcctgcggcttgaggattatttctgggtcaagacgccatctgcttacgagctgccctatgggaccaaggggagtgaggatctgctcctccgggtgctagccatcaccagctcctccatccccaagaacatccagagattgaacaatgccccagtggctggctatgagggtgacgtgggctccaagaccaccatgcgtctcttctaccctgaatctgcccacttcgaccccaaagtagaaaacaacccagacacactcctcgtcctggtagctttcaaggcaatggacttccactggattgagaccatcctgagtgataagaagcgggtgcgaaagggtttctggaaacagcctcccctcatctgggatgtcaatcctaaacagattcggattctcaaccccttcttcatggagattgcagctgacaaactgctgagcctgccaatgcaacagccacggaagattaagcaggatgcggaatttggtcagagccgttcatgtcagagctcagcagaatggcagctgaaccctgggagatcactgcctgttctgagaaaggcctgcaattgtgtcttcacgatgcttttccaagacagccaaggcaggtataattttcctcagcaagaaagaggaacctcggaggtgtgcaccgcctggctggccacccaggtattggcaaaagtgactgtcgggctgctggcccggcccccgcccgccgtccctggagcactcacgatgcggtccggcggcggcgtgctccggatgaagcacttgatctggcccttctcgccgtggagggcgtgctgggtctgggtgctggagatgatggggggtcctgttgagaaacagcgtcccattaggcacccgggaagggcacgtccctgctggcgccctcttgggtgggttcagaagtgtattcattaatccaagcattcagcaaacatttgccgaaggcctgtatgtgcaaggtaaagtgcaaggtagaggactcagagataaattaggcattcagtcataaacctctcaagggatcatgagcgaatgcttctaagtcagaacccccagaagatacaaataactgtaataaaaggtggtgagtgttagtaccacaggagcggtgcagataaagtgctaaccgacttc

SEQ ID NO: 379800 - DNA, 1901 bp, Homo sapiens
  misc_feature (99)..(100): n is a, c, g, or t
tcggatcctctccgctcccttggagtgagcaagcgggacagttctgcggaaagtttccgcccccaatcccctcagcctgcgcccggactgaagcggcgnnccccacctccagcatcctcgagcgatggtttctcccacaactaccccggtcaggtccagcacttgggagctgactgtgctggaggtgacaggctttgcggggtccgcctgtgtgcaggagtcgcaaggtcgctgagcaggacccaaaggtggcccgaggcagccgggatgacagctctccccaggaatcctgctgcctgctgagaaacatggtcagcaagtcccgctggaagctcctggccatgttggctctggtcctggtcgtcatggtgtggtattccatctcccgggaagacaggtacatcgagcttttttattttcccatcccagagaagaaggagccgtgcctccagggtgaggcagagagcaaggcctctaagctctttggcaactactcccgggatcagcccatcttcctgcggcttgaggattatttctgggtcaagacgccatctgcttacgagctgccctatgggaccaaggggagtgaggatctgctcctccgggtgctagccatcaccagctcctccatccccaagaacatccagagcctcaggtgccgccgctgtgtggtcgtggggaacgggcaccggctgcggaacagctcactgggagatgccatcaacaagtacgatgtggtcatcagattgaacaatgccccagtggctggctatgagggtgacgtgggctccaagaccaccatgcgtctcttctaccctgaatctgcccacttcgaccccaaagtagaaaacaacccagacacactcctcgtcctggtagctttcaaggcaatggacttccactggattgagaccatcctgagtgataagaagcgggtgcgaaagggtttctggaaacagcctcccctcatctgggatgtcaatcctaaacagattcggattctcaaccccttcttcatggagattgcagctgacaaactgctgagcctgccaatgcaacagccacggaagattaagcagaagcccaccacgggcctgttggccatcacgctggccctccacctctgtgacttggtgcacattgccggctttggctacccagacgcctacaacaagaagcagaccattcactactatgagcagatcacgctcaagtccatggcggggtcaggccataatgtctcccaagaggccctggccattaagcggatgctggagatgggagctatcaagaacctcacgtccttctgacctgggcaagagctgtagcctgtcggttgcctactctgctgtctgggtgacccccatgcgtggctgtgggggtggctggtgccagtatgacccacttggactcaccccctcttggggagggagttctgggcctggccaggtctgagatgaggccatgcccctggctgctcttatggagccgagatccagtcagggtgggggcgctggagccgtgggagcccggccagggcagggggctcgttgctgtggcaccccctctctgccagcaccaagagattatttaatgggctatttaattaaggggtaggaaggtgctgtgggctggtcccacacatccaggaaagaggccagtagagaattctgcccactttttataaaaacttacagcgatggccccaccaaggcctagacacggcactggcctcccaggagggcaggggcattgggaatgggtgggtgccctccagagaggggctgctacctcccagcaggcatgggaagagcactggtgtgggggttccaccgagaaggggacctcatctagaaaagaggttacaaacctaccattaaactatttttcctaaaacggaa

SEQ ID NO: 379801 - DNA, 1819 bp, Homo sapiens
gcctcccctgcaggcggactcgcccgctcccaggccggacccgcgcccgggacagggacccggccgagtcgagccgtcgcgccagcgctgcgccgccggtcggtgcgcctagcggatcggagctgcgcgcggaaccgtgctgccccgccccgctccacccgtgagggtggcccgaggcagccgggatgacagctctccccaggaatcctgctgcctgctgagaaacatggtcagcaagtcccgctggaagctcctggccatgttggctctggtcctggtcgtcatggtgtggtattccatctcccgggaagacaggtacatcgagcttttttattttcccatcccagagaagaaggagccgtgcctccagggtgaggcagagagcaaggcctctaagctctttggcaactactcccgggatcagcccatcttcctgcggcttgaggattatttctgggtcaagacgccatctgcttacgagctgccctatgggaccaaggggagtgaggatctgctcctccgggtgctagccatcaccagctcctccatccccaagaacatccagagcctcaggtgccgccgctgtgtggtcgtggggaacgggcaccggctgcggaacagctcactgggagatgccatcaacaagtacgatgtggtcatcagattgaacaatgccccagtggctggctatgagggtgacgtgggctccaagaccaccatgcgtctcttctaccctgaatctgcccacttcgaccccaaagtagaaaacaacccagacacactcctcgtcctggtagctttcaaggcaatggacttccactggattgagaccatcctgagtgataagaagcgggtgcgaaagggtttctggaaacagcctcccctcatctgggatgtcaatcctaaacagattcggattctcaaccccttcttcatggagattgcagctgacaaactgctgagcctgccaatgcaacagccacggaagattaagcagaagcccaccacgggcctgttggccatcacgctggccctccacctctgtgacttggtgcacattgccggctttggctacccagacgcctacaacaagaagcagaccattcactactatgagcagatcacgctcaagtccatggcggggtcaggccataatgtctcccaagaggccctggccattaagcggatgctggagatgggagctatcaagaacctcacgtccttctgacctgggcaagagctgtagcctgtcggttgcctactctgctgtctgggtgacccccatgcgtggctgtgggggtggctggtgccagtatgacccacttggactcaccccctcttggggagggagttctgggcctggccaggtctgagatgaggccatgcccctggctgctcttatggagccgagatccagtcagggtgggggcgctggagccgtgggagcccggccagggcagggggctcgttgctgtggcaccccctctctgccagcaccaagagattatttaatgggctatttaattaaggggtaggaaggtgctgtgggctggtcccacacatccaggaaagaggccagtagagaattctgcccactttttataaaaacttacagcgatggccccaccaaggcctagacacggcactggcctcccaggagggcaggggcattgggaatgggtgggtgccctccagagaggggctgctacctcccagcaggcatgggaagagcactggtgtgggggttccaccgagaaggggacctcatctagaaaagaggttacaaacctaccattaaactatttttcctaaaacggaa

SEQ ID NO: 379802 - DNA, 2317 bp, Homo sapiens
gcctcccctgcaggcggactcgcccgctcccaggccggacccgcgcccgggacagggacccggccgagtcgagccgtcgcgccagcgctgcgccgccggtcggtgcgcctagcggatcggagctgcgcgcggaaccgtgctgccccgccccgctccacccgtgagggtggcccgaggcagccgggatgacagctctccccaggaatcctgctgcctgctgagaaacatggtcagcaagtcccgctggaagctcctggccatgttggctctggtcctggtcgtcatggtgtggtattccatctcccgggaagacaggtacatcgagcttttttattttcccatcccagagaagaaggagccgtgcctccagggtgaggcagagagcaaggcctctaagctctttggcaactactcccgggatcagcccatcttcctgcggcttgaggattatttctgggtcaagacgccatctgcttacgagctgccctatgggaccaaggggagtgaggatctgctcctccgggtgctagccatcaccagctcctccatccccaagaacatccagagcctcaggtgccgccgctgtgtggtcgtggggaacgggcaccggctgcggaacagctcactgggagatgccatcaacaagtacgatgtggtcatcagattgaacaatgccccagtggctggctatgagggtgacgtgggctccaagaccaccatgcgtctcttctaccctgaatctgcccacttcgaccccaaagtagaaaacaacccagacacactcctcgtcctggtagctttcaaggcaatggacttccactggattgagaccatcctgagtgataagaagcgggtgcgaaagggtttctggaaacagcctcccctcatctgggatgtcaatcctaaacagattcggattctcaaccccttcttcatggagattgcagctgacaaactgctgagcctgccaatgcaacagccacggaagattaagcagaagcccaccacgggcctgttggccatcacgctggccctccacctctgtgacttggtgcacattgccggctttggctacccagacgcctacaacaagaagcagaccattcactactatgagcagatcacgctcaagtccatggcggggtcaggccataatgtctcccaagaggccctggccattaagcggatgctggagatgggagctatcaagaacctcacgtccttctgacctgggcaagagctgtagcctgtcggttgcctactctgctgtctgggtgacccccatgcgtggctgtgggggtggctggtgccagtatgacccacttggactcaccccctcttggggagggagttctgggcctggccaggtctgagatgaggccatgcccctggctgctcttatggagccgagatccagtcagggtgggggcgctggagccgtgggagcccggccagggcagggggctcgttgctgtggcaccccctctctgccagcaccaagagattatttaatgggctatttaattaaggggtaggaaggtgctgtgggctggtcccacacatccaggaaagaggccagtagagaattctgcccactttttataaaaacttacagcgatggccccaccaaggcctagacacggcactggcctcccaggagggcaggggcattgggaatgggtgggtgccctccagagaggggctgctacctcccagcaggcatgggaagagcactggtgtgggggttccaccgagaaggggacctcatctagaaaagaggttacaaacctaccattaaactatttttcctaaaacggaaaaaaaaaaaacaaaaataaaataaagaaactcacaaacaaaaccacaaaaaacaaaccaaaaccatgacaatagcacaacaccacccacactctaataacaaatcctcatcaaaaacgctaacaacaaggcttcctacaactgtggaatcggtcagagcaactatgtggcattagacacattgatttggtcaccgttgaaaagactcaatacgcagcattgagctggttgggctgcatgcgcgaatgatctgtgaacgggaacgaagtagaaaaggctccggactgcgcccgccgggaacggccataggcgctctggggtgctggccctggcgatggacagacccagtggttcggaaggggacggtgcgtgtggcgcggtgagagaccggaccagacctcgagcgactccagagtggtggtttggaaataccagaggtccgaccctggagttgcacggcgaggaagactgggcgatgataagaagcacgaggcggcgc

SEQ ID NO: 379803 - DNA, 1781 bp, Homo sapiens
gcctcccctgcaggcggactcgcccgctcccaggccggacccgcgcccgggacagggacccggccgagtcgagccgtcgcgccagcgctgcgccgccggtcggtgcgcctagcggatcggagctgcgcgcggaaccgtgctgccccgccccgctccacccgtgagggtggcccgaggcagccgggatgacagctctccccaggaatcctgctgcctgctgagaaacatggtcagcaagtcccgctggaagctcctggccatgttggctctggtcctggtcgtcatggtgtggtattccatctcccgggaagacaggtacatcgagcttttttattttcccatcccagagaagaaggagccgtgcctccagggtgaggcagagagcaaggcctctaagctctttggcaactactcccgggatcagcccatcttcctgcggcttgaggattatttctgggtcaagacgccatctgcttacgagctgccctatgggaccaaggggagtgaggatctgctcctccgggtgctagccatcaccagctcctccatccccaagaacatccagagcctcaggtgccgccgctgtgtggtcgtggggaacgggcaccggctgcggaacagctcactgggagatgccatcaacaagtacgatgtggtcatcagattgaacaatgccccagtggctggctatgagggtgacgtgggctccaagaccaccatgcgtctcttctaccctgaatctgcccacttcgaccccaaagtagaaaacaacccagacacactcctcgtcctggtagctttcaaggcaatggacttccactggattgagaccatcctgagtgataagaagcgggtgcgaaagggtttctggaaacagcctcccctcatctgggatgtcaatcctaaacagattcggattctcaaccccttcttcatggagattgcagctgacaaactgctgagcctgccaatgcaacagccacggaagattaagcagaagcccaccacgggcctgttggccatcacgctggccctccacctctgtgacttggtgcacattgccggctttggctacccagacgcctacaacaagaagcagaccattcactactatgagcagatcacgctcaagtccatggcggggtcaggccataatgtctcccaagaggccctggccattaagcggatgctggagatgggagctatcaagaacctcacgtccttctgacctgggcaagagctgtagcctgtcggttgcctactctgctgtctgggtgacccccatgcgtggctgtgggggtggctggtgccagtatgacccacttggactcaccccctcttggggagggagttctgggcctggccaggtctgagatgaggccatgcccctggctgctcttatggagccgagatccagtcagggtgggggcgctggagccgtgggagcccggccagggcagggggctcgttgctgtggcaccccctctctgccagcaccaagagattatttaatgggctatttaattaaggggtaggaaggtgctgtgggctggtcccacacatccaggaaagaggccagtagagaattctgcccactttttataaaaacttacagcgatggccccaccaaggcctagacacggcactggccctccagagaggggctgctacctcccagcaggcatgggaagagcactggtgtgggggttccaccgagaaggggacctcatctagaaaagaggttacaaacctaccattaaactatttttcctaaaacggaa

SEQ ID NO: 379804 - DNA, 1833 bp, Homo sapiens
cgcttcctggggcttggtcctggggtttcatctcaggttgacccccgttaggaggaagtaagtaggaaggaaggagatttcctgggtattagggtgtcctcaagcctgcagctctcctgggactgcacagagtttactgtcggacatcagttctgatatggtgcagcagacatggagctggtggcccgaggcagccgggatgacagctctccccaggaatcctgctgcctgctgagaaacatggtcagcaagtcccgctggaagctcctggccatgttggctctggtcctggtcgtcatggtgtggtattccatctcccgggaagacaggtacatcgagcttttttattttcccatcccagagaagaaggagccgtgcctccagggtgaggcagagagcaaggcctctaagctctttggcaactactcccgggatcagcccatcttcctgcggcttgaggattatttctgggtcaagacgccatctgcttacgagctgccctatgggaccaaggggagtgaggatctgctcctccgggtgctagccatcaccagctcctccatccccaagaacatccagagcctcaggtgccgccgctgtgtggtcgtggggaacgggcaccggctgcggaacagctcactgggagatgccatcaacaagtacgatgtggtcatcagattgaacaatgccccagtggctggctatgagggtgacgtgggctccaagaccaccatgcgtctcttctaccctgaatctgcccacttcgaccccaaagtagaaaacaacccagacacactcctcgtcctggtagctttcaaggcaatggacttccactggattgagaccatcctgagtgataagaagcgggtgcgaaagggtttctggaaacagcctcccctcatctgggatgtcaatcctaaacagattcggattctcaaccccttcttcatggagattgcagctgacaaactgctgagcctgccaatgcaacagccacggaagattaagcagaagcccaccacgggcctgttggccatcacgctggccctccacctctgtgacttggtgcacattgccggctttggctacccagacgcctacaacaagaagcagaccattcactactatgagcagatcacgctcaagtccatggcggggtcaggccataatgtctcccaagaggccctggccattaagcggatgctggagatgggagctatcaagaacctcacgtccttctgacctgggcaagagctgtagcctgtcggttgcctactctgctgtctgggtgacccccatgcgtggctgtgggggtggctggtgccagtatgacccacttggactcaccccctcttggggagggagttctgggcctggccaggtctgagatgaggccatgcccctggctgctcttatggagccgagatccagtcagggtgggggcgctggagccgtgggagcccggccagggcagggggctcgttgctgtggcaccccctctctgccagcaccaagagattatttaatgggctatttaattaaggggtaggaaggtgctgtgggctggtcccacacatccaggaaagaggccagtagagaattctgcccactttttataaaaacttacagcgatggccccaccaaggcctagacacggcactggcctcccaggagggcaggggcattgggaatgggtgggtgccctccagagaggggctgctacctcccagcaggcatgggaagagcactggtgtgggggttccaccgagaaggggacctcatctagaaaagaggttacaaacctaccattaaactatttttcctaaaacggaa

SEQ ID NO: 379805 - DNA, 1927 bp, Homo sapiens
gcctcccctgcaggcggactcgcccgctcccaggccggacccgcgcccgggacagggacccggccgagtcgagccgtcgcgccagcgctgcgccgccggtcggtgcgcctagcggatcggagctgcgcgcggaaccgtgctgccccgccccgctccacccgtgagggtggcccgaggcagccgggatgacagctctccccaggaatcctgctgcctgctgagaaacatggtcagcaagtcccgctggaagctcctggccatgttggctctggtcctggtcgtcatggtgtggtattccatctcccgggaagacaggtacatcgagcttttttattttcccatcccagagaagaaggagccgtgcctccagggtgaggcagagagcaaggcctctaagctctttggcaactactcccgggatcagcccatcttcctgcggcttgaggattatttctgggtcaagacgccatctgcttacgagctgccctatgggaccaaggggagtgaggatctgctcctccgggtgctagccatcaccagctcctccatccccaagaacatccagagcctcaggtgccgccgctgtgtggtcgtggggaacgggcaccggctgcggaacagctcactgggagatgccatcaacaagtacgatgtggtcatcagattgaacaatgccccagtggctggctatgagggtgacgtgggctccaagaccaccatgcgtctcttctaccctgaatctgcccacttcgaccccaaagtagaaaacaacccagacacactcctcgtcctggtagctttcaaggcaatggacttccactggattgagaccatcctgagtgataagaagcgggtgcgaaagggtttctggaaacagcctcccctcatctgggatgtcaatcctaaacagattcggattctcaaccccttcttcatggagattgcagctgacaaactgctgagcctgccaatgcaacagccacggaagattaagcagatggagaacgtttccgtgactgcaggaagttccactgcagagcgctggcagagatgatggtgggaggagcagggctcccactaacaccctcctgcccctgttcctcagaagcccaccacgggcctgttggccatcacgctggccctccacctctgtgacttggtgcacattgccggctttggctacccagacgcctacaacaagaagcagaccattcactactatgagcagatcacgctcaagtccatggcggggtcaggccataatgtctcccaagaggccctggccattaagcggatgctggagatgggagctatcaagaacctcacgtccttctgacctgggcaagagctgtagcctgtcggttgcctactctgctgtctgggtgacccccatgcgtggctgtgggggtggctggtgccagtatgacccacttggactcaccccctcttggggagggagttctgggcctggccaggtctgagatgaggccatgcccctggctgctcttatggagccgagatccagtcagggtgggggcgctggagccgtgggagcccggccagggcagggggctcgttgctgtggcaccccctctctgccagcaccaagagattatttaatgggctatttaattaaggggtaggaaggtgctgtgggctggtcccacacatccaggaaagaggccagtagagaattctgcccactttttataaaaacttacagcgatggccccaccaaggcctagacacggcactggcctcccaggagggcaggggcattgggaatgggtgggtgccctccagagaggggctgctacctcccagcaggcatgggaagagcactggtgtgggggttccaccgagaaggggacctcatctagaaaagaggttacaaacctaccattaaactatttttcctaaaacggaa

SEQ ID NO: 379806 - DNA, 1669 bp, Homo sapiens
gcctcccctgcaggcggactcgcccgctcccaggccggacccgcgcccgggacagggacccggccgagtcgagccgtcgcgccagcgctgcgccgccggtcggtgcgcctagcggatcggagctgcgcgcggaaccgtgctgccccgccccgctccacccgtgagggtggcccgaggcagccgggatgacagctctccccaggaatcctgctgcctgctgagaaacatggtcagcaagtcccgctggaagctcctggccatgttggctctggtcctggtcgtcatggtgtggtattccatctcccgggaagacaggtacatcgagcttttttattttcccatcccagagaagaaggagccgtgcctccagggtgaggcagagagcaaggcctctaagctctttggcaactactcccgggatcagcccatcttcctgcggcttgaggattatttctgggtcaagacgccatctgcttacgagctgccctatgggaccaaggggagtgaggatctgctcctccgggtgctagccatcaccagctcctccatccccaagaacatccagagcctcaggtgccgccgctgtgtggtcgtggggaacgggcaccggctgcggaacagctcactgggagatgccatcaacaagtacgatgtggtcatcagattgaacaatgccccagtggctggctatgagggtgacgtgggctccaagaccaccatgcgtctcttctaccctgaatctgcccacttcgaccccaaagtagaaaacaacccagacacactcctcgtcctggtagctttcaaggcaatggacttccactggattgagaccatcctgagtgataagaagcgggtgcgaaagggtttctggaaacagcctcccctcatctgggatgtcaatcctaaacagattcggattctcaaccccttcttcatggagattgcagctgacaaactgctgagcctgccaatgcaacagccacggaagattaagcaggatgcggaatttggtcagagccgttcatgtcagagctcagcagaatggcagctgaaccctgggagatcactgcctgttctgagaaaggcctgcaattgtgtcttcacgatgcttttccaagacagccaaggcaggtataattttcctcagcaagaaagaggaacctcggaggtgtgcaccgcctggctggccacccaggtattggcaaaagtgactgtcgggctgctggcccggcccccgcccgccgtccctggagcactcacgatgcggtccggcggcggcgtgctccggatgaagcacttgatctggcccttctcgccgtggagggcgtgctgggtctgggtgctggagatgatggggggtcctgttgagaaacagcgtcccattaggcacccgggaagggcacgtccctgctggcgccctcttgggtgggttcagaagtgtattcattaatccaagcattcagcaaacatttgccgaaggcctgtatgtgcaaggtaaagtgcaaggtagaggactcagagataaattaggcattcagtcataaacctctcaagggatcatgagcgaatgcttctaagtcagaacccccagaagatacaaataactgtaataaaaggtggtgagtgttagtaccacaggagcggtgcagataaagtgctaaccgacttc

SEQ ID NO: 379807 - DNA, 161 bp, Homo sapiens
cagtcgttataggtagcttctttcaaactatacccctgtccactctgaagtattcatattgctatgcagaatttgcttttagatcactctgttctccaactggcatctatgtctctttcatttcacgcacctattttatcttttactaaaagctgacacca

SEQ ID NO: 379808 - DNA, 1733 bp, Homo sapiens
cggaaatcgcggggagggtcaaaggagacccggtctccgaggctcatggcgatgctggtcctagtacccggacgagttatgcggcctctgggtggccaactttggcgcttcttgcctcgcggactcgagttttggggcccagccgaggggactgcgagagtcttgctgaggcagttctgcgcgcggcaagcggaggcgtggcgtgcctcggggcgccctggctattgcctgggaacccggcccctcagcactgcgaggccgccacccccgtggtcgcagaagggccccggagactccacgcgcccctcgaagcccgggcctgtttcctggaagtctttagcaatcacatttgctattggaggagctttactggctggaatgaagcacgtcaagaaagaaaaggcagagaagttagagaaggaacggcagcgacacatcggcaagcctttacttgggggaccgttttccctcacaactcatactggggagcgtaaaactgacaaggactacttgggtcagtggttattgatttattttggcttcactcattgccctgatgtctgtccagaagaactagaaaagatgattcaagtcgtggatgaaatagatagcattacaactctgccagatctaactccacttttcatcagcattgacccagagagggacacaaaagaagccatcgcaaattatgtgaaagaattttctcccaaactggttggcttgactggcacgagagaagaggtcgatcaagtggccagagcatacagagtgtattacagccctggccccaaggacgaagatgaagactacatagtggatcacacaataataatgtacttgattggaccagatggtgagtttctagattattttggccagaacaagaggaagggagaaatagctgcttcaattgccacacacatgaggccatacagaaaaaagagctagccaaagcagtgttgctggatgcagtattctcttgctaagaggaaggaaactgtctcgcataggagcctatataaatataaacatatatacgtgcactctacagaatggccttcataccatgagaacatttctgttttggatggggatgttacccttgcgttcaaccaaaattgattcttggaactgtaaagattacaacccaaagtctcccaggaagctgtggggagaccagaggatcaagctgaagtgaagccagtgaagagcccacctgtggaaggacatggcggggcgaggcacagccagtgcattcctgcctgcgaacaggccctcccagcagctttgccgcctctccatcgtcttgggcccttgctcaaatagctgtgggactgaatttcacagaaaagaatataatttccatagtgctcttgcttgcctcttcttgagttctttgctcttctgagttcttggtggctaataacagtcagattagggtctctgccattcagagttgatgcttgaaaactttagttttccttattaatgaatatcactatcagatttgactaatgaagaggaaatctattgtttgggggaaaaaaaacatcagtttgatttctctaggggttcttttatgtgatttttagctaagtggtgtgccaggttttcagtgacataccaaatggaaataagaggatattgatcacgagtgtgatgctgagtacctttctgcatatactggattgtactttgtgtaaagtaaacatactcagttttgctgttca

SEQ ID NO: 379809 - DNA, 365 bp, Homo sapiens
gataatccagaatatggatattaatgtttttaattacaaatgaaaacaaaaatatgtaagtcttatggaaacttcttggaccttgtagaatgtatctttggccccattttgagaaatactggcctactgccataagaatttgacttttgatgagattcgatgaggaattcatgctgtacatttgctaaatcatccaatagggggagacattcttcagcttcttaggtttttcattagtatgacttcagtcccttgaggtcacagattttcatccataggatggtttgggaaacttctgttatcatttaaggcactaaaggttctttctcgtgtggctccagtggggggcgacggggaggagacag

SEQ ID NO: 379810 - DNA, 489 bp, Homo sapiens
gataatccagaatatggatattaatgtttttaattacaaatgaaaacaaaaatatgtaagtcttatggaaacttcttggaccttgtagaatgtatctttggccccattttgagaaatactggcctactgccataagaatttgacttttgatgagattcgatgaggaattcatgctgtacatttgctaaatcatccaatagggggagacattcttcagcttcttaggtttttcattagtatgacttcagtcccttgaggtcacagattttcatccataggatggtttgggaaacttctgttatcatttaaggcacctgtggaaggacatggcggggcgaggcacagccagtgcattcctgcctgcgaacaggccctcccagcagctttgccgcctctccatcgtcttgggcccttgctcaaatagctgtgggtataggctgcttttcttcgaaatatccacaattcagatctcagtcacaagagtcgccg

SEQ ID NO: 379811 - DNA, 1980 bp, Homo sapiens
cggaaatcgcggggagggtcaaaggagacccggtctccgaggctcatggcgatgctggtcctagtacccggacgagttatgcggcctctgggtggccaactttggcgcttcttgcctcgcggactcgagttttggggcccagccgaggggactgcgagagtcttgctgaggcagttctgcgcgcggcaagcggaggcgtggcgtgcctcggggcgccctggctattgcctgggaacccggcccctcagcactgcgaggccgccacccccgtggtcgcagaagggccccggagactccacgcgcccctcgaagcccgggcctgtttcctggaagtctttagcaatcacatttgctattggaggagctttactggctggaatgaagcacgtcaagaaagaaaaggcagagaagttagagaaggaacggcagcgacacatcggcaagcctttacttgggggaccgttttccctcacaactcatactggggagcgtaaaactgacaaggactacttgggtcagtggttattgatttattttggcttcactcattgccctgatgtctgtccagaagaactagaaaagatgattcaagtcgtggatgaaatagatagcattacaactctgccagatctaactccacttttcatcagcattgacccagagagggacacaaaagaagccatcgcaaattatgtgaaagaattttctcccaaactggttggcttgactggcacgagagaagaggtcgatcaagtggccagagcatacagagtgtattacagccctggccccaaggacgaagatgaagactacatagtggatcacacaataataatgtacttgattggaccagatggtgagtttctagattattttggccagaacaagaggaagggagaaatagctgcttcaattgccacacacatgaggccatacagaaaaaagagctagccaaagcagtgttgctggatgcagtattctcttgctaagaggaaggaaactgtctcgcataggagcctatataaatataaacatatatacgtgcactctacagaatggccttcataccatgagaacatttctgttttggatggggatgttacccttgcgttcaaccaaaattgattcttggaactgtaaagattacaacccaaagtctcccaggaagctgtggggagaccagaggatcaagctgaagtgaagccagtgaagagcccacctgtggaaggacatggcggggcgaggcacagccagtgcattcctgcctgcgaacaggccctcccagcagctttgccgcctctccatcgtcttgggcccttgctcaaatagctgtgggactgaatttcacagaaaagaatataatttccatagtgctcttgcttgcctcttcttgagttctttgctcttctgagttcttggtggctaataacagtcagattagggtctctgccattcagagttgatgcttgaaaactttagttttccttattaatgaatatcactatcagatttgactaatgaagaggaaatctattgtttgggggaaaaaaaacatcagtttgatttctctaggggttcttttatgtgatttttagctaagtggtgtgccaggttttcagtgacataccaaatggaaataagaggatattgatcacgagtgtgatgctgagtacctttctgcatatactggattgtactttgtgtaaagtaaacatactcagttttgctgttcagacaagcgtgatctttttcatgggtgatgagtgggtacatagatggctgcacacagttctcagggaagagacccacaggctccagcgggcaggtgggtgggacgcttgctgaagtgcagttccccagacccagagctgaattcactgaatctgcagtatgatgcagagacctgcttccatgacagataccccaggtgactcggatgctggcggactgggaccatcccttaagaaagtgttttttggg

SEQ ID NO: 379812 - DNA, 1482 bp, Homo sapiens
ccacgccacccctcctcccccccgcccacccccccccccccccgccgactatcgctatggtatgagtcctgtttcctggaagtctttagcaatcacatttgctattggaggagctttactggctggaatgaagcacgtcaagaaagaaaaggcagagaagttagagaaggaacggcagcgacacatcggcaagcctttacttgggggaccgttttccctcacaactcatactggggagcgtaaaactgacaaggactacttgggtcagtggttattgatttattttggcttcactcattgccctgatgtctgtccagaagaactagaaaagatgattcaagtcgtggatgaaatagatagcattacaactctgccagatctaactccacttttcatcagcattgacccagagagggacacaaaagaagccatcgcaaattatgtgaaagaattttctcccaaactggttggcttgactggcacgagagaagaggtcgatcaagtggccagagcatacagagtgtattacagccctggccccaaggacgaagatgaagactacatagtggatcacacaataataatgtacttgattggaccagatggtgagtttctagattattttggccagaacaagaggaagggagaaatagctgcttcaattgccacacacatgaggccatacagaaaaaagagctagccaaagcagtgttgctggatgcagtattctcttgctaagaggaaggaaactgtctcgcataggagcctatataaatataaacatatatacgtgcactctacagaatggccttcataccatgagaacatttctgttttggatggggatgttacccttgcgttcaaccaaaattgattcttggaactgtaaagattacaacccaaagtctcccaggaagctgtggggagaccagaggatcaagctgaagtgaagccagtgaagagcccacctgtggaaggacatggcggggcgaggcacagccagtgcattcctgcctgcgaacaggccctcccagcagctttgccgcctctccatcgtcttgggcccttgctcaaatagctgtgggactgaatttcacagaaaagaatataatttccatagtgctcttgcttgcctcttcttgagttctttgctcttctgagttcttggtggctaataacagtcagattagggtctctgccattcagagttgatgcttgaaaactttagttttccttattaatgaatatcactatcagatttgactaatgaagaggaaatctattgtttgggggaaaaaaaacatcagtttgatttctctaggggttcttttatgtgatttttagctaagtggtgtgccaggttttcagtgacataccaaatggaaataagaggatattgatcacgagtgtgatgctgagtacctttctgcatatactggattgtactttgtgtaaagtaaacatactcagttttgctgttca

SEQ ID NO: 379813 - DNA, 948 bp, Homo sapiens
tcataggttcgcaggagatgaagactacatagtggatcacacaataataatgtacttgattggaccagatggtgagtttctagattattttggccagaacaagaggaagggagaaatagctgcttcaattgccacacacatgaggccatacagaaaaaagagctagccaaagcagtgttgctggatgcagtattctcttgctaagaggaaggaaactgtctcgcataggagcctatataaatataaacatatatacgtgcactctacagaatggccttcataccatgagaacatttctgttttggatggggatgttacccttgcgttcaaccaaaattgattcttggaactgtaaagattacaacccaaagtctcccaggaagctgtggggagaccagaggatcaagctgaagtgaagccagtgaagagcccacctgtggaaggacatggcggggcgaggcacagccagtgcattcctgcctgcgaacaggccctcccagcagctttgccgcctctccatcgtcttgggcccttgctcaaatagctgtgggactgaatttcacagaaaagaatataatttccatagtgctcttgcttgcctcttcttgagttctttgctcttctgagttcttggtggctaataacagtcagattagggtctctgccattcagagttgatgcttgaaaactttagttttccttattaatgaatatcactatcagatttgactaatgaagaggaaatctattgtttgggggaaaaaaaacatcagtttgatttctctaggggttcttttatgtgatttttagctaagtggtgtgccaggttttcagtgacataccaaatggaaataagaggatattgatcacgagtgtgatgctgagtacctttctgcatatactggattgtactttgtgtaaagtaaacatactcagttttgctgttca

SEQ ID NO: 379814 - DNA, 828 bp, Homo sapiens
gataatccagaatatggatattaatgtttttaattacaaatgaaaacaaaaatatgtaagtcttatggaaacttcttggaccttgtagaatgtatctttggccccattttgagaaatactggcctactgccataagaatttgacttttgatgagattcgatgaggaattcatgctgtacatttgctaaatcatccaatagggggagacattcttcagcttcttaggtttttcattagtatgacttcagtcccttgaggtcacagattttcatccataggatggtttgggaaacttctgttatcatttaaggcacctgtggaaggacatggcggggcgaggcacagccagtgcattcctgcctgcgaacaggccctcccagcagctttgccgcctctccatcgtcttgggcccttgctcaaatagctgtgggactgaatttcacagaaaagaatataatttccatagtgctcttgcttgcctcttcttgagttctttgctcttctgagttcttggtggctaataacagtcagattagggtctctgccattcagagttgatgcttgaaaactttagttttccttattaatgaatatcactatcagatttgactaatgaagaggaaatctattgtttgggggaaaaaaaacatcagtttgatttctctaggggttcttttatgtgatttttagctaagtggtgtgccaggttttcagtgacataccaaatggaaataagaggatattgatcacgagtgtgatgctgagtacctttctgcatatactggattgtactttgtgtaaagtaaacatactcagttttgctgttca

SEQ ID NO: 379815 - DNA, 1379 bp, Homo sapiens
cggaaatcgcggggagggtcaaaggagacccggtctccgaggctcatggcgatgctggtcctagtacccggacgagttatgcggcctctgggtggccaactttggcgcttcttgcctcgcggactcgagttttggggcccagccgaggggactgcgagagtcttgctgaggcagttctgcgcgcggcaagcggaggcgtggcgtgcctcggggcgccctggctattgcctgggaacccggcccctcagcactgcgaggccgccacccccgtggtcgcagaagggccccggagactccacgcgcccctcgaagcccgggcctgtttcctggaagtctttagcaatcacatttgctattggaggagctttactggctggaatgaagcacgtcaagaaagaaaaggcagagaagttagagaaggaacggcagcgacacatcggcaagcctttacttgggggaccgttttccctcacaactcatactggggagcgtaaaactgacaaggactacttgggtcagtggttattgatttattttggcttcactcattgccctgatgtctgtccagaagaactagaaaagatgattcaagtcgtggatgaaatagatagcattacaactctgccagatctaactccacttttcatcagcattgacccagagagggacacaaaagaagccatcgcaaattatgtgaaagaattttctcccaaactggttggcttgactggcacgagagaagaggtcgatcaagtggccagagcatacagagtgtattacagccctggccccaaggacgaagatgaagactacatagtggatcacacaataataatgtacttgattggaccagatggtgagtttctagattattttggccagaacaagaggaagggagaaatagctgcttcaattgccacacacatgaggccatacagaaaaaagagctagccaaagcagtgttgctggatgcagtattctcttgctaagaggaaggaaactgtctcgcataggagcctatataaatataaacatatatacgtgcactctacagaatggccttcataccatgagaacatttctgttttggatggggatgttacccttgcgttcaaccaaaattgattcttggaactgtaaagattacaacccaaagtctcccaggaagctgtggggagaccagaggatcaagctgaagtgaagccagtgaagagcccacctgtggaaggacatggcggggcgaggcacagccagtgcattcctgcctgcgaacaggccctcccagcagctttgccgcctctccatcgtcttgggcccttgctcaaatagctgtgggactgaatttcacagaaaagaatataatttccatagtgctcttg

SEQ ID NO: 379816 - DNA, 1679 bp, Homo sapiens
cggaaatcgcggggagggtcaaaggagacccggtctccgaggctcatggcgatgctggtcctagtacccggacgagttatgcggcctctgggtggccaactttggcgcttcttgcctcgcggactcgagttttggggcccagccgaggggactgcgagagtcttgctgaggcagttctgcgcgcggcaagcggaggcgtggcgtgcctcggggcgccctggctattgcctgggaacccggcccctcagcactgcgaggccgccacccccgtggtcgcagaagggccccggagactccacgcgcccctcgaagcccgggcctgtttcctggaagtctttagcaatcacatttgctattggaggagctttactggctggaatgaagcacgtcaagaaagaaaaggcagagaagttagagaaggaacggcagcgacacatcggcaagcctttacttgggggaccgttttccctcacaactcatactggggagcctcattgccctgatgtctgtccagaagaactagaaaagatgattcaagtcgtggatgaaatagatagcattacaactctgccagatctaactccacttttcatcagcattgacccagagagggacacaaaagaagccatcgcaaattatgtgaaagaattttctcccaaactggttggcttgactggcacgagagaagaggtcgatcaagtggccagagcatacagagtgtattacagccctggccccaaggacgaagatgaagactacatagtggatcacacaataataatgtacttgattggaccagatggtgagtttctagattattttggccagaacaagaggaagggagaaatagctgcttcaattgccacacacatgaggccatacagaaaaaagagctagccaaagcagtgttgctggatgcagtattctcttgctaagaggaaggaaactgtctcgcataggagcctatataaatataaacatatatacgtgcactctacagaatggccttcataccatgagaacatttctgttttggatggggatgttacccttgcgttcaaccaaaattgattcttggaactgtaaagattacaacccaaagtctcccaggaagctgtggggagaccagaggatcaagctgaagtgaagccagtgaagagcccacctgtggaaggacatggcggggcgaggcacagccagtgcattcctgcctgcgaacaggccctcccagcagctttgccgcctctccatcgtcttgggcccttgctcaaatagctgtgggactgaatttcacagaaaagaatataatttccatagtgctcttgcttgcctcttcttgagttctttgctcttctgagttcttggtggctaataacagtcagattagggtctctgccattcagagttgatgcttgaaaactttagttttccttattaatgaatatcactatcagatttgactaatgaagaggaaatctattgtttgggggaaaaaaaacatcagtttgatttctctaggggttcttttatgtgatttttagctaagtggtgtgccaggttttcagtgacataccaaatggaaataagaggatattgatcacgagtgtgatgctgagtacctttctgcatatactggattgtactttgtgtaaagtaaacatactcagttttgctgttca

SEQ ID NO: 379817 - DNA, 947 bp, Homo sapiens
tctaggaaatgcaagttctgcagtgcgcagctggaggcaacgtgaacgtggagatgaacgcagcccccggggtggacctcacagttctgctgaacaacatgcgagctgagtacgaagcccttgcagagcagaaccgcagggacgcggaggcctggttcaacgagaagagcgcctccctgcagcagcagatctctgaggatgtcggagccacaacctcagcccggaatgagctgactgaaatgaagcgcactcttcaaaccctggaaattgaacttcagtctctcctagccacgaaacactccctggagtgctccttgacagagaccgagagcaactactgtgcgcagctggcgcagatccaggctcagatcggggccctggaggagcagctgcaccaggtcagaaccgagaccgagggccagaagctggagtatgagcagctcctggacatcaagctccacctggaaaaagaaattgagacctactgtctccttataggaggagatgatggagcctgtaagtctgggggttacaagtctaaagattatggatctggaaatgtgggaagtcaagtcaaagacccagccaaagccatagtggttaagaaagttcttgaggaggtagaccaacgcagcaaaatacttaccaccaggctccactccctggaagagaaatctcaaagcaattaatttgagatgcaacagagaacgtatgccacatagcccctgcgaagaaaaggcattatgtatctgtccagaaaaatgtgcatgtctaagaaaaatgtctaacctgttgtctttctgttactttctttctgggcaatcaatgacagcatctccccattcatctagaagaatgccacacacaaatatgactcatttgattatcctacagaaatctgttgtcaattctttgtattcaataaacctcttctttagcaagttaaa

SEQ ID NO: 379818 - DNA, 269 bp, Homo sapiens
tccggttgaattttcaaagagaaatgggaagaaccttctctgtggcatgtacagagtaaattctgtctctaaatgctttttccaattaagaataattatgagaacggactgtaggacatatataaagaataaaacaaaaattgaaattgaaatatattatcttggaagaggtgttatctatgtcaaaaaaacccacaagattattgaagaatgaacatgtagttcccaaccaccttagttgctggccactctagagccatgtgggtttt

SEQ ID NO: 379819 - DNA, 370 bp, Homo sapiens
gcaaatgtattccttctcttatccctgtataatcagcagcagtcccgataattattataacacatttctagataatgttttagggtcttcagaagaaaatgagcataaaagtgaaatttcaaaaaatattgctgctatccaattatgtaactatggacaagccacacaattcttaaatgaacaaaattattaattttaaataaatgatgggtcacttttcttccactaggaatgtagagatcaggtaataagaaatttgaactttgtgactcattttcaaagatgagtataattgagaggaatgttcagaagtaaatgatgtaaatataaaaataaaataagacagtttatcagtagtctaaaggaaaat

SEQ ID NO: 379820 - DNA, 3175 bp, Homo sapiens
  misc_feature (743)..(743): n is a, c, g, or t
  misc_feature (1925)..(1925): n is a, c, g, or t
  misc_feature (2787)..(2787): n is a, c, g, or t
  misc_feature (2872)..(2872): n is a, c, g, or t
tttagaatcaaccctgctgctccgattctaattttcagttcagattttgcaggcacgagtgtgggtccctgagtacctgccctttgaattcttttggtgaggactgagcattcccccaggagcttctcatcgaaccccaaaaacacggcccccaattcaccacctcatcccttcccaggacctgctgaagctcacacccgtggaccacccagactgcctgccgctacaggatgccctccgcatctcccaggacttctttccggcatcagtgtggacattgaccccactggactgcagtcacagtggactcccaaggggcaggtgagctcatggcacagcaaggcctcacgctcaggttgaggagcccagagtggaccagatccccagtcccttctctgatggcacaggcatctctctgtgccccttgtctctgcaaccctgattccccattcccagccaaggagaggtcttcgatccctggtcatgctgatttgattccctgtggcattgtgggccctaggctgagagctttaagcccagtctctcaataatcctaagaatccagtgagccagaagagggcacaggaccagagagtctctccaggtacgccacacagtctttgagctgtgtcagagctggattgtttacctggggctggctgtttggaggccccaggcattgtcccccacaccagggaagttggcctgtgggtaactcgttcttgaatgcagacacctgcctntgccatcagggtgacccaggagggtgagggagcaggacatctcagccactttagattgacttgcatgagcaagagccaggaagggagccccacagagggaaaggctggtattagaggtggccaaggccatccaggttgctggaacattccacatgggctcctggatgtcaaacagcagtttccctgggggcccttcttggtggaagggtgggggttagtccagtgaggagaaacaacactcagcatgagaggcacaattaacccctgtgggtcggcagcctggcccagatcaaaggcttcctgaccgatagaggttgttatgtggccctgaggagtgaagactgcctgggttcatgctgctttgttacatttgtgagtgaggggcaggtctggagagtgtctgatggcgcataaggagctgtttctgtgcagttgttggttctggtttgcaaaaccatgggatatcactagtttggtttactctggggatatctgaaaaatctctggaagacttagagtagcatcagttgtaggtcatcttaactgtacggtttcaatgcacgcacctacatctcgcagtgtacacaggtcacacggtgtgtcatagagacaggaaagactgggacagatggttgcagccccgtggaagcccccctgactctgagggtggctgaggggaaactctggaaatcctcatggagtagaaaccatccagagcccaggtgagaggtggctgcaggtccccccaggacacttctgcagccccaaccgaaggcagcccggggtctcccatcccctgggtatatttgttaaaaatgtgtccatcatatatgaatttgggtttggtatttggttccctcgttgtgtcttgttctgtatttttgtgttaatgtcaataccgtattgtttggaccactatagctcttctatgtcatttgtaatcagggagcataatacatccatgtactttgtatttcccagtgatgagattgctagatgacatagtaattgtatttttagtttgaggaggaactgccaactattgctcatagtgtgtacacccatttacattcccaccagtagtgtctaagagtttccctctctgtaaatttacacttgtgattgcgttttaaaaattctgtttttgcttttggcaacattcattttatgtggatggggacnctgtcttagtgtgatttgatttaaatttttgtgatgattagtgatgtgggcaagctttttttttttacctgttcatttcctgccttcttttcagaaatgtctatcagttctttgcccaagttttgttggattagttggttttgtgtattttcctaccttatgttagtttctggtatatgtcagatgaacaccttcagctccatgattccttatacttaccgcctcacagcatcctgtgctcattctgtctcttccgctcaatgaccactgcctgtgtcccattcttctccctccccagggcagggcccagacctcctgcctcccatggaagcctggcccaatgcggggccagccacatggcacagtgtccagggcctttctgagtggtggacaggccagttggcatggaaaatggtgtctggggtttctgagttgactgttgaatgcagactcaacccactcacaaccagtcaccaccactgccacccaagcaagccacctgggagcctggaaattgctctgcccacctcttgccatgggcacagacacataccatagggaggactgccaacagacccagcccacctgcccctggtccccaaggatgacattcaggggcctggggatcaccccagcccaccaaccacaacctgtgtccatgcaggctcccacagggcctaaggacaggctgacccctcccagagaacccccaccccacaagtacccaagtacttcacccagggacctgggtatagacctgccctgccttccacttctggcatgtgcttgcaccagcagggggcctaacaacaggccagaccacctgatgccagcatcaggtcccatgccatcgtgggacctngggatcaccctgctctacccatgagcaccatcaggggccccggggcaggttcatcccacctggcatatgtatgcatgaactaganatgtgtttgcctgctgggcatggtggctcacgcctgtgatcacagcactttgggaggccaaggcgggtggatcacctgaggtcaggagtttgagaccagcctggccaacatggtgaaaccctgtctctactaaaaatacaaaaattagccaggcgtgctggcatgtgcctctagtcccagctactctggaggctgatgcaggagaatcgcttgaactcaggaggcggaggttgcagtgggccaagattgcgccactgctcttcagcctgggggataatccgattgagactccatctcaacagc

SEQ ID NO: 379821 - DNA, 931 bp, Homo sapiens
tgagtgaaccccaacctttggagaaccccagtgagcctctccagatgtctgagtgggcctgtggctcctttttcagcaccaagggacccctcttctgtctgtgtcaaggagaaagaccagccagaaggaatctcagacatcctttaccagtgccatcgcagacttggtttctatgtgtttttccaaacagtgagtgatacaggccattgaggcagaatgctgagagctgcttcaagtgagggggaagagaaaagtaacaaacatgaatcacagcacccccagcagattttccagagttttaggctctagggacccctttgtttgctgtgtcttagatcattgagtccctacaagaaccctgtgaggttcgtcttctcactactccctgttccagaggagccaaccgaggctccgagaggtgcatcttcaagacagagccagtaggggacagaggcacctctgtgtcttggagggggatggacactcaccttctaaccagtagttccaaaaagtgtggcacagtgataaagtcccaggaggggcccaggcaggtggcataggaggagatgggtttagttagaaaggctggaaccagggactcccaacagcttctccccagtgccgggctggaaagttagcatcctgcagatctcattttcatactagggggacaaggagggacatgggagtcagtggtaacaccatggaccaccagaggatcgggatctggaactcacaccaagaagcaccaacccttcagggacttgtgcatatggagaacctgggtgcccatggtgaaaagcgttctaggctttcaaagtaacattgcatgtgaggatggagaatgataaaacgattcctgccttcaaggcttccgcacgacatttttaaactgggggcagctagcaccatgagtccgaactacgaggca

SEQ ID NO: 379822 - DNA, 791 bp, Homo sapiens
  misc_feature (764)..(764): n is a, c, g, or t
  misc_feature (771)..(771): n is a, c, g, or t
agcaatttgggaggtggaggaggagcaggaggaggaaaaggaaacaaccaggccagtcatggtgtctcgtgcctacgaggaggaggaagcggaggaggggaaaaaaaggaggagcgaaaagaaacggagcagaaggagttggaggaggaggaggtggaggaggaggagggaaaagaaatggagcagcaggaggagggaaaagaaatggaagaggaggagcaggaggaaaatgaaatggaggaggaggaggaggaaaaagaaatggaggaggaaaaagaaacaggaggaggaaaaagaaacggaggaggaagaggaggaggaggacaaagaaacagccaggccggacgtggtggctcacccctgtagtcccagctgctcgggaggctgaggcagaagaatcgcttcaacccgggaggcagagtttgcgtgagccgagatcgtgccactgcactccagcctggagacagagtgagactccatctcatctcaaaaaaaacaaaagaaaacaaaacaaaaacaaaaaaacagccaggagccgtggctcacgcctgtaatcctagcaatttgggaggcgataagaattattgaaatgcagtaagaattaccgaaatgttgaacaaagacaccaagtgagcacgtgctgttggaaaaatagcaccaatactacactagctcaacacaaggttgccacaatcctgtaatatattaaaatggccagcagggcggagggtgctaacttattaccttgagcagagcgtactagnagactcncactgcactgaaccttttaa

SEQ ID NO: 379823 - DNA, 2052 bp, Homo sapiens
tgagtgaaccccaacctttggagaaccccagtgagcctctccagatgtctgagtgggcctgtggctcctttttcagcaccaagggacccctcttctgtctgtgtcaaggagaaagaccagccagaaggaatctcagacatcctttaccagtgccatcgcagacttggtttctatgtgtttttccaaacagtgagtgatacaggccattgaggcagaatgctgagagctgcttcaagtgagggggaagagaaaagtaacaaacatgaatcacagcacccccagcagattttccagagttttaggctctagggacccctttgtttgctgtgtcttagatcattgagtccctacaagaaccctgtgaggttcgtcttctcactactccctgttccagaggagccaaccgaggctccgagaggtgcatcttcaagacagagccagtaggggacagaggcacctctgtgtcttggagggggatggacactcaccttctaaccagtagttccaaaaagtgtggcacagtgataaagtcccaggaggggcccaggcaggtggcataggaggagatgggtttagttagaaaggctggaaccagggactcccaacagcttctccccagtgccgggctggaaagttagcatcctgcagatctcattttcatactagggggacaaggagggacatgggagtcagtggtaacaccatggaccaccagaggatcgggatctggaactcacaccaagaagcaccaacccttcagggacttgtgcatatggagaacctgggtgcccatggtgaaaagcgttctaggctttcaaagtaacattgcatgtgaggatggagaatgataaaacgattcctgccttcaaggcatcgtcccggtgtttgtcagctgtggggcaacagcaccctctgtgtcagcaacctgcatgaagagcatcatccctgcaagtcctcaaggcctggggaggcctcatcccctcctcatttcagcaacagcacacaggacaatacgctctagaagaactctttgacttaaaggtatatgattgtttttgttcctttaacatgaacgtgagtctggagaaacagctacggccatcccagccctggccaaggggaaaatgccggaagactccagggtgggaggaagcgcgtcccaaggcccaggatctgcgaggcgacttggggaaaacgcaggcaggacctgctgaagctcacacccgtggaccacccagactgcctgccgctacaggatgccctccgcatctcccaggacttctttccggcatcagtgtggacattgaccccactggactgcagtcacagtggactcccaaggggcaggatccacctctgatgttcagtgaagactaccagaaaagtctgctagagcagtaccatctgggtctggatcaaaaactcagaaaatacgtggttggagagctcatctggaattttgccgatttcatgactaaccagtagtgggtgcagtggaccccatcatggagaagttcaacacatccagcctacgaccagcacctgtgggaggtggatattcaaggcagcagagcctacagccggggcatggagaaggcagggctcctcgccaaggccgagatggatggttttacgttgaactaattatatactcaagtgctgtttaactgtgtgccttgacctcttctctcctttaatgatccctgtggcccacatggcttatgggtaaaggtgtgctgggctcgagatgccccctcccagggtgcacttccaggactcagctcctggacagggacagtcagtcatcaggaataaggtgggatcagggcaggggctctcggctgctgatgcctgctcacctgacccctggtattgctgctacgtgctataggtggttgaggagtgggcccagggcaccttcaaactcaaccccaatgatgaggacatccacacagccaacaagtgccacctgaaggtacgaaccctgcagccccactgccttcctggcctcccctctccaccttgcgcggggccactttgagcattagcacc

SEQ ID NO: 379824 - DNA, 1580 bp, Homo sapiens
tgagtgaaccccaacctttggagaaccccagtgagcctctccagatgtctgagtgggcctgtggctcctttttcagcaccaagggacccctcttctgtctgtgtcaaggagaaagaccagccagaaggaatctcagacatcctttaccagtgccatcgcagacttggtttctatgtgtttttccaaacagtgagtgatacaggccattgaggcagaatgctgagagctgcttcaagtgagggggaagagaaaagtaacaaacatgaatcacagcacccccagcagattttccagagttttaggctctagggacccctttgtttgctgtgtcttagatcattgagtccctacaagaaccctgtgaggttcgtcttctcactactccctgttccagaggagccaaccgaggctccgagaggtgcatcttcaagacagagccagtaggggacagaggcacctctgtgtcttggagggggatggacactcaccttctaaccagtagttccaaaaagtgtggcacagtgataaagtcccaggaggggcccaggcaggtggcataggaggagatgggtttagttagaaaggctggaaccagggactcccaacagcttctccccagtgccgggctggaaagttagcatcctgcagatctcattttcatactagggggacaaggagggacatgggagtcagtggtaacaccatggaccaccagaggatcgggatctggaactcacaccaagaagcaccaacccttcagggacttgtgcatatggagaacctgggtgcccatggtgaaaagcgttctaggctttcaaagtaacattgcatgtgaggatggagaatgataaaacgattcctgccttcaaggcatcgtcccggtgtttgtcagctgtggggcaacagcaccctctgtgtcagcaacctgcatgaagagcatcatccctgcaagtcctcaaggcctggggaggcctcatcccctcctcatttcagcaacagcacacaggacaatacgctctagaagaactctttgacttaaaggtatatgattgtttttgttcctttaacatgaacgtgagtctggagaaacagctacggccatcccagccctggccaaggggaaaatgccggaagactccagggtgggaggaagcgcgtcccaaggcccaggatctgcgaggcgacttggggaaaacgcaggcaggacctgctgaagctcacacccgtggaccacccagactgcctgccgctacaggatgccctccgcatctcccaggacttctttccggcatcagtgtggacattgaccccactggactgcagtcacagtggactcccaaggggcagagatggggtctctctatattgcccaggccggtggtgaactcctgggttcaagccattcacccacctcgccctctggaagtgctgggattataggcatgagccactgcgcctggccttggatgagttcttattcaccttcctgtcggcctccacatgaagctccccaaaccttgtcctctttggtcttgtaaaaaaatatatataattaaaaaattaaagacagggtcttacta

SEQ ID NO: 379825 - DNA, 4366 bp, Homo sapiens
  misc_feature (1934)..(1934): n is a, c, g, or t
  misc_feature (3116)..(3116): n is a, c, g, or t
  misc_feature (3978)..(3978): n is a, c, g, or t
  misc_feature (4063)..(4063): n is a, c, g, or t
tgagtgaaccccaacctttggagaaccccagtgagcctctccagatgtctgagtgggcctgtggctcctttttcagcaccaagggacccctcttctgtctgtgtcaaggagaaagaccagccagaaggaatctcagacatcctttaccagtgccatcgcagacttggtttctatgtgtttttccaaacagtgagtgatacaggccattgaggcagaatgctgagagctgcttcaagtgagggggaagagaaaagtaacaaacatgaatcacagcacccccagcagattttccagagttttaggctctagggacccctttgtttgctgtgtcttagatcattgagtccctacaagaaccctgtgaggttcgtcttctcactactccctgttccagaggagccaaccgaggctccgagaggtgcatcttcaagacagagccagtaggggacagaggcacctctgtgtcttggagggggatggacactcaccttctaaccagtagttccaaaaagtgtggcacagtgataaagtcccaggaggggcccaggcaggtggcataggaggagatgggtttagttagaaaggctggaaccagggactcccaacagcttctccccagtgccgggctggaaagttagcatcctgcagatctcattttcatactagggggacaaggagggacatgggagtcagtggtaacaccatggaccaccagaggatcgggatctggaactcacaccaagaagcaccaacccttcagggacttgtgcatatggagaacctgggtgcccatggtgaaaagcgttctaggctttcaaagtaacattgcatgtgaggatggagaatgataaaacgattcctgccttcaaggcatcgtcccggtgtttgtcagctgtggggcaacagcaccctctgtgtcagcaacctgcatgaagagcatcatccctgcaagtcctcaaggcctggggaggcctcatcccctcctcatttcagcaacagcacacaggacaatacgctctagaagaactctttgacttaaaggtatatgattgtttttgttcctttaacatgaacgtgagtctggagaaacagctacggccatcccagccctggccaaggggaaaatgccggaagactccagggtgggaggaagcgcgtcccaaggcccaggatctgcgaggcgacttggggaaaacgcaggcagaaaataaagcatgcgaagaagttaacttggtgccattgggcagagggtgagagcccagcaaaccggagagatcagctgcccacatcagtggcgaggagtgcggagagtgggtgaggctggggcaggaagcaggccagcctgccagagcccaggaacaggtgaaaggacctgctgaagctcacacccgtggaccacccagactgcctgccgctacaggatgccctccgcatctcccaggacttctttccggcatcagtgtggacattgaccccactggactgcagtcacagtggactcccaaggggcaggtgagctcatggcacagcaaggcctcacgctcaggttgaggagcccagagtggaccagatccccagtcccttctctgatggcacaggcatctctctgtgccccttgtctctgcaaccctgattccccattcccagccaaggagaggtcttcgatccctggtcatgctgatttgattccctgtggcattgtgggccctaggctgagagctttaagcccagtctctcaataatcctaagaatccagtgagccagaagagggcacaggaccagagagtctctccaggtacgccacacagtctttgagctgtgtcagagctggattgtttacctggggctggctgtttggaggccccaggcattgtcccccacaccagggaagttggcctgtgggtaactcgttcttgaatgcagacacctgcctntgccatcagggtgacccaggagggtgagggagcaggacatctcagccactttagattgacttgcatgagcaagagccaggaagggagccccacagagggaaaggctggtattagaggtggccaaggccatccaggttgctggaacattccacatgggctcctggatgtcaaacagcagtttccctgggggcccttcttggtggaagggtgggggttagtccagtgaggagaaacaacactcagcatgagaggcacaattaacccctgtgggtcggcagcctggcccagatcaaaggcttcctgaccgatagaggttgttatgtggccctgaggagtgaagactgcctgggttcatgctgctttgttacatttgtgagtgaggggcaggtctggagagtgtctgatggcgcataaggagctgtttctgtgcagttgttggttctggtttgcaaaaccatgggatatcactagtttggtttactctggggatatctgaaaaatctctggaagacttagagtagcatcagttgtaggtcatcttaactgtacggtttcaatgcacgcacctacatctcgcagtgtacacaggtcacacggtgtgtcatagagacaggaaagactgggacagatggttgcagccccgtggaagcccccctgactctgagggtggctgaggggaaactctggaaatcctcatggagtagaaaccatccagagcccaggtgagaggtggctgcaggtccccccaggacacttctgcagccccaaccgaaggcagcccggggtctcccatcccctgggtatatttgttaaaaatgtgtccatcatatatgaatttgggtttggtatttggttccctcgttgtgtcttgttctgtatttttgtgttaatgtcaataccgtattgtttggaccactatagctcttctatgtcatttgtaatcagggagcataatacatccatgtactttgtatttcccagtgatgagattgctagatgacatagtaattgtatttttagtttgaggaggaactgccaactattgctcatagtgtgtacacccatttacattcccaccagtagtgtctaagagtttccctctctgtaaatttacacttgtgattgcgttttaaaaattctgtttttgcttttggcaacattcattttatgtggatggggacnctgtcttagtgtgatttgatttaaatttttgtgatgattagtgatgtgggcaagctttttttttttacctgttcatttcctgccttcttttcagaaatgtctatcagttctttgcccaagttttgttggattagttggttttgtgtattttcctaccttatgttagtttctggtatatgtcagatgaacaccttcagctccatgattccttatacttaccgcctcacagcatcctgtgctcattctgtctcttccgctcaatgaccactgcctgtgtcccattcttctccctccccagggcagggcccagacctcctgcctcccatggaagcctggcccaatgcggggccagccacatggcacagtgtccagggcctttctgagtggtggacaggccagttggcatggaaaatggtgtctggggtttctgagttgactgttgaatgcagactcaacccactcacaaccagtcaccaccactgccacccaagcaagccacctgggagcctggaaattgctctgcccacctcttgccatgggcacagacacataccatagggaggactgccaacagacccagcccacctgcccctggtccccaaggatgacattcaggggcctggggatcaccccagcccaccaaccacaacctgtgtccatgcaggctcccacagggcctaaggacaggctgacccctcccagagaacccccaccccacaagtacccaagtacttcacccagggacctgggtatagacctgccctgccttccacttctggcatgtgcttgcaccagcagggggcctaacaacaggccagaccacctgatgccagcatcaggtcccatgccatcgtgggacctngggatcaccctgctctacccatgagcaccatcaggggccccggggcaggttcatcccacctggcatatgtatgcatgaactaganatgtgtttgcctgctgggcatggtggctcacgcctgtgatcacagcactttgggaggccaaggcgggtggatcacctgaggtcaggagtttgagaccagcctggccaacatggtgaaaccctgtctctactaaaaatacaaaaattagccaggcgtgctggcatgtgcctctagtcccagctactctggaggctgatgcaggagaatcgcttgaactcaggaggcggaggttgcagtgggccaagattgcgccactgctcttcagcctgggggataatccgattgagactccatctcaacagc

SEQ ID NO: 379826 - DNA, 1956 bp, Homo sapiens
tgagtgaaccccaacctttggagaaccccagtgagcctctccagatgtctgagtgggcctgtggctcctttttcagcaccaagggacccctcttctgtctgtgtcaaggagaaagaccagccagaaggaatctcagacatcctttaccagtgccatcgcagacttggtttctatgtgtttttccaaacagtgagtgatacaggccattgaggcagaatgctgagagctgcttcaagtgagggggaagagaaaagtaacaaacatgaatcacagcacccccagcagattttccagagttttaggctctagggacccctttgtttgctgtgtcttagatcattgagtccctacaagaaccctgtgaggttcgtcttctcactactccctgttccagaggagccaaccgaggctccgagaggtgcatcttcaagacagagccagtaggggacagaggcacctctgtgtcttggagggggatggacactcaccttctaaccagtagttccaaaaagtgtggcacagtgataaagtcccaggaggggcccaggcaggtggcataggaggagatgggtttagttagaaaggctggaaccagggactcccaacagcttctccccagtgccgggctggaaagttagcatcctgcagatctcattttcatactagggggacaaggagggacatgggagtcagtggtaacaccatggaccaccagaggatcgggatctggaactcacaccaagaagcaccaacccttcagggacttgtgcatatggagaacctgggtgcccatggtgaaaagcgttctaggctttcaaagtaacattgcatgtgaggatggagaatgataaaacgattcctgccttcaaggcatcgtcccggtgtttgtcagctgtggggcaacagcaccctctgtgtcagcaacctgcatgaagagcatcatccctgcaagtcctcaaggcctggggaggcctcatcccctcctcatttcagcaacagcacacaggacaatacgctctagaagaactctttgacttaaaggtatatgattgtttttgttcctttaacatgaacgtgagtctggagaaacagctacggccatcccagccctggccaaggggaaaatgccggaagactccagggtgggaggaagcgcgtcccaaggcccaggatctgcgaggcgacttggggaaaacgcaggcagaaaataaagcatgcgaagaagttaacttggtgccattgggcagagggtgagagcccagcaaaccggagagatcagctgcccacatcagtggcgaggagtgcggagagtgggtgaggctggggcaggaagcaggccagcctgccagagcccaggaacaggtgaaaggacctgctgaagctcacacccgtggaccacccagactgcctgccgctacaggatgccctccgcatctcccaggacttctttccggcatcagtgtggacattgaccccactggactgcagtcacagtggactcccaaggggcaggatccacctctgatgttcagtgaagactaccagaaaagtctgctagagcagtaccatctgggtctggatcaaaaactcagaaaatacgtggttggagagctcatctggaattttgccgatttcatgactaaccagtgtaagcggcagtttggctcatgggataatgtacccgtcctcattttttcaggttgccttgcccattctggacacttagattgtaagaatattggaaacaaagcgaggagctggtttaatccatgcaggttgcgttgaggatttcctaggaaaagtgagttgtgcttagtaagtaggaaagcagtcaggcccctgcttcccaaatacagtcaaaaagcaaacaggagagtctgctatagtgagatgtaaatggctagcttgcctttttcttgtctatttcatagccaaggaggaaggaaaaactggacc

SEQ ID NO: 379827 - DNA, 2074 bp, Homo sapiens
tgagtgaaccccaacctttggagaaccccagtgagcctctccagatgtctgagtgggcctgtggctcctttttcagcaccaagggacccctcttctgtctgtgtcaaggagaaagaccagccagaaggaatctcagacatcctttaccagtgccatcgcagacttggtttctatgtgtttttccaaacagtgagtgatacaggccattgaggcagaatgctgagagctgcttcaagtgagggggaagagaaaagtaacaaacatgaatcacagcacccccagcagattttccagagttttaggctctagggacccctttgtttgctgtgtcttagatcattgagtccctacaagaaccctgtgaggttcgtcttctcactactccctgttccagaggagccaaccgaggctccgagaggtgcatcttcaagacagagccagtaggggacagaggcacctctgtgtcttggagggggatggacactcaccttctaaccagtagttccaaaaagtgtggcacagtgataaagtcccaggaggggcccaggcaggtggcataggaggagatgggtttagttagaaaggctggaaccagggactcccaacagcttctccccagtgccgggctggaaagttagcatcctgcagatctcattttcatactagggggacaaggagggacatgggagtcagtggtaacaccatggaccaccagaggatcgggatctggaactcacaccaagaagcaccaacccttcagggacttgtgcatatggagaacctgggtgcccatggtgaaaagcgttctaggctttcaaagtaacattgcatgtgaggatggagaatgataaaacgattcctgccttcaaggcatcgtcccggtgtttgtcagctgtggggcaacagcaccctctgtgtcagcaacctgcatgaagagcatcatccctgcaagtcctcaaggcctggggaggcctcatcccctcctcatttcagcaacagcacacaggacaatacgctctagaagaactctttgacttaaaggtatatgattgtttttgttcctttaacatgaacgtgagtctggagaaacagctacggccatcccagccctggccaaggggaaaatgccggaagactccagggtgggaggaagcgcgtcccaaggcccaggatctgcgaggcgacttggggaaaacgcaggcagaaaataaagcatgcgaagaagttaacttggtgccattgggcagagggtgagagcccagcaaaccggagagatcagctgcccacatcagtggcgaggagtgcggagagtgggtgaggctggggcaggaagcaggccagcctgccagagcccaggaacaggtgaaaggatccacctctgatgttcagtgaagactaccagaaaagtctgctagagcagtaccatctgggtctggatcaaaaactcagaaaatacgtggttggagagctcatctggaattttgccgatttcatgactaaccagtagtgggtgcagtggaccccatcatggagaagttcaacacatccagcctacgaccagcacctgtgggaggtggatattcaaggcagcagagcctacagccggggcatggagaaggcagggctcctcgccaaggccgagatggatggttttacgttgaactaattatatactcaagtgctgtttaactgtgtgccttgacctcttctctcctttaatgatccctgtggcccacatggcttatgggtaaaggtgtgctgggctcgagatgccccctcccagggtgcacttccaggactcagctcctggacagggacagtcagtcatcaggaataaggtgggatcagggcaggggctctcggctgctgatgcctgctcacctgacccctggtattgctgctacgtgctataggtggttgaggagtgggcccagggcaccttcaaactcaaccccaatgatgaggacatccacacagccaacaagtgccacctgaaggtacgaaccctgcagccccactgccttcctggcctcccctctccaccttgcgcggggccactttgagcattagcacc

SEQ ID NO: 379828 - DNA, 1437 bp, Homo sapiens
tgagtgaaccccaacctttggagaaccccagtgagcctctccagatgtctgagtgggcctgtggctcctttttcagcaccaagggacccctcttctgtctgtgtcaaggagaaagaccagccagaaggaatctcagacatcctttaccagtgccatcgcagacttggtttctatgtgtttttccaaacagtgagtgatacaggccattgaggcagaatgctgagagctgcttcaagtgagggggaagagaaaagtaacaaacatgaatcacagcacccccagcagattttccagagttttaggctctagggacccctttgtttgctgtgtcttagatcattgagtccctacaagaaccctgtgaggttcgtcttctcactactccctgttccagaggagccaaccgaggctccgagaggtgcatcttcaagacagagccagtaggggacagaggcacctctgtgtcttggagggggatggacactcaccttctaaccagtagttccaaaaagtgtggcacagtgataaagtcccaggaggggcccaggcaggtggcataggaggagatgggtttagttagaaaggctggaaccagggactcccaacagcttctccccagtgccgggctggaaagttagcatcctgcagatctcattttcatactagggggacaaggagggacatgggagtcagtggtaacaccatggaccaccagaggatcgggatctggaactcacaccaagaagcaccaacccttcagggacttgtgcatatggagaacctgggtgcccatggtgaaaagcgttctaggctttcaaagtaacattgcatgtgaggatggagaatgataaaacgattcctgccttcaaggcatcgtcccggtgtttgtcagctgtggggcaacagcaccctctgtgtcagcaacctgcatgaagagcatcatccctgcaagtcctcaaggcctggggaggcctcatcccctcctcatttcagcaacagcacacaggacaatacgctctagaagaactctttgacttaaaggtatatgattgtttttgttcctttaacatgaacgtgagtctggagaaacagctacggccatcccagccctggccaaggggaaaatgccggaagactccagggtgggaggaagcgcgtcccaaggcccaggatctgcgaggcgacttggggaaaacgcaggcagaaaataaagcatgcgaagaagttaacttggtgccattgggcagagggtgagagcccagcaaaccggagagatcagctgcccacatcagtggcgaggagtgcggagagtgggtgaggctggggcaggaagcaggccagcctgccagagcccaggaacaggtgaaagaagagtgagctcctcaccctgaattctcagggttcacaggcatgcaggggctgtggggagtacaatca

SEQ ID NO: 379829 - DNA, 1210 bp, Homo sapiens
  misc_feature (1103)..(1103): n is a, c, g, or t
  misc_feature (1169)..(1169): n is a, c, g, or t
tgagtgaaccccaacctttggagaaccccagtgagcctctccagatgtctgagtgggcctgtggctcctttttcagcaccaagggacccctcttctgtctgtgtcaaggagaaagaccagccagaaggaatctcagacatcctttaccagtgccatcgcagacttggtttctatgtgtttttccaaacagtgagtgatacaggccattgaggcagaatgctgagagctgcttcaagtgagggggaagagaaaagtaacaaacatgaatcacagcacccccagcagattttccagagttttaggctctagggacccctttgtttgctgtgtcttagatcattgagtccctacaagaaccctgtgaggttcgtcttctcactactccctgttccagaggagccaaccgaggctccgagaggtgcatcttcaagacagagccagtaggggacagaggcacctctgtgtcttggagggggatggacactcaccttctaaccagtagttccaaaaagtgtggcacagtgataaagtcccaggaggggcccaggcaggtggcataggaggagatgggtttagttagaaaggctggaaccagggactcccaacagcttctccccagtgccgggctggaaagttagcatcctgcagatctcattttcatactagggggacaaggagggacatgggagtcagtggtaacaccatggaccaccagaggatcgggatctggaactcacaccaagaagcaccaacccttcagggacttgtgcatatggagaacctgggtgcccatggtgaaaagcgttctaggctttcaaagtaacattgcatgtgaggatggagaatgataaaacgattcctgccttcaaggcatcgtcccggtgtttgtcagctgtggggcaacagcaccctctgtgtcagcaacctgcatgaagagcatcatccctgcaagtcctcaaggcctggggaggcctcatcccctcctcatttcagcaacagcacacaggacaatacgctctagaagaactctttgacttaaaggtatatgattgtttttgttcctttaacatgaacgtgagtctggcggctgcggcattttgtcngctggttgtggtatgaacgggaggtgaccctgctggagcgatggatccaggacctgtgcacagagnggtgctgaggattggcagtgcccacttctatacctcgtgtt
